United States Patent Application Publication US 2006/0134663 A1 - sequence listing, part 86

SEQ ID NO: 242531 - DNA, 963 bp, Homo Sapiens
ttggcttccctgcgagtatgcttcctactgtttgagagcatgcgagagcacctcaagttccaaatggagatgtacatcaaaaagcttatggagatcatcactgtggagaaccccaagatgccttatgagatgaaggagatggcactggaggccattgtgcagctctggcgcatccccagctttgtcacagagctctacatcaactatgattgtgactactactgttccaacctctttgaggaactcacaaagctgctgtccaagaatgccttccctgtgtctggtcaactctatacaacacacctactatctcttgatgccctattgacagtgattgacagcaccgaggcccactgccaggctaaagtcctcaacagcctcacccagcaagagaagaaggagacagccagaccaagctgtgagatagtagatggcacccgagaagctagcaatactgagagaactgccagcgatgggaaagctgtaggcatggcctcagacatcccaggcctgcatctgccaggtggagggcggctgccaccagaacatgggaaatcaggatgcagtgatctggaggaagctgttgactctggggctgacaaaaagtttgcccggaagccaccccgattttcctgtctcctgccagatccacgggaactaattgaaattaaaaacaaaaagaagctgctaatcactggcacagagcagttcaatcagaaaccaaagaaggggattcagtttctgcaagagaaaggcctcctcaccatcccaatggacaacacagaggttgctcagtggctccgagagaaccctcggctggacaagaagatgattggagagtttgtgagtgaccgcaaaaacattgacctgttggagagctttgtgagcaccttcagttttcagggtctgcgactggacgaagccctccgcctctacctggaagccttccgtttgcctggggaa

SEQ ID NO: 242532 - DNA, 1102 bp, Homo Sapiens
  misc_feature (106)..(115): n is a, c, g, or t
caagaaaacactaaatctaatttaactagcataaattgaaaacttttaaagaagtttcaatctgaaaggctaaattaatactggaatattaagagtaaaattgaannnnnnnnnnctggaacagcaagtagcaataatcaatactacttaattgacaagacacaacagaggtagtgttgatagtttttctcatcttcacacatacaaaaacacagaaaagccctcaaaccagtaagcacagagcacgtatagctatggcatatattgcttaccttaaattcatccatcctcgtctctcaaacatgggaaccaacctagatggccaactaggactcagcaagcattcagagtcgctcaggtcaccagatcacgagcctgtttacttctagttggcagttctatgttccttcctctcttcattatttatagacttaacctgaaaacctggtgcaatcataaactaccaagtggccctggcttctggaggtatgccaagtatgttttaactaataatcacacttctacaaacctagaaggaaataattagaggcagacaaatattatgcctaagacagctatatgaaagtcattttacaacagcaaaatactataaataacctaaaggccgaaagatcctaaataagttacagtatagtcctgagtcgaatattacatagtcattaaagtacggatgggataagatgctcatgatgtgattaatgataaataaaataaccaggacacaaaactatatacaaacattgctatgaacttataggtaaaaccttagggaagtaattagaattaaatgaggccaaaagggtgggccccctatgatgggattaatccccttataagaaaagaaagagacaggagattcttgctctttcctctacataaggacacagcaagaaggcagccatccacaaccaggaaaaagggtcctcaccagacaccgcatctgctggcaccttgatcttggacttcccaacctctagaactgtgagaaataaatgtttgtcatctaagccttccaggctgtggtattttttatagcagcctgaactcagacaaatatcactgctatttttagaaaatccaa

SEQ ID NO: 242533 - DNA, 1426 bp, Homo Sapiens
  misc_feature (122)..(244): n is a, c, g, or t
ttggcgagcgcttcgtcccggccctaagtctcggagactggccaagatcaccgcttgcaccgcgctgttgggcgaggcccggtcccgtctctttcccaggcctgagattctcgcccggcacnnnnnnnnnnnnnnnnnnnnnnnnnnnnnnnnnnnnnnnnnnnnnnnnnnnnnnnnnnnnnnnnnnnnnnnnnnnnnnnnnnnnnnnnnnnnnnnnnnnnnnnnnnnnnnnnnnnnnnnnnnntgcgggccccatggagctgatgtttgcagagtgggaggacggagagcgcttctcattcgaggattcggaccgttttgaggaggattcactctgttccttcatctccgaggccgagagcctctgccagaactggcggggatggcgcaaacagtcagcggggcccaattcccccactggcggcggtggcggaggtggcagtggcggtaccagaatgcgagatggactggtgatcccattggtggagctgtcagcaaagcaggtggcatttcatatcccatttgaagtggtggagaaagtttacccaccagtgcctgagcagctacagctccgaattgctttttggagcttccctgagaatgaagaggacattcggctgtattcgtgcctggccaatggcagtgcggatgagtttcagcgaggggatcagctcttccgcatgcgggctgtgaaggacccattgcagatagggttccacctgagtgctacagtggtgccacctcagatggtccctcctaaaggggcctacaacgtggctgtgatgtttgaccgctgccgggtcacttcctgcagctgtacctgtggggctggggccaaatggtgcacccacgtcgtggcactctgtctcttccgcatccacaacgcttctgcagtctgcctgcgagccccagtctcagagtccctgtcccggctacagagggaccagctgcaaaagtttgctcagtacctcatcagtgagctccctcagcagatcctccccacagctcagcgtctcctggacgaactcctgtcttcccagtcaacagccatcaatacagtgtgtggagctccggaccccacagcagggccctcagcatcggaccagagtacttggtatctggatgaatcgacactcactgacaacatcaaaaagacactgcacaagttctgtggcccctcccctgtggtcttcagtgatgtgaactccatgtatctgtcttccacggagccgccagccgctgctgaatgggcatgtctgctgcgccctctgaggggccgtgagccagagggcgtctggaacctgctaagcattgtgcgggagatgttcaagcggagggacagcaatgctgcccccttgttggaaatcctcactgaccagtgcctcacctatgaacagataaacaggttggtggtatagcgtacgta

SEQ ID NO: 242534 - DNA, 1332 bp, Homo Sapiens
ttggctatctgcaaggcccgtcggtgggctcgggtagcccagcgcctcaactatccaccaggcaaaaatattggctccttgctacgctcccactacgaacgcattgtttatccctatgaaatgtaccagtctggagccaaccttgtgtgtaacacacgtccatttgataatgaggagaaggacaaggaatacaaaccccacagcatccccctacgacagtctgtgcagccttccaagttcaacagctatggccggcgggccaagagactgcagcctgatccggaacccacagaggaagacattgagaagaatccagagctgaaaaagctacagatctatggggcaggccccaagatgatgggcctgggcctcatggccaaagacaagactctgcggaagaaagataaggaggggcctgagtgtccccccacagtagtggtgaaggaggagttaggtggggatgtgaaggtggagtcaacatcgcctaagaccttcctggagagcaaggaggagctgagtcacagcccagaaccctgcaccaagatgaccatgaggctacggaggaaccacagcaatgcccagtttattgagtcatatgtctgccggatgtgttctcgaggggatgaggatgacaagctcctgctgtgtgatggctgtgatgacaactaccacatcttctgcctgctgcctcctctgcctgagatccccaagggtgtctggcggtgcccaaagtgtgtcatggcggagtgtaagcggcccccagaagcctttggctttgagcaggctacccgggaatacactctgcagagctttggcgagatggccgactcctttaaagctgactacttcaacatgcccgtgcatatggtgcccacagaacttgtggagaaggagttctggaggctggtaaatagcattgaggaagatgtgactgttgagtatggagctgacatccattccaaagaatttggcagcggtttccctgtcagtgacagtaaacggcacctaacccccgaagaggaggagtatgctaccagtggttggaacctaaatgtgatgccggtgttggaacagtctgtactgtgccacatcaatgcagatatctctggcatgaaggtgccctggctctacgtgggcatggtcttctcagccttttgctggcatattgaggatcactggagttactccattaactacctccactggggtgagccgaagacctggtatggggtgccctcacttgcagcagaacatttggaagaagtgatgaagaagctgacacctgaactatttgatagccagcctgacctcctgcaccaacttgtcaccctc

SEQ ID NO: 242535 - DNA, 877 bp, Homo Sapiens
ttttgttcctagagttaagtatattaaattatacattctaccccacattagattttaacacattttttaaaaagaagtaaaatacaggtatttattttaaatatgtccgaggaagtatttacctgggacaagaaagaaaagtgacagtaacaaattttgttatatttgaatctaaagtttattaaatagtagctttaaaaatttatgattcagagtgagctccttttagggttagagagcttatggaacagttcagtggcaccaggggttaagggacacctttatggagtagttagttcatgccagcatattccaggaccatgcaattattcatcaatataatggatgccaattgtaatgcagattaataaaggagttaaaggaaagcaaaattaatgctttacgtggataagaatcctttctcaaggattaaaaaaattcatatcttttaaatgtctctgttgtcacactctctccccacatgctgatagtcatttccctctattttagcgcctactgcattctacctagtatatcagatcattagtgaattattggaaggataggactctgccttgttgatctggaatggtgttttacatgtaactggcactcaacaaatgtgactgatgataagtctcaaagggaacagatgagcaaggcctgattgcatttccactttctttaatacctagttcaaccctataccccatgcaaaatgatagagcttaattctggcatctctgatacacaaacccagatgatttgaactctcttctgtgtggagctatgagacagcaggttaaaactgaaggaaggagaaaaattaaaaaccaggaacttatataatttgcctcgaaaatacatatacacccaa

SEQ ID NO: 242536 - DNA, 1544 bp, Homo Sapiens
  misc_feature (1471)..(1489): n is a, c, g, or t
taaataacagaagatttgtttccaaaaagtaaggtgccattcagaagtatataattgaattaacataaaggaaaatactgaataaaaaacagaacatgagatattaaaggttaaaactttctgttcagttatttgtatctgaagttaagacaatgacataaactgagctttcaaatactgctaatttttccacttaaatgtagatcaagtaccatatagactattttgttctagaataaagtttctttgaaaaaggaacatatttataatcaaatttctgtagataaatggcaaaattttcagagaactagcttgaaatggatttagtagaaagaatgactgcttcctttaaaaaaacaaatatagaaatcttgcttccacgtaactttttaaaaactaatgtccattgtttttcccaatctgaatatgtttccatacatgtatgtatttgcaatttctattttccaatatgtaaaaagttggtagacaatgaagtagtgtgcaaatttttaggagagaaaacaatccctactggtttactaccaaactctcacagttatatagaatctattagcactataaactaactcaaaatgcaggcttcagaaaaactgcttcaatagcctccctatcaatctgtcgccttctatgaagtcttcacctgctattattccacaggctgagaattacttctgaaagaaatggtcaattttttcaacagcttggtatgttgacagcttagcaacggtacttgaatcacctctttaaaaaaacaacacaccactaaaaacacacttatcatccatgcttggtatatctcacaacaaattattaggaatgtctcatggttcaaattcacacgcaatcccataaaaaggatatgcagcatctctgcacaccacattgcaggaagaaaaacaaatggaccatatcttcattagagaatagccaaaatcacttgaaaaggttattagtgacaattctaaataccagagatacatgtaggaaagaaaatgtttttcctcagggaatggaaatgttttgtgggacattccttcacagttggcatgactgtttgggggactgactaaatgctttatcacacatctgcatttacaaggtcttcactgttaatcacagaaaacatttttgttccttccagattgctcttgcttctgtagacaattatatgctaattattattcaacataacagtgagagcaaaagtgacaatactgcaaacacaaccgcaatttaaggagccaaaaagaaatatgctggcaagctaaatgcttacacacaaaaaagttagacttttaaagtgtgtgagaaactctgaaaaaaatatttcaagttcttcagtgctcttatgacattttagggggaaacagtggtttctttaaaataatattttaatcctcctatctcatactgtttataagtatgagatacttttgacaaactggactgnnnnnnnnnnnnnnnnnnnccttttatggccttgtagaataagagaggtttttgtgctttatttattcatccaa

SEQ ID NO: 242537 - DNA, 1008 bp, Homo Sapiens
ttggctcctttataccatgatcttcttgctttccagttacttcctctgattttcccaaaaaggtttgactcttttcgtcctgagagtccgccctgttctcttctggcacctgcagctccctcttcctctcttctccctgttctggacctccctgaccctgagccttcctctccatatcctcccgctcccactcaccgtcattcagaccctctggctccccagtgagccccattctttctccttgtctcccaagcatcacatcttgtacctgttcctgtttttgcttctgttctcccttttcatcattaacctgctctatcatctgttcctcccctaatagcccatcggcacaaacatcctccctcagagttccttccccccgaaatcctgcttcctgctgtccctgctcctccagaacttggacctcctggggatgcaagagcccttgactttcctgcagctcctcagatggcagctcttccccctgcctgatagtcccactttcagcgccttcattctggttggtctctgcaggatgctcttcgcagggagaataatatctggtctgaccagagttatctgaagaggtttcctcttcttcttctgcctgtccagatcccaatgtcaaagaagtaagtcctggccaaaattccacctcctcttcttcgcttcccaggtcactggaaaatggggccatgtctagatgctcactctgaatggggcaggcccagagctctgggggagctagagtccttgcttgtcggcctgctaggctctggggtactgcctcccagtgttccggagtgtcacaggcctcagccacaaggctttcctgattgggctccacatctgcagaaccttccttgggaaaagagggcatcgtctcaatcgcatagtcacacacatcccttaactcactctgctgagttgctgagagtctgtgttcctctctccacttataggatgggtcctcatcttcttgagcttcaagccccaaggcagagccaa

SEQ ID NO: 242538 - DNA, 791 bp, Homo Sapiens
ttggattgatccttgaggctgtgcccctggggcacccacctggcagggcctaccaccatgcgactgagctccctgttggctctgctgcggccagcgcttcccctcatcttagggctgtctctggggtgcagcctgagcctcctgcgggtttcctggatccagggggagggagaagatccctgtgtcgaggctgtaggggagcgaggagggccacagaatccagattccagagctcggctagaccaaagtgatgaagacttcaaaccccggattgtcccctactacagggaccccaacaagccctacaagaaggtgctcaggactcggtacatccagacagagctgggctcccgtgagcggttgctggtggctgtcctgacctcccgagctacactgtccactttggccgtggctgtgaaccgtacggtggcccatcacttccctcggttactctacttcactgggcagcggggggcccgggctccagcagggatgcaggtggtgtctcatggggatgagcggcccgcctggctcatgtcagagaccctgcgccaccttcacacacactttggggccgactacgactggttcttcatcatgcaggatgacacatatgtgcaggccccccgcctggcagcccttgctggccacctcagcatcaaccaagacctgtacttaggccgggcagaggagttcattggcgcaagcgagcaggcccggtactgtcatgggggctttggctacctgttgtcacggagtctcctgcttcgtctgcggccacatctggatgg

SEQ ID NO: 242539 - DNA, 647 bp, Homo Sapiens
  misc_feature (93)..(147): n is a, c, g, or t
  misc_feature (186)..(475): n is a, c, g, or t
tgcccgtgtgacctctcggtgatggtgccagccttgacctctgggctgagacagtgggtcgggctctccactgtggagacgccttgcctaccnnnnnnnnnnnnnnnnnnnnnnnnnnnnnnnnnnnnnnnnnnnnnnnnnnnnnnncacgagctggggccccctccctgtgccccttacttttannnnnnnnnnnnnnnnnnnnnnnnnnnnnnnnnnnnnnnnnnnnnnnnnnnnnnnnnnnnnnnnnnnnnnnnnnnnnnnnnnnnnnnnnnnnnnnnnnnnnnnnnnnnnnnnnnnnnnnnnnnnnnnnnnnnnnnnnnnnnnnnnnnnnnnnnnnnnnnnnnnnnnnnnnnnnnnnnnnnnnnnnnnnnnnnnnnnnnnnnnnnnnnnnnnnnnnnnnnnnnnnnnnnnnnnnnnnnnnnnnnnnnnnnnnnnnnnnnnnnnnnnnnnnnnnnnnnnnnnnnnnnnnnnngggccccttccttttaaatgtcagcctctggagtgaccatctgtgttggctgggagctcttcggaatgtcccatccagttgctgaggctaatgatcacctctcaggtgcgctggtcccattctctgcgctgtttatgtcactttatgcctggactcctcccaacaatgccaa

SEQ ID NO: 242540 - DNA, 1080 bp, Homo Sapiens
ttgggaccaaagaaaccaatccctcttcaggatcagactgtcagagatgaaaaaggaaggtataaacgattccacggggcctttagcggaggtttctctgctggatacttcaatactgttggctcaaaagaaggatggacaccctctacctttgtgtcttcacgacagaacagagcagacaaatctgttcttggtcctgaagattttatggatgaagaggatcttagtgaatttgggatagcacctaaagcgattgtcaccacagacgattttgcctccaaaaccaaagacagaatacgagaaaaggctaggcagttggccgctgctactgcccctattcctggagccaccctccttgatgacctcataacgccagcaaaattatctgttggtttcgaattgctaagaaaaatgggttggaaagaaggacaaggagttggtcctcgagtaaagagacggccacgccgacagaaacctgatcctggagtcaaaatctatggctgtgcattaccccctggaagctcggaaggatctgagggtgaagatgatgactacttgcctgataatgtgacctttgcacccaaagatgtcacacctgtggatttcacacctaaagataatgtgcatggtctagcttacaagggcctggatccccaccaggcactgtttggaacttcgggagaacattttaatcttttcagtggtggttctgagagagctggcgatcttggagaaattggactgaataaaggaagaaaattgggaatttcaggccaggcttttggtgtaggtgccctggaagaggaagatgatgatatctatgccacagaaactctatcccagtatgacactgttctgaaggacgaggagcctggagacggactctatggctggacagcacccaggcagtataaaaaccagaaagaatcagagaaagaccttcggtacgttggcaaaattttggatggattttccttggcttctaaacctttatcttctaagaaaatctatccacctccagagctgccaagagactatcgaccagtgcattatttcagacccatggtggtcgccacctcc

SEQ ID NO: 242541 - DNA, 1218 bp, Homo Sapiens
ttggcaaagagccctctgcactagcgccgcaggaccgcggacccgagttggaggcatctgtccacccatgtggttccagacacgttcatgtggccaccatgaccccgtcggcatcacaggggtaaccaagagagcagcaagttcctgggacagaggagacagaagggaatttccaggttcttcaggacgttcacaaccacactgagaagcatctttgcagataagtatttaaacttaccagcccatagcctaccagcctgccctcttctggtctgtgcaggaaagtgtagtatcctagaatgccaaagtgggaggggaaatgggtgatgtagctcattctcttttctacctctatggaagaaagaaagagcctgtccccattttgtggggtcccagaaagggtgattttcacacttcacatttggcgttagggctagtatttcacaaacattaccgtctggaacttttgaaggctgagttaaatgacttcatcttgtgtacttgtagaactgctattagaaggaggctggggactccctgatgatgtgaaccagcccttctcttctcagttttagcactttgtgatcatatttataaaccttggacagggctccttggccttagagttaagtgaagagttaacactgtgactttagatgcatttttctcagtgtaagtgtctgagctcatctccagttctggactcgtgcccccactcccgggtgctgacagcaagctctgaagatatgctgagagagctccctgactctcctgactcaggtctgccagttgatgaagacagcacagttgttaccaaaaacaaaacctggcagatggtcctaggtcaggattagtggtcattctctggtcttctccagactggtgacacagggtggtcttaaaaagtcctagtccagcctctggctccccgaatttcctctggtgcatggggcatcaggaaagggcaggggagaaggagggggagcagaaaaataactgaggctgggcagaagggtcccttccatttccatccattgcttcaaacaatgggtgattaccgtgcaccttgagtgaatgtcaaggcaggaagggttccagggccacccagtgtggcaggagcagagctgggatcagattctggattcctgactctccgttcagctgctattcagctatcaccaggctgctgagtttgtcctacttctcctgggtcacatt

SEQ ID NO: 242542 - DNA, 1314 bp, Homo Sapiens
tgggtcaagatggcgggagcagctacccaggcttccctggagtcggccccacggatcatgcggctggtggccgaatgcagccgctccagggcccgggcaggcgagctgtggctgccgcatgggacagtggccactcctgtgttcatgccagtgggcacgcaggccaccatgaagggcatcacgaccgaacagctggacgctctgggttgccgcatctgcctgggcaatacctaccatctgggtctaaggccgggacccgagctgatccagaaagccaacggtctccacggcttcatgaattggcctcataatctgctaacggacagcggcggtttccagatggtgtcgctggtgtctctgtccgaggtgacggaggagggcgtccgcttccgctccccctacgacggcaatgagaccctgctgagcccggagaaatccgtgcagatccagaatgcgctgggctcggacatcatcatgcagctggacgacgtggttagcagtactgtgactgggccacgtgtggaggaggccatgtacaggtcaatccgctggctggaccggtgcattgcagcccatcagcggccggacaagcagaacctcttcgccattatccagggtgggctggacgcagatctccgggccacctgccttgaagagatgaccaagcgagacgtgcctggcttcgccatcgggggcctgagcgggggtgagagcaagtcgcagttctggcggatggtggcgctgagcacctctcggctgccgaagacaagccccgatatctgatgggggttggctatgccactgatctggtagtctgcgtggctcttggatgtgacatgttcgactgcgtcttccccacacggacagcgcgctttggctctgccctggtgcccactgggaacctgcagttgaggaagaaggtgtttgagaaggacttcggccccatagacccggagtgcacctgccccacgtgccaaaagcacagccgcgccttcctgcacgcactgctgcacagtgacaacacggccgcgctgcaccacctcacggtccacaacatcgcctaccagctgcagctcatgagcgccgtccgcaccagcatcgtggagaagcgcttcccggacttcgtgcgggacttcttgggcgccatgtacggggatcccaccctctgtcccacctgggccactgacgctctggcctctgtgggaatcacacttggctgacctggcattgggagatagagggaggaaggaagggagggaggggctggaagatactgaaggattcctttttgaaaggttttttttattgtaactt

SEQ ID NO: 242543 - DNA, 2263 bp, Homo Sapiens
  misc_feature (957)..(1018): n is a, c, g, or t
ccctctacatttaactattaaaaaagttttttattaataaatgggctcctctgtggttcatatacaatcataagtgaactttaaattccattttatacaaacatctcaaaaaatattgggagtgaagtatggtaggaaatattgctcacattgctaattaacatgcgtatatgaaaggaggaaaatgttttgttagtgcatatacctccagagcagaaaacccacccaaaacaaaagatctaaaataaaacatacagtagctgattacaaaaaaaggtaatgtccacaaaattaagtttttcatgctattctactttccagtactatgcttcaggtaatcaatttgcatggctagatgttggatacttgaggtatataagaagggaaacctgcatgttgaggaaaatctgtcatcttaagggttgtttctttttgtttgtttatcctggtactttaacatttttaaaagatattttatttacatcaaaattcactgaactacaatgacattccaattataatagatgacaaacaacgcctctatcactaggcacttttaaaagggagttcaggctttacagaacccttctgatgcaatcccatgtatgatatgacatcatcccaccaccctcgtcccactaaaattaccctctggggaaatattaccttatatagcctgattaatttactatggaagaaattagcataaaatgaccaaagtaaatgcatcatttaagactaataaaacagctgaagatgtcaggtttgaaagaggagacaaattgtgtatatttaaaactaattaaataatttaaatttgacctatactttatatattagtgagacacaaatataggctattgtcttttaaaatttcattcacataatggaaaatttcttgtttattaaaaatatcacattttgagactagaaacagtaaagtgcatgaaaagtttnnnnnnnnnnnnnnnnnnnnnnnnnnnnnnnnnnnnnnnnnnnnnnnnnnnnnnnnnnnnnnacacagacacaaccttttcctgttactgtgccataattaacatcaagtagccaaccaatttttccccagaaaacagtattctgttcactgcctcttgagtcacagattttcaactggcccctcctaggcaaaaaaaagattccaacatacctaaaggcatcaacaattgggaataaaccagtagcttcttaattcaaccctgacagacaactgaaacaaagattaaaagcatatgatggccatttggcagctagagtcaggaaaatgacccaacgttttcaactactgccccaaatttgttctctctcccaaatcctttgcactgtcatctcaagaaaccaacagccacataatctatgttggaaacacataaaatatctgtatgattttccccatctgaaactttgatcaaggcctttttattcagcagacttttttcttcttttaacatttgactataatggcaaaaatgacataggtcatataacatctgttttcctggcacaaccagacagaaggttgaattggaataaggaaaaattcattccgtgggcatcctaaacataccacattctattttcaaggtatgtggcaatacagattacttactttttctctataaataaacttgagagacaggcttagaattaatacttccaataaggttatatataaaggacaaaaaaaccaaagtgattcctcaaaaaaactccaaaccagcatttggccaacaaattgtcatgtggtgttacatgctggattataaaagtatactgtgcaaccatctttaatttttcaaattttcttaccatgtatagaggctatatcatagtttatggactgaacaagtaaatttaagtactctgttaatgtgcaaatgactttggaatccaaaagtcagttataaaggaaaaattcaaggttttccctggaaggcatatcatcattcagtttaaaatactgtatttatagtttttaaaaattgccttttataaaatggttggctcactgaaaccattcaaaagaaagtatttgttttggaaaaacaaatacactgttattgggcctcaaattggtaatttatcaattttgaatgctggctgttaatacaatataaagaaggtccaatttaaaaacatgttaaattaaaattttgtaaagagagtaatactttggttccagccctactgccaaatgataccaatatgcacaaaaatgtacaaagtcttacccaacttttttgta

SEQ ID NO: 242544 - DNA, 995 bp, Homo Sapiens
  misc_feature (133)..(149): n is a, c, g, or t
  misc_feature (877)..(917): n is a, c, g, or t
aaaacagcatgaacaaacggggacacctttccctgcacacagcaatcaaagacaagattaaggggccacccatcagtagccttgaagattttcagctacccaatatatgcacaaggtcacatttggttcctgnnnnnnnnnnnnnnnnnaacatgacaatttcacactattaacagcacacgggcctggctgtacgtttttaactatgacatttcccatatgatattcgaggcctggtggacacatgactgacagtgcacatccagagattctacactcatcagacacagacatgaccgcaaaggtatcaaagtgaccccactttaagcagtgaaaaaagacctttccttttgttctcaaatcagcattttctaaagtcaggtgttagccttttgccaacagtgtgtacttgatggtaattatggcaacatagagcttcaaacaagatcgcctgacaacactgccgcatacacatacggcacccaggactcagaatcagtctgtcctggcaaatccttccaaatgacatcatagtgttgtcacattgaaagcaactcacagccttcagtgaggaaaggggagaggagaatgagaaggggagaaaagccaaggcagggacaaaggcccggtgggggatgggggttgcagggtggaggggggtctttattgctatatgcaccataaaacaaaggaaaaccaaatgaacttctgtgtgtaatgttcacttgtgaaggtattttaaagcatgaaatgcttaagtcttaaaaaacatatgctatagcttaccggcattttcaagggcaggaacctgctctctcatatgagccgataagagctttgcaatgcaatttattttctaaataccactctattcttnnnnnnnnnnnnnnnnnnnnnnnnnnnnnnnnnnnnnnnnngcctggccaatcactcccacagtttgtggggatcatatgtccacagaaccatcacatgcaacgaaaaaagccctaacc

SEQ ID NO: 242545 - DNA, 999 bp, Homo Sapiens
ctttgtacaaaaaagttggcgcccctgccccgaaaaaacctagtccaacatggcggcgcccagcggagggtggaacggcgtcggcgcgagcttgtgggccgcgctgctcctaggggccgtggcgctgaggccggcggaggcggtgtccgagcccacgacggtggcgtttgacgtgcggcccggcggcgtcgtgcattccttctcccataacgtgggcccgggggacaaatatacgtgtatgttcacttacgcctctcaaggagggaccaatgagcaatggcagatgagtctggggaccagcgaagaccaccagcacttcacctgcaccatctggaggccccaggggaagtcctatctgtacttcacacagttcaaggcagaggtgcggggcgctgagattgagtacgccatggcctactctaaagccgcatttgaaagggaaagtgatgtccctctgaaaactgaggaatttgaagtgaccaaaacagcagtggctcacaggcccggggcattcaaagctgagctgtccaagctggtgattgtggccaaggcatcgcgcactgagctgtgaccagcagccctgttgcgggtggcaccttctcatctccggtgaagctgaaggggcctgtgtccctgaaagggccagcacatcactggttttctaggagggactcttaagttttctacctgggctgacgttgccttgtccggaggggcttgcagggtggctgaagccctggggcagagaacagagggtccagggccctcctggctcccaacagcttctcagttcccacttcctgctgagctcttctggactcaggatcgcagatccggggcacaaagagggtggggaacatgggggctatgctggggaaagcagccatgctccccccgacctccagccgagcatccttcatgagcctgcagaactgctttcctatgtttacccaggggacctctttcagatgaacctggggaagagatgaaatgtttttt

SEQ ID NO: 242546 - DNA, 1377 bp, Homo Sapiens
  misc_feature (413)..(448): n is a, c, g, or t
  misc_feature (805)..(825): n is a, c, g, or t
tttacaattaacaaagggctctgctactcccccatttactcgctgcaaatgaaaaactggtaagcccaagggtaaagctaaagtattcagggactatgaatttagggtagaagtgaaattaaccaaagtggaacttaatccccctatttctggagtgcaactgagatcaagtaaacttcgctggactttctttcttaactataaaactattaaccagaagggtaaagtcacacaattttacctcccaacaaacttttaaaataaaaatttccaaaaaatttagatgtctaggttttgttatatcttaccaagagttacacagacataaatttgtatttaacttcagttaaacatctattcactttttaaaaatgctgtctgcaaataaactactggacatcttaagcttactnnnnnnnnnnnnnnnnnnnnnnnnnnnnnnnnnnnnctaggacaaaaatctagcaaatggtttcacgtacctttaaacactgattcttaaaaatttatatgctgaaaatgaggtttgagaatacgtattttaaaccatttataatcctaccgtcgactctagtcagaagttatctgagcaaagagaaaataaagcctggcgtagacagtcccatagaaaatagaatccatagccactgggctgcccttcaatttcccaattcattccactaagtctcatgatgcaaatctgtcactttcatagagctatcaaaaacagaagccaagccagatcctccacactttaagatatggttccttattatctattttaacagaagtatcaaaaagtgannnnnnnnnnnnnnnnnnnnngagacagagttcttagccacagtaggacaaagaaaggttcagcaattagccacaagaaaggggacaaccagcaggccacttcctttggtttagcagtgacagaggaggagccctagtggaccagttggccctgtgcaaagaacagaaaggcaatccagataaacgtcatttgtaggatgactctggaggtcctggagggccaggaatgctggctgacaagacagggcactaatcgtagtcaggcaacaaggaggagctgaaagggaacacaagggacagtgaacatcctgcagatccaggaagaagcttccaaaagagatgggcagggagggccagggaggagatggcttggctgatgaaaacgagggaaacagtcacaggcagttacaggaggcacaaccagaaacaggccaggaaactctggggtcatgaaggaggctgaagctgtggctttgggtggatccaaaaaccagtgtgggccttgattcccttgactgcacagtggtataacaatccctgcttcctcacaaggctctccataagaaccaccaa

SEQ ID NO: 242547 - DNA, 1109 bp, Homo Sapiens
tcaaacataccagaatggttttattaagtactatgtttctggatccacccttatttgattctgataattctactttatcaatttaaatattcactcaacatcatcccagatttctgtccttgatgcttaagtcctcagacataaaatattattgataaaaacatgagcctttattttactacagagcatttctttagcttggaaagccaaatttggtcaaaatgaaatataacaatgaatataaatcattttggaagtgaattcaaattatttaaaatattaaatttgatagatatatgtgtcagaatttttaaaaaatttgaatacataaagctgaaacttgaaaaatatacatacatgcttttaagacaaatcactttaaaagcatgatcatttaagtttttaatttagcagttttggctatgttgaaaatgtaaatatgaaatatcacataaaataatgttaagaaaacaaaacaaagcacaatagtcctgaaggctgttgtgagacctcggttcttagtttcaaaaatttaaacgagacgcaaaaaaatgaggatgcagcatagatagatttatcgcaaagtagaaacactattttaaaagtgcggtgcaaaacacccctgagagaaaagcaattcaggatgggctgcttataagaatgagacagcaaagactggaaatagagagactccatttatcggagtcttacataattatttacaaagagttagaaagtggtgttattagtaagcatgttctgggtggtcctcttggtgcacatacacagtggctgtacatgcttgtttatatgtcacatatctcattagcatatgtcacatatctaattagcatctcattagcaaaaactccactcacgtgtgtgttttttagtattacgatgagtaaaaggtcagaggacaagtaaaatcaaaatgtgcatgctctttatgggggaatatccctactagagagctttgcttgaatgagctgaaacgcaatgcaaatgttggggtttattgtgttgataatatgctatcaccaggaaatcgccatggctgctgcatcctgaggacatggtgaccttcttggctacctagccagcttctt

SEQ ID NO: 242548 - DNA, 1514 bp, Homo Sapiens
ttggggagcccagcgcaggccgcagagccggggccgctgtgagccgagaccgcgggccgcggagctcgggcggccggcgcggagaatttgttcctgttgaagagtggctcctcttctaatttccagactccttgaggttttaggagtctggtaggtgaaattttctacctctaaggagaaacagtacctgctccttcctcaagcgcaagccctccattgctatggataccgaatccacttattctggatattcttactattcaagtcattcgaaaaaatctcacagacaaggggaaagaactagagagagacacaagtcaccccggaataaagacggcagagggtcagaaaagtctgtcaccattcaacctcccactggagagcccctgttgggaaatgattctactcggacagaggaagttcaggatgacaactggggagagaccaccacggccatcacaggcacctcggagcacagcatatcccaagaggacattgccaggatcagcaaggacatggaggacagcgtggggctggattgcaaacgctacctgggcctcaccgtcgcctcttttcttggacttctagttttcctcacccctattgccttcatccttttacctccgatcctgtggagggatgagctggagccttgtggcacaatttgtgaggggctctttatctccatggcattcaaactcctcattctgctcatagggacctgggcactttttttccgcaagcggagagctgacatgccacgggtgtttgtgtttcgtgcccttttgttggtcctcatctttctctttgtggtttcctattggcttttttacggggtccgcattttggactctcgggaccggaattaccagggcattgtgcaatatgcagtctcccttgtggatgccctcctcttcatccattacctggccatcgtcctgctggagctcaggcagctgcagcccatgttcacgctgcaggtggtccgctccaccgatggcgagtcccgcttctacagcctgggacacctgagtatccagcgagcagcattggtggtcctagaaaattactacaaagatttcaccatctataacccaaacctcctaacagcctccaaattccgagcagccaagcatatggccgggctgaaagtctacaatgtagatggccccagtaacaatgccactggccagtcccgggccatgattgctgcagctgctcggcgcagggactcaagccacaacgagttgtattatgaagaggccgaacatgaacggcgagtaaagaagcggaaagcaaggctggtggttgcagtggaagaggccttcatccacattcagcgtctccaggctgaggagcagcagaaagccccaggggaggtgatggaccctagggaggccgcccaggccattttcccctccatggccagggctctccagaagtacctgcgcatcacccggcagcagaactaccacagcatggagagcatcctgcagcacctggtcttctgcatc

SEQ ID NO: 242549 - DNA, 966 bp, Homo Sapiens
ttggcctggtgctgaccaccctctgcccggccctccacgccctggtggcggacgggctgaagcctttccggaaggacctcatcaccgggcagcgcaggagcagcccctggagcgtggtggaggggtcggtgaagccaggctccagcacccgctcccttggaaccctgtatagccaggtcagccgtctagccccgctgagcagcagccgtagccgcttccatgcctttatcctgggcctcctcaagtgacaccaagcagttggagctgtggttttccagtctccaggaagatgcaggcctgctctccctcctgtacctgccaacaggatttttctccctggcccgcggtggttgtccctccctgtccacagagctgctgctcctgctgcagccattgtcggtgctcactttccacctggacctgctctttgagcaccaccaccacctgcccctgggcccacctcaggcccctgcccctccaggcccacctccagctctgcagcagactatgcaagccatgctgcactttgggggccggctggcccagagccttcgggggacttccaaggaagctgcttcagacccctctgactctccaaaccttcccacaccagggagctggtgggagcagttgacccaggcctcccgggtctatgcctctgggggcactgagggctttcctctttcccgatgggcaccggggcgtcatgggactgcagctgaagaaggtgcacaggagagacccctgcccacagatgagatggcaccaggcaggggcctctggttgggaagactatttggagtgcctgggggccccgcagaaaatgagaatggagccctaaagtccaggagaccatctagctggctgcccccgacagtgagtgtgttggctcttgtgaagcggggggcacctcccgagatgccttctcctcagagcttgaaggcctcagcaccagatggtgcaaac

SEQ ID NO: 242550 - DNA, 1140 bp, Homo Sapiens
ttggtttttatatcaaaaaaatatatactttaaatagcaaataatatgaactttaaaaaatgctgtggcctcattaaactttggtaatagcttttctttttacttcagaaatccaaacattagagaattcaccaaagtaatcctctttagaagggcatcttgaattatattatccatccgtatttatggagattggtaaagtagttgaaccgttgacttggtgatctgaaacatacataacatgtcaacacataattagcgtatttctgtttgtattaattttggaaatttatcttcctttgattttatttaatattttttatttcttaagttcaagaggtagtgattgattgtaacaagggccaatctgagaatttgacttatatgtggacatttttccctacagatctggaaagcacaattgtgattttctcaaatgcagacaattcagagatattcacaattaataaacacaattaattaatgaagtcaccttcaaatttccagagccatacatgtatatattgtcagaatctgtccatgacaaacacaaaactgaagagctgttttcaaagaaaaaagattatttcatttaattattttgttggataattgtctagttagaacttccaaaaagatacttacaaacataattcacaaatttgaaataatttctgaagttgattagctatctcatatcttttatcaggtcattttttatatatgtaggcacaaacaataagtatgttctcttctgtttgggaaaataatttggaataaaatagaaattagataatgaaaccaaaaaccttctcaaatttaggccttatttaactcatgactggtttctatgcacaagaaaatactaaaccaaatatatggtaggactgttattctcttctgcatcttatccctattttgtttctgcctttatttgtaaaaattgtcttaattgatggtacatttgccaagacaaaggttcagaattactaattttagatattatgatattctgaaataactatttttatcctgtagttctatgattatatgatttgtaaataagaagcctaaccaatttaaaattcctgactttagtctcatatatcttgtcagactgtctcgggttcaaattccaaa

SEQ ID NO: 242551 - DNA, 1788 bp, Homo Sapiens
taatcccagttattacttgattttaaagaaggtctccaggatgatactaacagatagggttgtgaattattgttcaaatagcactattgtctatctttatcctagttctttttaaatataaacattagtggacttaagaagctttttcctatactttctgtgataacacttattattttattttttccacctttatgtcacttattttcctttctgggggaatctcttactctatccggaaagttttttccagggattcagatagtctcaatttctctaaccctatacctacaatcaatacttgataacaaaccaatctatgatttcattgctaatgattcccaaattttgatccccagtctagaactcagacctcaaacttaaacattccagttgcctactggacatctacaaatgtatgttacttgggtatgtcaaatttcatatgtattaagctggacttctctttctcttcatcttgtttcttcctttcctattctctgttaccgccatctaacaatcacataagtgaaaaatctgtttgtcactctagatacctccctatcactttatccttacatcgaagtcaagagatttaccttccttatatctctcatacccatcagctcacttctcttcctactgctaatgctttgggaccactaacacattttgccacagacacaacctccttgctggtctctgtgaatctggtaatgccttattccaataggtttccatacaacctccagaataaccatttcaaaatacaaaacagatcatgtgaatgcaccatggaaaatattttgtggtttgccatcattggggatgtagcctatggccatattatgacaggccgagggagaaaatctaagtgcttggccttcaagatcaaggagaaacaaagtttttgacctagagcttaatttatgcagaaaagtgttttaagaagattgatgtggcagtagtaggggaaacctgaggaaaggaagaccagtggggtaactattataataattcaggtacatggtaataatgatctggtctaagatagtcataatcttataaatgtgctgactggattcacttatatttatgatcgtgaatctcaaatgggcactcacaaaagccagacaatcctacttaacttccatagcaaattcattgtcctactctccaagctaacctatagttcttacttcctctatcatcaaatccccaggacccctctccttgcctctccttctctactgctattctcacctaatattttccagggaaaatagaccatactgtaaaaattaccccaacttccctccgtaaaattttccactctatgtgactgtgtacccaccattctctaacttcctctgatttcgctgaaagacacattcactgcttctttatttttatatcgatcctttcccgtaccaagcctccttgaggacctccatgtcctctttctcttcttcatgttgtttttttccttcatataagcacaaaatatgcctaaatattgtctttaaaaatatttcattgtatatctaatttcaattaacttctcatctctctgctacccttatcaaaaaaattctcacaatacttgcatatatttgaaatctttacacttcaccactgaagtagtggcttaaaatagttaacagattatttgacactcacttcaaaaggtgggaactaattttccatagaaatcgccttagtgacataatgttaacgaatagaataggacagaagtgacagtatgtaacttctgagaataagtcccaa

SEQ ID NO: 242552 - DNA, 1345 bp, Homo Sapiens
  misc_feature (207)..(238): n is a, c, g, or t
ttggcacccaacaaaattatttttaactgtcgtttctgaactgaacctctcacattggcatcttgatttattggtacttaacagtatatatggattttgaactctacacaagggtataaccagaatgaattgaggggtatcaagaaccagattggttacagtagaactctgtaagatgatgtggagagtaaggaaaaggagaagaannnnnnnnnnnnnnnnnnnnnnnnnnnnnnnngggctgctaattttttcccaggattcaaaatatacccgctagaatggaaaacaaaaatttgaatgattacaacattatcgttaacattcaattttgtatttattgttttattgaatatagttcagagtatattaaaatagacctaccacttcaaatgataatgattattataatgtctcttcaccctattctagcacttctgcttgcagtatgtggtttctatttttttcctcttgtataattccacttgcttttaattgttgtttcattatataaaaggaacatcttcccatagcatattctatgaaaggggtttcattccaagttgagttttcaaaaaaaaggtcttcctaaagctaccattttcaacagtccttgttatctagtacaacataaataacagtcttaaaaattgcactaataccagtgccccatggctctccaaatctgttctttgctcttgtatctgctggacgcttgaagacaggtgcactgtctcgtatgtatttgaattatgaacagtaatttctaatgaattctaaaatggtcattgtaagtgaaagcctctcgctaccacttcctcttccaactacataaatatatttcaatgtatttccagttttggaaagttttcaatacatacatcaagtgtttacttagatttttataaaaattttttttacaatctaataatctttggtaaaggaactagagatgcatgcagttgcaaaattaatgtatttattttccagcataattttattaacttcactttttttctctctagtaaatatccagtgtacttatgaactcatgtttggctcttttaaaaccttttctaaaagctagatcagcatttttctattttacaagttttttgtataaaaatgtgaacatatgagatattgtgagaaatcattttaagtttcatttaaatcatggtgcctcttttgatactttcttaaaattgtgcaagaagaaatcatttttagtagtggtcataaatattatccttttggcagtaagctattactaattcagcctgaagctcagtagacaatatgtctacatgtgtttgagtacatcctggatacagtttctcagctc

SEQ ID NO: 242553 - DNA, 1603 bp, Homo Sapiens
  misc_feature (1306)..(1324): n is a, c, g, or t
aaaaacgttttggacatagggaagggttcatgcatgttctgattacagttttcgtgactcttattcttgaagtcttgcttatcaaagtagtccatgaaagatggtctttgtacttgtggtgaggttgcatttcttttcatagttccatcttcttcttcctcatcctcactgtttatcaccatggtccccaagtcggattccaacatcgtgctattatgttcaatcatggtctgggccccttcactcatcgtgcttgtggcccgcatggtgcccacactctccacactagtcttcaccatggtgtgggaatccagctcatcttcatccgaattttcttcttcctcttccaattctcgttgctgttcctcatgtcttttagctttgatctccatagcttctgtgatcaggtctcttaatattgatacaggtttggcattcttgataaaaggatgctgtaaaagttgtgttgcagtagctctctgctcaggattcttcaccaaacactttttaacaaaatcggtgaaatcatcggaccaaagttctggctttctgaatgttggtggtggatttgtgggaatcataaaaatagcctagtacaaatgaaatatccaaaagacagtaagaatcacactagcacaatcaaataaacaaatctctttatctgtctttttatcagactctaaatttgaaaaacaaatttaagctgttctaggatttctagtaacactgaaattcaggaagccagtccatctgctactaatgtaatcatttcccattaaatttcctctatttgaattgtagctcattgagcacatcattctttattttacctattacttttttttatcagtctctaaagaagactatatttctgacccactaaggactttccctaaacatatatattcccaaattttgctactacatgccagatttacttcttgtttcagttttatataagcattgctgcttaaaatgggtagtaggagtccaatttgcttttgcaatccagaatatttaagtaaaattactgctataatttgaaataatacttgacagagccaagacttttctctttttaaatatgagtcaaaatttcaaatgaaaaatttcaaaggtaatatactactttaatttattactaatgattgagtacttataatttagtggtaatgataatacattcagaaacctcaaaaatcaaaagccataaaaagagtccatctcatctctcgcctcctagatagtcaccctggcctgtttttgcttttaatctgagtatgtttatgacccaagaagtagattnnnnnnnnnnnnnnnnnnncctgaagacattctaaatatgaaatacaagtcagttagggggttaatgtagatgtcccaacatgagtaataaaatgttcaaactagaatagtatctacaggaatgaaatggaagaaatgaagcatgagatacttcaaaggaggaaccaagagtacatgctaataatattgttttggagaggtgaaaaaaggaagcatgaaaaattactccagaattcaagaaataagaaataggtaccttaaattgcaaggcactcaggtattttaataattgccccaa

SEQ ID NO: 242554 - DNA, 1228 bp, Homo Sapiens
  misc_feature (357)..(377): n is a, c, g, or t
aatggacctcaggttggctcttgagcccgtgccaaagacccttttcaggcaaaattgtgacaaagtatcatgattttcacagctcttgaggagcgctgagttttgggattcacagcatgggtttctgggctcctcaggctccgaataaggcaaacgctacatgtcttcaccgtacctccctcagctactgtagcttagagtaaggtcagtaagaaaaagtggacatgatctgctttaacaggagatgaggtacagctgaactcatggagacatgaagctggaaaggagaccaaaagcaaaaaaagaggagggaacgcggagggagaaggcaaacacagctagaaactgaaagatggnnnnnnnnnnnnnnnnnnnnncacagttgaaagtttcagtgaaaagctgatgggcagaaccctgattagacctgagatttctcctctttcccatattaaaaacactaaacctctggaagtgatagttgagtaagctgtagttaactgtaacttcccaccacttggggagggaagttcccatactcagaaactgtaccaactccaccccagaaccagacctcctgtagctctgggcaggtggtgtgccagcagccgattaccatgtcccatcgtggttagggaccacgggcctggggacccctgacaacactgcagctggctcagtgccgaaactgaatgttaagacaggtgtggctgagcgcagctggagcctaggtatatacatcaccttcaggtaagtaatttcaagtttgcagtggggcccccttctcaactttggagcaggggaagggacctagctagagggtaggtccagaatttcaacgacgggcagggctggcctcacaacaactcctctcctacattgtcaggacagggaaggagcccagctctgtttcttccagtcctctgctcccagttacccatgttccaaaccgctgcttctggtccttcgagtgccacacctgtaacaggcacagttgaaactatctctgccatgttggtgacactatagctgtgcccactgttgtctctgggaaacatagccgccacatcactgcatctatactggcaacagagctggcaaacagggctctgttgactcactgctagtctgcaacctgtccagtaggagctccttaaacatgcctggacaagggcaaaatgtactactcatcccactcccttaagcaaaaaagtcagagagaagccaa

SEQ ID NO: 242555 - DNA, 998 bp, Homo Sapiens
cactggagcaacaaagggattcctggcaaggatgagaccatccccaatcccaaagctaagaagagggagctcagaggagagttagctggaggaacttcgtatttggggattagcatcatcttcagatcatctggctctgagagaggcttctctgtcttaaaatatatctgttggaacaaaaattaatttgggtcaaactaaatttagagctattacgatgaagaattggggagggcaatacttaggcaataaagaacaaggtggtggagggaggcctgaataataacgatgaaagagagctgaatcagccaatatcctgatataaatgaaatgtcctaccgaatacatcccaggacggagggagtggaaaaaaacacagatttaaagcctctgcagtgagaatctttttcagaggtccagcccccacaaagaattctagacaacagacttaaaacaaatggtcacttgagaagcagagccgtgtcaaagccaagaggtgtcagatatacacttgagatatctatcttagggatgagagaaaaatgtagcttctaagggtatccaaccaaatccccacttgttttattttagaatttctaataagaaattccttcctctgtcgttcggatattatcaatagctctggcttcctgtctctaaagaacttctgcctgattcaaggaactctggctgtttcgttagaaggtccctgttctgatcagtaaggaacatcagcggactctcagatccattcacccttggaacatggcccactgttgcaccttgattttgccttatctcgccaactctccaagctcaggtgggccttctgctgtcactgtgcccaggccagtggtaattctctcctgcctgttgtcattgcttttaggtcgttcttgaaaagatgggtgtcacatagtctgatgtgctttatcaaagaacagaggcaagagcaacacagatcatgggggtatgaatccaggaggtcatcaacccaa

SEQ ID NO: 242556 - DNA, 1162 bp, Homo Sapiens
  misc_feature (86)..(276): n is a, c, g, or t
  misc_feature (308)..(370): n is a, c, g, or t
  misc_feature (857)..(875): n is a, c, g, or t
agtgtgcaggctatactgatgcactttcatcttcttggtcaaatgtattcttaagtgttttatgttatcataaatgggattgtttnnnnnnnnnnnnnnnnnnnnnnnnnnnnnnnnnnnnnnnnnnnnnnnnnnnnnnnnnnnnnnnnnnnnnnnnnnnnnnnnnnnnnnnnnnnnnnnnnnnnnnnnnnnnnnnnnnnnnnnnnnnnnnnnnnnnnnnnnnnnnnnnnnnnnnnnnnnnnnnnnnnnnnnnnnnnnnnnnnnnnnnnnnnnnnnaatttagatatctttaatttctttttcttgtnnnnnnnnnnnnnnnnnnnnnnnnnnnnnnnnnnnnnnnnnnnnnnnnnnnnnnnnnnnnnnnataactgatttttaaatgtacaaacatctgaaaaggacacctcaccaaagaagatatacatatggaaaataggcatatgaaaagaagctcaaggtgatatgagttgtcttccaaaaggtaatgaaaaatgcatattatgaaaaaattatggagtccaaattttttataccaaaataagctcatactaacttgttataacatgcctgaacaggatgtagtttgaggcactaaaaaggtaagacgtaagtttgaaaagagcacctgtcagagcaacataaattctactaaaattgaagcaaaaccaaacatcaaatttagtgtgaagcttgggtggaagaatggtaaaatcattgatgctttatgagaagtttatggggatgattctccaaaagaaatcagcagtttgcaaacagataactcattttaagaagggatgagatgatgctgaagatgaagcacatagcagcaagccttccacatcgtttgnnnnnnnnnnnnnnnnnnnttatgtccatgccttaattgaagaagaacaagaattaacagcacaaacaatagtcaacaccatagatatctaaattggcttagcttacactattctgactgaaaaattaaagttgagcaaactttccactcaatgggtaccaaaactgttgtgcccagatcagctgcagacaagagctgagctttcaatggaaattttaacaagtaggatcaagatcctgtagcaatttcttgaagaattttaacaggagacaaaacatggctttaccagtatgatcctaaagccaa

SEQ ID NO: 242557 - DNA, 2820 bp, Homo Sapiens
  misc_feature (2401)..(2420): n is a, c, g, or t
tacagatagaattcaagactctagctacaatcatcctaatcaaatcttagagcaatatccctttgtttcccaacagggtaagtcagactgcttagctaggagatgtggcagcttccctccagctgtttcatcaactaacatgaagtttaataaatgttagcagtgaccattttaattgcttttttaggaaaaagaagacaaaaaggtgcttttaatactttgaaggtgctttttaggtctccctaatgtaaattatgctgaaatcaactaagacgagctattattaacactttaacagttatccattcctctgggtaggtgtgcacttacattatatgtaagtatctctacaaagtgttagatactggatatgagatacagatttcaataaaacaagggaaaaaataagcaatgaagtaactgtcttctcagttgagctgacaggtttgaagaaagcactcttgacatgttcttactaccacatatcccaaactaagacatacacataaaataacatatctctcctgtgttaacactgatggagacgcactgcaatagtcccatggcagacatatgcttttcttctgaattacagattggcttaatgaaaattaagagtttattattaagcatcttttaatttttaagtgatgttcatacttgacggttcagaaactgccactgccactgtggttaaatcacttggtgtatggaatttaaaataatctaacctagagctatttcccattaatcaaactcatccctaattgtctcttaggaaggtcttctttaaagaagatcgagtagggctcatgaaaaattattggtttgttcttcaaaatgcaaagttacatacccttattttttagccaatttgattatttggtaaagcaagggcataattttaagaaactaattttaatcaaaaatttttacttgcctcaaactaaagctaaccagtagcaaaatgactggactgaatttcatatttaatcttccctgcccacaaagataaatgaaactgctcaaaggcaaaaataaagaaatataattgtgattagaaaagatccagggccaaaacaaataaataggcctcaaggaataaaaaattaattgtattcgtttcttttctatctttacatatacgcatctgtcaatttcactaatactgaacagggaagttcataaaaatgctactctaccacttaaacaataaatgtaagcaatgaatgtacatacaaaggccactggttaatactgccccaagtaacaaaacaatgaaatgtcaggattgtgtcccctacacaatagacaataagcaacaatgaccaaacagaaaagaaacttaaaattggatactttataaatttaagtgtaatctatcaattgcaaattatttttaaaaatcgtaaatttctacaaagcacaatattaaaagcttgcaaattattttaaaatatcctagccaaaagggcataccttacagagcctagaagaatggctcattaggtaacccatttatcccttctacaaacaccctataaattccagaaaacataaacaagaaataaaccttacttctctgaccctcaatatccttaagttgaaattaaacaaacaaaataatcattaagtgcttccagttattaaaaatgaaacagtgctaatattggtgcccaagaaagtgccaagtgattaacaccaatatatggcattcccacccctgaactttaggcattcttgaatgattccattggctagaactctgggccagccacaggaaacccccacctcctccccgaccccatccagaagatcccaggcctatgtgagcatgactcacaatccttggaagggaaaagaaccagaaggagcctttatgagatgggaaacaaggcaaagttgagaagatcattcagcccaagacactccactctgaggttttggctaatactaatgacatacagtttaaaaggataaattaggccacaataccagcattcctccactactgtattcaatccatggtcgaatctctgtactttagaaatactgcttccagtataaacctcctctttgagaaacttacaaactaataaagattttacacaaaagcaaacataaatgtagaaattttaagaaaggacatccttatttgctcaataatacatgaacctaagagaacagtttactatgactttgtttagagtatgtcacatgtaagcagtgtatttctaaaatgttggtgagcaattcatctttaaggcctactgaaatgtgcaaagcattaatcttttaaaaagtggcaactgcaaagtgcagcaaatttttttaagttttagtataaaatagactaggagccatcaatgtatgttccctatgaaaacagatttacacgcgnnnnnnnnnnnnnnnnnnnnttcagtcaatacatcagtatatatgcatacacatacatttactaggacaataaatcagaatgacttggaaaaagaaatggtctagtctcccaattaaatatttcaaagtaaagttttcaacctcataaaacttcctgatgtggactatactcaaatgattagcactcaagagattaactatgtttgattgtatccctcatgaattttcttgttaaaagtttcctttaaaattatgtcaacaacagcatgaatttcctgttttctgtagaaagcttagagccagtatttcccctctcatacaaaccactctggattttcatatttcacaataagtaagtgtggatggcagcaccttagaaattgctattttctggcaggctatcaatctatcataatccaa

SEQ ID NO: 242558 - DNA, 1071 bp, Homo Sapiens
  misc_feature (347)..(356): n is a, c, g, or t
  misc_feature (629)..(644): n is a, c, g, or t
ttctctgtcattttgttaaaaatatttatttaaaaaaatacaactgctgtccatatctagttgcacatatatctattaacatatatgtatacttttagacttgtagtaaatttgctacagtgcttttgtaaagccagcctgcattatacaaagcaaattcctctgtcagttcttacataaaatagatttttaaaaatgtatatctttcctaaaagatgcatatcaccattatagaatttaacaaaatttttgcataaaacctgggaagtgatagaaaaaatgatcacctgattggtcagagcaaccccttactatgtctggagatgcactgagtatcaactacacannnnnnnnnncaagcagcatattattataaagccctcaaagtgcttttgcatcctttcgctcacctctctacactctataaagtttctctgccgtatacagatagaattcaagactctagctacaatcatcctaatcaatcttagagcaatatccctttgtttcccaacaggtaagtcagactgcttagctaggagatgtggcagcttccctccagctgtttcatcaactaacatgaagtttaataaatgttagcagtgaccattttaattgcttttttaggnnnnnnnnnnnnnnnnggtgcttttaatactttgaaggtgctttttaggtctccctaatgtaaattatgctgaaatcaactaagacgagctattattaacactttaacagttatccattcctctgggtaggtgtgcacttacattatatgtaagtatctctacaaagtgttagatactggatatgagatacagatttcaataaaacaagggaaaaaataagcaatgaagtaactgtcttctcagttgagctgacaggtttgaagaaagcactcttgacatgttcttactaccacatatcccaaactaagacatacacataaaataacatatctctcctgtgttaacactgatggagacgcactgcaatagtcccatggcagacatatgcttttcttctgaattacagattggcttaatgaaaatccaacttttttgtacaaag

SEQ ID NO: 242559 - DNA, 1219 bp, Homo Sapiens
gcttttaagtacccaaattctagtgttaaaaaatagaatatttaatgactactcattagtttaaaaatataacactaagtaggtaattttggcagaaagatatttaattacataaaaacattcattactttcaaagtacacactaaccataacaccacatctgtgatactctttataaccattttgaggtttttacaagaaatcctaaaaaggcaaagaaccacagcaataagaaaaagatcaattaaaaatgaaaaacatggcatttaaccacacatattctccagtttataacagtagacacccagtagtgaagacagaatagagctcttgactcacataagactaagtattctgtgtctcttaatttagaatatctagagaataattaacctataggggtatcacctgttgtgtgaatgtggctggtacatagtttttgttattctggatccttgtatcactaaatgcctaatccagatgcttctgactggttccctgaaatttaaatgcagaattcactttcctacagaaacaatgtaataaataataaggcataattgacaatcacagtagtactgtaactaggcacattttaaattaaatatgctttttgagaattctgaatttataattaaaacaaatttcaaatgtaactcactgttgtttgaaaactgcctcaaacctaaacttaattagccacaaattactgaaattcctgaattattagcctcaaaatagcatgagactgaggtaacatagttcccctgctgatctgaaagtgcacttttaaaattttcccatctttttctgttagtattttctcaccactcaacataaacctttaaaaaatacttacccaacttagtatttccaagacaatcttacttcagcattgggattaggataaacaatcatgacaatcttcagttttaaacatcagccagttgttttcaaatattactcctattctatatacagggaacagagtcttctggtttggagcaaaataatggaaacttcttaactccagcattattacgtggaacatctgatagaaaacccagtcccgccgtcggcagccgccccggcgcccgtgacgctcctgcgggttcagtcctttggcctcgccccacgcctgccctctcggcagccccactcacaagcccagctcgcaagcgcaggcgcctctcttctctagcccgaccgccaactccaa

SEQ ID NO: 242560 - DNA, 1497 bp, Homo Sapiens
  misc_feature (608)..(972): n is a, c, g, or t
caaattgctagattacaggcatgagccactgcgcttggccagattcttagatagaagtaggaggggtccgcatggctgcacctctgcagcctagaggaggaagcaggtggatcccggggaatgctacataaacagcagctgaccctcacctgtgtaggttctggctgcataggtcttgtagagggtgcttggagccccttcccttgtgtgatgtttcaggttcttcgggggccaggaccttcctttttctgtgaaggggatagtgcatcattgacaaacagattccacctcctgggccaacttctctctgttgtccggctgctcagagccctgttgtgttgtgttgattgaaatctggaggtttaatccagactgactcaaaagtactgtcatcagtgtgtgatgtctactctggagacaggagagtctcagatgtcatgtattggccttctttattttattgctttattgtgttgggcacccaggaagttatcattcagagcccaaatcctaatggcctgaagaaatgtatcctccagttatggtctcacctaaggccctttgtttctcttacatcaggagcttccaggattagttttagttacttnnnnnnnnnnnnnnnnnnnnnnnnnnnnnnnnnnnnnnnnnnnnnnnnnnnnnnnnnnnnnnnnnnnnnnnnnnnnnnnnnnnnnnnnnnnnnnnnnnnnnnnnnnnnnnnnnnnnnnnnnnnnnnnnnnnnnnnnnnnnnnnnnnnnnnnnnnnnnnnnnnnnnnnnnnnnnnnnnnnnnnnnnnnnnnnnnnnnnnnnnnnnnnnnnnnnnnnnnnnnnnnnnnnnnnnnnnnnnnnnnnnnnnnnnnnnnnnnnnnnnnnnnnnnnnnnnnnnnnnnnnnnnnnnnnnnnnnnnnnnnnnnnnnnnnnnnnnnnnnnnnnnnnnnnnnnnnnnnnnnnnnnnnnnnnnnnnnnnnnnnnnnnctgcttaaattggcttgttttgctcatttcctgcttctgaggtctccagagttccctctcttccaggataggatggatatactgtctggaggagaggcaatgctaggcaggaggagaagaaccagtgatcctgttagtgtgcccagcatccctctgctcaataaggcaaatgtagatgttctttggaaatgattgccagagcctacagtccttcataatgttcagctccaggtcctggtgaggtggacagtaacaagagattgagccagcccctgcttgcacccttttccaggggccctttgagccctttcgataaagagtttgtttctttaccgaaagcataaaagtagtgcaagaagaggcacacagaaccaagcatgtgcactttctaaagtgaaaaactttagaaggaatgtcttgcctggcagatgccctgatgtcctccgtgcatgtcctcccccaacctcatgtgtctgatgcagcactgcagtgaggcacggtggatcctgcagttcagaggggttg

SEQ ID NO: 242561 - DNA, 1047 bp, Homo Sapiens
actttgtacaaaaaagttggctcgatcctaacagcgacaccctcagccccggcgatccaaaagtggaccccatctcctctggcctcactgccaccccccaggtcttggccaccagccccgcggtgctccccgcccccgccagcccgccccggcccttctcctgcccggattgcgggcgagccttccgccgcagctccgggctgagccagcatcgccgcacgcacagcggcgagaagccgtaccgctgccccgactgcgggaagtccttcagccacggtgccaccctggctcagcaccgtggcatccacactggggcgcggccgtaccagtgcgcggcctgcggcaaggccttcggctggcgctccacgctgctgaaacatcgcagcagccacagcggggagaagccgcaccactgcccggtgtgtggcaaggccttcgggcacggctcgctcctggcacagcacctgcgcacgcacggcggcccgcggccccacaagtgcccggtgtgcgccaagggcttcggccagggctctgcgctgctcaaacacctggcacgcacacgggcgagcggccctacccgtgtccgcagtgcggcaaggccttcgggcagagctcggcgctgctgcagcaccagcgcacacacacggccgagcgcccctaccgctgcccccactgcggcaaagccttcgggcagagctccaacttgcaacaccacctgcgcatccacacgggcgagcggccctacgcctgcccgcactgctccaaggccttcggccagagctcagcgctgctccagcacctgcacgtgcattcgggcgagcgtccctatcgctgtcagctctgcgggaaggccttcggccaggcctccagcctcaccaagcacaaacgggtgcatgagggtgcagccgctgctgcagctgccgcggccgctgcagctgcagcagcggccgccggcctgggcctcgggcctggcctaagccctgcatccatgatgaggccggggcaggtctccctcctgggtcctgatgctgtttctgtgctcggctc

SEQ ID NO: 242562 - DNA, 646 bp, Homo Sapiens
tgggtggaaaatggcttttgacgtgagcgcgaactcgcactgcccagagggtggccgccgcctaagctgcagccgccggagccgcagaaacaagaggccgagccgtgtcgaagatggaggagaaaccctcagggcccatcccagacatgctggccactgcagagcccagctccagtgagaccgacaaggaggtgttgtccccggctgtgccagctgcagccccttcctcctccatgtcggaggagccaggccctgagcaggcagccacaccgccagtgtgggaacgtggaggggctggagggatgcagcagggctcctccccagccccagacagctgccagcctggccccggacccagccctggcctgaccagcatagtctccgggaccagcgaggacctgcggcctcccagacgacgcccacctccagggaagcaaatcccttgctccagccctggctgctgcctcagttttcccagcgtccgtgacctggcacagcatctgcgaacccactgcccgcccacacagtccctggaaggcaagctcttccgctgctcagccctgagctgcaccgagaccttccccagcatgcaggagctggtggctcacagcaaactgcactacaaacacgatcgctacttccagtg

SEQ ID NO: 242563 - DNA, 748 bp, Homo Sapiens
  misc_feature (201)..(593): n is a, c, g, or t
tttaacatcagattagggaggaattaaggagcaaagaagcaacgagaagggacttgaagcctgtaggggcttctctgtaaactcctcaaacaaaagccttcaagacattcaaagagcatttatagcatcatgtctacaaatacaaggcaccacgcagggagtgctccatcaagtagggaagagctcactgagtgtccctcnnnnnnnnnnnnnnnnnnnnnnnnnnnnnnnnnnnnnnnnnnnnnnnnnnnnnnnnnnnnnnnnnnnnnnnnnnnnnnnnnnnnnnnnnnnnnnnnnnnnnnnnnnnnnnnnnnnnnnnnnnnnnnnnnnnnnnnnnnnnnnnnnnnnnnnnnnnnnnnnnnnnnnnnnnnnnnnnnnnnnnnnnnnnnnnnnnnnnnnnnnnnnnnnnnnnnnnnnnnnnnnnnnnnnnnnnnnnnnnnnnnnnnnnnnnnnnnnnnnnnnnnnnnnnnnnnnnnnnnnnnnnnnnnnnnnnnnnnnnnnnnnnnnnnnnnnnnnnnnnnnnnnnnnnnnnnnnnnnnnnnnnnnnnnnnnnnnnnnnnnnnnnnnnnnnnnnnnnnnnnnnnnnnnnnnnngtcctcatgtaaaccttccagaaaacctgtgtgcctggcactctggaatccctcttttccaccccttcccactgcaactctaacatcgtgtcccctcatcattttccattcgagcataggaaagaacacaatcactacacccatttttgatccaa

SEQ ID NO: 242564 - DNA, 165 bp, Homo Sapiens
gtcctcatgtaaaccttccagaaaatctgtgtgcctggcactctggaatccctcttttccaccctttcccactgcaactctaacatcgtgtcccctcatcattttccattcgagcataggaaagaacacaatcactacacccatttttgatgaacctttccccaa

SEQ ID NO: 242565 - DNA, 1625 bp, Homo Sapiens
  misc_feature (175)..(189): n is a, c, g, or t
ttggcttctgggccttatgttttacatctgtaaattcaaaatgctagtccttgcctatctgaggggatgggattattgtaaggctcagatgtgttcatggacactgaaaagagttgtggaattgttacctggtatctggttatgtgagccaggggtctccacctggactcatttnnnnnnnnnnnnnnngatgctagatatgaactgccacgtaattactagtcttttccagtagtaacaaaaatagaattcaccgatccatcataaggggtaaatgttttcaggacaaactgtaaactgaaatagttttcaggtagagtactgtctagtactcttcagctgaggggcaatcttcacacagaattgcactgacattttcagagtaaactgagatgcagcagttcttgtaattcaggaatccatgtttaaatcctaggtagttctagctctagagacggcagtacaacagtggctttagatgtgtgtttatgacacaggaaggcgcttaggccgagcttgaggaacagaggaaatactgcatagctccttctgtgccctcacccggctccactgcattttcttcatggccgtccgtctgtcactctcttgtttactatggtttcccccagtgcctcccctcccctcccccaaactcctacctcaataggatgcaaattccataaggcaggggcttctttttgcctgttttgttctctgtcaagagcaattcctagtacataataggcattcaaatatttataaaaggaatgagtactggatttcattgatgtattgaaataaatgtgtagaaacaggcccatgagcaatatgtaaaagaaggcaggtctgaacccggcaggagaggaatgcctgctgctctgtgaagagtgactgttgggctgtcactgtccggttttctggacctctgaattgtcggtaggcattgctggtcccttacctgtctctttttcttttttaaccctagcaataacatcgaagatgacacaattctcaaaaccaacaagcacatttactcccagcttttgagagcaactgcaaataaaaccgcgactcttctggaaagaatcaacgttatcgtccacctgctgggccagcttgccgccggcagtgcagcgagcagcaatgccgttcagtgactgcacagagccgtgtcccagacacgctgtcagtgccttcaacacggagccggtttgttcattcggtgctttgtttcattaaataatagggaaatatccatttaaaacaggtatatcagtggaaacacagagttattttaagtgacagacaaattacggttgagttctgtggcttcttcacttgaagtgctaacatcagaatcaaacttaaagcttccactatttatgtctttgagaagtatgtagtacctcggtattaacagacctgctgtgatgcagttacactttcacgtatttttgaagtatgtcaagctacacgggtctaagatatgattattttggataaaatgttactttggtcaagagaacttttatccagatgacattacaggtcaagtgggttaagagacctcctgtacatctacagtgtttcccttttaaattgtccagaaaaaagtgtgtttcttc

SEQ ID NO: 242566 - DNA, 839 bp, Homo Sapiens
ttggcgacgcagctgttcacgcttaggtgggcgcaggatggcaaaacagaagagaaaagttcctgaagtgacagagaaaaagaacaaaaagctgaagaaggcgtcagcagaggggccactgctgggccctgaggctgcaccaagtggcgaaggagccggctccaagggcgaagctgtgctcaggcccgggctggacgcagagccagagctgtccccagaggagcagagggtcctggaaaggaagctgaaaaaggaacggaagaaagaggagaggcagcgtctgcgggaggcaggccttgtggcccagcacccgcctgccaggcgctcgggggccgaactggccctggactacctctgcagatgggcccaaaagcacaagaactggaggtttcagaagacgaggcagacgtggctcctgctgcacatgtatgacagtgacaaggttcccgatgagcacttctccaccctgctggcctacctggaggggctgcagggccgggcccgagagctgacggtgcagaaggcggaagccctgatgcgggagctggatgaggagggctctgatccccccctgccggggagggcccagcgcatccgacaggtgctgcagctgctctcctagtgggttcagcgcggggcggggccgctgcccagtgcagggctgcctcagaccacacagggtgcagctcctccggcggtgggggccgggttcaccagcagggcagcggctgagcaagggctttcagctcctccggtggtgggggccgggatcaccagcaccagagcctcgcaagggccccttccctcctccagacccctccttgggccggtgacggctg

SEQ ID NO: 242567 - DNA, 1222 bp, Homo Sapiens
tacaaaaaagttggcgctctctgagccctaggatcgtgtgtgagatggaggagtcgctggtgcccagcccgccgccggggcccgtggagctgtgtgtgggtgactgttcagccgacttccgcacgcagtcggagcaggtctacagctttgtgaccccaacgtttgaccaagtgagtcccagccgtggcccggcgtccgggggcacacggcttaccatctcaggcagctctctggatgctggcagcagggtcacagtgactgtgagggacagcgagtgccagtttgtaaggagagatgccaaggcgatcgtgtgcatctcacctctctccaccctgggccccagccaggcccccatcacacttgccattgaccgggctaacatctccagccccgggctcatctacacctacactcaggaccccaccgtcacccgccttgagcccacctggagcatcatcaatggaagcactgccatcactgtgagtgggacccacctgctgacggtccaggagccccgggtccgtgccaagtaccgcggcattgagaccaccaatacatgccaagtgatcaacgacactgccatgctgtgtaaggcccccggcatctttcttgggcggccccagcctcgggcgcaaggcgagcaccctgatgagtttggcttcctgctggaccacgtgcaaacggcccgctccctcaaccgctcctcctttacctactaccctgatcccagctttgagccgctggggccctctggcgtgctggacgtcaaaccgggctcccacgtggtgctgaagggcaagaacctgattcccgcggcagccggcagctcccgcctcaactacactgtgctgataggaggccagccgtgttcgctcactgtctcggacacacaactcctgtgcgactcacccagccagactggccggcagcctgtcatggtgctggtgggtggcctggagttctggctgggcaccctgcacatctcggcagagcgggcgctgaccctaccggccatgatggggctggcggcggggggtgggctcctgctgctggccatcacagccgtgctggtggcgtacaagcgcaagactcaggacgcggaccgtaccctcaagcgtctgcagctgcagatggacaacctggagtcccgtgtggccctggagtgcaaggaagcttttgcagagctgcagacggacatcaatgagctgactaaccacatgga

SEQ ID NO: 242568 - DNA, 1309 bp, Homo Sapiens
tattctcaaagttttctattcagtagatgggacactgttaataaacagaataatgcttctgaaatgaaaaaaggtaaaatagaagcattttattttttctattttaaaacaattgttgtaataaatgtttaagagatagagatggcacgtttattactgaaaatactcttttcaaaaatctcaaagaactgaactatataaaaccataacacttaaaattttcaagaaggaataagatttctcccttttgactaaaaatgcaacataaacttagacagtgcttatttctagctttgaaaagatgtacatgaaatccttagaggtgggaaaacagtgacaggtgagaaccgtgctatgtgaggctggaagttttagggatttcctaccttttttactagaatgcgtttccacccatgacgcttcatggaagccagactaagagtcagccctgctgcactgtgtaagagtagcaggtgtgtatcagtgtgagttcaaagagagatgttctggctaagaaaataataacaaaaaaacaaaggcattttagcacaacttcctccttctacatgcttacttttacaggatgaaaggcaaagactggccaagcaatttccatccccctttcaccacggtctcaccatgtggctaaacaggcctcctgaaaccatagcagtagctgcgacatccagtgccccaaaccaaaaccaatataaggcactaatctaaagcctgtattacacagagaaatggctcaaggatgctaaaagtcatgtgatcatttctttctccctgatttagctaattggcactagacacagaaaacagaaacaaaacagaactctaacccaaatatggtcagaagtgagaatccttgcttaggaaatatgagaaagatggaagctcagacaatcttaggtattgttctctccctaaaaggcacctgattctggaactatgggagttcctcaggtaagttcatattcaaaatgcaaaataccatccaaaagatgtcagttaacctcttagaccataacataataacctaagagactatctgttaagaattctggttaagaccattcttcttaagcaaataatttgtaacactgtaaagattacttgaggcaaacatgaaaaactggatgactttttctcccatgtgatccaaaatcacggttggatatcaggggaagaccccaattatctaacaacagaaaggatgacattttcaatgcaattaaatagggataccaaatgaaccatgggcccttttgcagaaatttcattctcaatcctctaacaaagccaa

SEQ ID NO: 242569 - DNA, 1405 bp, Homo Sapiens
  misc_feature (650)..(670): n is a, c, g, or t
  misc_feature (945)..(959): n is a, c, g, or t
acaaaagtgacatttaggccacaaagaagacctcaataatcccaaagaatagaaatatacaaacagcattctctgcctacatgatttaaatcagacattaatttaaagcaatcaaaaggaaaaatggtactttctcttggaaattcatagtcagaaattttaggatacagctaaagcagttaccataacaataaacatgaaaaatataccaactaaatatccaatttccaaagctaataaacaaaaaaagtggaatgaaaaaagttgatagtgttaaaaccaaaaattaatgagttggaaaacagtagagttaattagtaaatgcagaagtgctttgaaagaaaacaagaaaaaatactaattaaaacaataaatgaaaaaggtagaaagcacaagtatacataattagaattaacaattaataatttaaaaaaaatagaagaatagactcccttgggaatttctaccaaattttctatcaaatttttaaagaccagatccaaatgctacttaaaatatcccagtgcacagaaaactaaggaaaacttattttccttgttatattagaaatatatattttctaatttgagtataatattacaatcaaaaaaacacatcagtttcactatgaatattgattacacaaactnnnnnnnnnnnnnnnnnnnnnttagcaaagaaagcacaagagcatattaaaaactaattcatcatgaccaggtggagtttattccaggaatgcttactgggccaatattataaaatctattcatataacccattaaataagcagaggaaataagatagaggaaagaagtagaggaaataagatagggaaaatgcatctgaaaacaatttagcacttgtttatatttttaaaaatttcccaataggaatagatatttcctatcaatatgcaatatatattatataatgatacatgtnnnnnnnnnnnnnnnatttccatctcaaagccaacatcttacttgatggagaaatgaaaggaaatttcctgctcaaatcaggaacaaaaagatatcagttgtccccatctgactgaatatcatgttggaaatattagctactgaaatgaataaacaattggaaatataataattggaacggaaaaggcaaaatgatatctaatgtaggtgatataaatgtctagaaaatctaaagaaacacttggaaaaataaaacagaataagaaaattccctatcccatccctctcctgctctttttgtggacttttatgtgtttttagcactaccagtaagtcaagttaaaaactgtggtgtcataataataatactagtttcatttgagtgttcacaatctgcattcactctatgctttgcagacccccactcttatttaggcagttgctaagtaacatagagccaa

SEQ ID NO: 242570 - DNA, 947 bp, Homo Sapiens
ttggggtacagggcctgtcccctcctttgcagaaaaagtcagtgatgagcctccacagctccctgagccccagccaaggccaggccggctccagcatctgcaggcatccctgagccagcggctgggctccctagatcctggctggttacagcgatgtcacagtgaggtcccagattttctgggggcccccaaagcctgcaggcctgatctaggctcagaggaatcacaacttctgatccctggtgagtcggctgtccttggtcctggtgctggctcccagggcccagaggcttcagccttccaagaagtcagtatccgtgtggggagcccccagcccagcagcagtggaggcgagaagcggagatggaacgaggagccctgggagagccccgcacaggtccagcaggagagcagccaagctggacccccatcggagggggctggggctgtagcagttgaggaagaccctccaggggaacctgtacaggcacagccacctcagccctgcagcagcccatcgaaccccaggtaccacggactcagcccctccagtcaagctagggctgggaaggctgagggcacagcccccctgcacatcttccctcggctggcccgccatgacaggggcaattacgtacggctcaacatgaagcagaaacactacgtgcggggccgggcactccgtagcaggctcctccgcaagcaggcatggaagcagaagtggcggaagaaaggggagtgttttgggggtggtggtgccacagtcacaaccaaggagtcttgtttcctgaacgagcagttcgatcactgggcagcccagtgtccccggccagcaagtgaggaaagacacagatgctgttgggcctgaaacaactggtttccttcaccacaacctgtatcttgaggtgcccagcctgggaccaccaccgtgctgccactctactccc

SEQ ID NO: 242571 - DNA, 1921 bp, Homo Sapiens
  misc_feature (1347)..(1355): n is a, c, g, or t
  misc_feature (1656)..(1667): n is a, c, g, or t
  misc_feature (1676)..(1706): n is a, c, g, or t
aggcaaagtctctttccgtgtggctgtggctgttaggtctgaaagggatggatgaataactaagcaccacactggacgggtttttcctagtcccctgcaccagtaaccctttgctataatgaggacacaaagagcctcgcatcaggccgctacccttcttcataactcaaaagcgtcacagtggcaatagcctctagtgctatttgtctttagtgcagttgtgacacttcggcatgatccataatttggcagctatttaccgtgacatttcccttcagtgcagccataacattcagtgaagccattatttggttccatttaccatataaattgtattgttgtgcatgcatgctagcagctacattaggtacctgaaaatgagtaaatcttgtaaaatagatactaacagctattcagcagtaggatttccttgctcctcagatggaaggaaagaaaaattaaatacagtccccaaatttcctagagcatctttaattgcgtccatatttactgagcaggttagatacaccgaaacctaagactttgaaaaataatctggtgggcttcaccttcaatcagaacgggcccatggggtttcagcgcaacggtgacagcggcagcagtcttcagggcactaaaggttaagagggaagccgatgagccacaggcgtgactcagaagagagggtgcaggtttcgctgcttttcctgtgtggtcagtgggtcaatgtgggacatcaggctatagtgccaaggagcatctcattccaccagaacacgtggagagaaaaatgggaatgcagaatgagtggctgctattctgtttccagaatcagaggtaacgcatagcttctagttcgaacgcctctaaggagaagcaaatgtattcttccttgagatgactgaggtctctacggtgcacagggcgatgggacataccgtacctcgagcagtgtagcatgctgttactaaggccttgccgtgtgcctagacagcgcttccctcctggggcccgtgttttgtggtgaacccccactgagaatggagcgcacacttttctctttcctgtgcctatattaattttaagtccccctaatctctgtggtttccctttccaaaacctactttctgtctatgtaagttttcaacattaatttgctgcttcagaggaaagagaacatttccatttcacatgtgccttatcaggttgatggtagataaaagccattacgtgctacttcttcaaaacacatctgtgttcacggaatcatttttctaataacaaaatcaaatttgggagggaattcccccaaatgtccatttaaatagttggttggtgatttatagnnnnnnnnnggaccatttcctgaggatatagattctgaaaatatatggctggcttttgctacacttgtcactcatgaactgcttatgagcataagaccaaattctcccaaagcaaagaagtcgggaaccactttcaaaactgattttaaaatctgatcaagctgaagacatactgactcgatcagatctggcatcaggaatgaatttagttccctggaacaataacatctggaacgagaccatccatgactaaagaattgaatgtaagcgttttccctcttagccatggagggaagttttattagcacannnnnnnnnnnncccccaagnnnnnnnnnnnnnnnnnnnnnnnnnnnnnnncctattcattaacaccttacttttgttttaagaaatattatatccattaccaactaaaaataaattgatttgagtaattctgagacataaagtgcccattttctttctcccttgatttatgtcattgttctgtttttacagcttactgttgacagagtgaggtaattcaactacaatttttccagtgttttttcccatgtacatataattgccaa

SEQ ID NO: 242572 - DNA, 1276 bp, Homo Sapiens
ggtattttcccccaagaaaaccagagtcaaaccatgtttctttaaagggactgtggccctattagccatgctttcatggccaaaatctgcacacctgtctgctttattcaggatagagcagggaggccacagccctgaaacaagggctcaaaaatcacttcctaggtgaggtcagtaaggcctcacagagactactattgggggcaagcagcaggtgaaatgatggtcacttgactcttttactcctggtttcttagcaacctggcctttgagactgggtacagtggagtgagttcaaccgggccacctggatatgccttgatttagaatggcatcaagtttccactcaattactttcaaaaaggctctcagtgtacttggccttacatgttcctaactcaccaataaaccatgtttggaattcagtcttgaaaatgactactgcctttcagtagcactgttccaaatgcatctctgagtgggtttgcacatgagtgtgcatgtactcactctctatctctttatctaggtttatctgtcagtactataatcagtgcactaacagggccttggtagaagagtgcaagtaggaaagctctttccctcacactgggcaacattataattatacagactctacagacaagctacggcccaggcatctgcatagaaacaagtactgatgctctttccagcaacttcccttcaacaaacaggaattagaaatgtccattcctcagatttctgccccattacaccaatttttaggtcctttccaataatagagatagcaaatgaaagggacctggcaagggtttatgtcctaacatttttcacttggtggcaaatattcaagaaaaagggtaaaagccaacccccagaaatgatggccactaaagccacaaaccacaaggtcccttgctagataagtgtgatataatggggaaaaaaaacttgcataggagcctgggacctgagatcttgtactggtgtgatcactaccttgctctgcctcagttcccccgactggaaactgggcagttgttagactaaatgattttgaaaagcccttccaatcaagggcttatatggattgtaaaaagagtattttactcaagtgctgtggttcttgacttttttgggtcacgagcccatttgaaatttagcagaacattatggactatctccccagaaagggcatattgtcatggaattgtgcataccatctcaggggcatcatggagtttctgagtccatggacactgggttaagaact

SEQ ID NO: 242573 - DNA, 1257 bp, Homo Sapiens
aaagtggaagatgcactattgtacaaagcaaagatagcacaggagaactgggcactgtaagaattggaggataaaggttaaatcatttcattcaaatctttgaattctaattccatcaactcaaaagttaagaagggctttagctttcaagggttatcacatgcatacatatttgaatacaggcacaaaaactcatcatttttatttggataacaaagggtctccaaattatattgaaaaataaatcctaattaatatcactcttgtaaaaaaagtttagcacacttttcacaaatgatttatgtaaaagagaaaatacacataattttataatatcttaaacttttattccctaccatagacattttgtcttttgttttctttccgttttctacaatttccaacttgtacctgtgtttaatactgctttagtctgctaaagacattaactgattgcttttctaaatctaaggattatatatttttagtataaatatatatcacatattttcgtaaaattttgacaaaaccgaataagcatgccttgttttaagtccatgctccttccactgtttataaaatctgatttaatgatcaaaaaattcttggttgtcactcttctgtaaccacaatcttccttctgaactgccacccagtttttacataataataacaagcaatagaaaaaccaaagaaattatgttaatcctagttcttcctttcgacactataaaataatgtgaactttttaaaaaatgaaacaaatacatccaaaactcaatacattcaaatgagctgagttcctttaaggtagttaccttggaaggccacagttcattctcctaagtatactgccactgctcaaaaaacctttaaaactcttttgggattgccttcaaagccagttatatactttctgcattacatcaaagttaggtggaagttttggaaactttcatttggtgccaagtaatggtaactaaaaataatcaagcttcctaatactatattttttaaaacaatgtataatcataaagtttagtgtgtgtgacaaattaactttgaatgcaattctaaaagagtaaactcagcaggttttgggcaatggtagattgctggcattaggaaataaccttccagcatgatcactatgcagagtaacattcatttagctgtctatgttctggcatattcgtttaaagtgaacattctgagagtcttagttattggcttttgaaaagccaacttttttgtaca

SEQ ID NO: 242574 - DNA, 926 bp, Homo Sapiens
  misc_feature (121)..(129): n is a, c, g, or t
acgtatggaagaaataaagcaaatggagaaaatgttaccaactggagaatctaggtgaagtggatacaatacacttcttgcaacatttctatcggcttgaaaattttcgcaattaaaaagnnnnnnnnnaattttaagaacacatttctggaaataacctgagtcaacatagggtgctatgccttattgagcatctgtactgctaaacacatataccacaattgcaaacatcacatttaatcctcaattcatggaggaattaggagatagatagggcatattaccctatttttaaaataaggaaacttaagcctaagaaatactttgccttaaaaacttactatatatctcacctatggataaaaaaaactaactcgagaggaaaaagaacaatacccagaggtgtgaaataaaaatcagctctagatgataacactgtgtactatttttctttctagttgtattgatttttcagatttccacctaaaaaaatcgaatttatgctcaaaaaatacaacttaaaatgtttaaaaaagtaaataattttacagtaaggcacaaaagagatctttctagaatttaataaacttagttattctaagttatccaactatttggattcccaggtttcatgattgcaaaaggcaggaatgggatgtgaatgggcagacagtaattcagttcttggtttcttttcctttgatttgtttacaatggaatatttgcatgttttctccaaggacgttgtaccttcttgctggccaagacatccaggtcacagcagattcgggcacgtgtggaagaaggttggatgatgtcatccacaaaccctcgcactgctgcagggaaagggttggcaaacttctcgatgtactctgcctgagcagcttccacattctcatgccctttgaagatgatctccccaa

SEQ ID NO: 242575 - DNA, 1264 bp, Homo Sapiens
  misc_feature (965)..(1038): n is a, c, g, or t
actttgtacaaaaaagttggcttcatcgccatgtccctgcagtggctccgtgggccgcgtggcgatgtcccgagaggacaaggaggccgccaaactggggctgtctgtgttcacggtaatcccccgccccgcctgaccgcagcaggggctaacaggggtggggcggggcgggggcactgaacggagctccccggggcgctgcggggcgtggtgtggggccggcccgcagactcctccgcagagctcgcttctcccgcagcatcaccgcgtagagagcggcgggcccgggacctcggcagcctcggccaggaggaagccgcgggcggaggatcatacggaaagcaggtgaggctgtgccacctgggctagctgtgccccggggtggggggtctcgggaggaccggagcggctcccactcgggcaggtggcagcttctcttggcgcaccggcccggcgggtggcctgccctactttacttcctgtcccagttactcctaggtttttctctaggggagtttctcgggtcacccttgaagagaggtcctaagtactggcagtggtcgggcgctgtgccgtgggagggcactcaggacctggggcggggccttttcctgccgtgggtggcacctccagggcttctcctggatggtgagcctgggcctgaccctaagagtggcctggtgggtgcaggtaggaaggtgtcaacctgccaagggcacggctggggtggggcaggggcgtgctgtggagatggggatattgcatctgtttctaacccacgtagccactggccacgtgactacgtaactgaggagtggaatttgtagtttgatttaactgatttaaagacgcacttgtgggtggtggcttcatctggatggggcctgcttgtgttcactctcttggcttgcaagactagggtctgaggcacaccttgtatcctccttgtagttgtgagagccacnnnnnnnnnnnnnnnnnnnnnnnnnnnnnnnnnnnnnnnnnnnnnnnnnnnnnnnnnnnnnnnnnnnnnnnnnngcacaggcggccagctgaggccacctcctctcccacatctcctgagaggcccaggcaccaccaccatgactccgactccaactccccctgctgtaagaggaggaagcggggacacagtggggacaggaggagcccgtctcgcatgtggcatgacagaggctctgaggcctgatggctggaccctgctcactgctgttgtggaacctgaaccctcccttcaccttgc

SEQ ID NO: 242576 - DNA, 1417 bp, Homo Sapiens
  misc_feature (85)..(115): n is a, c, g, or t
  misc_feature (174)..(183): n is a, c, g, or t
  misc_feature (907)..(967): n is a, c, g, or t
  misc_feature (1139)..(1182): n is a, c, g, or t
aaccaaggaagagtctcattccaatgattcatctttatttgtcgattttgacatttttctaaatcccaaggttttttatgatttnnnnnnnnnnnnnnnnnnnnnnnnnnnnnnncctatttatctttcatattaactccaataattatttctagatttgtgggaaatacaggnnnnnnnnnnggctaagagaataaacaactgcacctttctgctcctgtgaatgagaaaagacaactattagtacttaaaggttttactctttaaaaacaatacagcataagcactcatagtagtagttacagcaacatggaccactctttcctcctaggggatagaagataatcagacacttagcaaagatgctattagtatctgggaatttgcccccaactttcagaaagacactaaatttaatccataggaaaacatctttcagagtattagtttctaaagtttccctttcagccctactttttgcagcctttttcacagccaatggcagatacaggtgcaataagtaatttctgtggtacttattcacttgggagattttggtgatagtaaaacattttctttgaaagtcatgtttgttcttttcaccaaacagcaactcttaaaagaattttcacttatttttccatggaaaaacactgaggatataatttttttaaaagagcattattcaatgttgaccttcaaaagctgattgtaaaatacctcatcatataatctacagccagagagtaactcagcaattgtgtagtccagcatttctacaacctaggtatccacatgtaccttaggatgacattggcaggtagtgtgaggagctaggggaatggggggtggtggcaagaataacaaatagtggtacatgctaaatttagtttagaaaattctgggnnnnnnnnnnnnnnnnnnnnnnnnnnnnnnnnnnnnnnnnnnnnnnnnnnnnnnnnnnnnntaagacagatttataccagaattttcttaaagcctcgaacaagctactgttcacaatgagcacagtgaccatatatcctaatttgctgtagacagccccagtttacaggcgctattccagcattaatatcatctctttttacctctataatcctacatatgactctaagagnnnnnnnnnnnnnnnnnnnnnnnnnnnnnnnnnnnnnnnnnnnnagcaaacagattttcctaaacttagatggccaattacatacttatacctacattcctacgattatctcctaaaacagtgatcttggtccacagaacatagtttggggtctactacattcttatcatttgatagctgaggaaacaaaggatctgagaattaaatagactcagctagaaaacggcagacatgggatactaaagcctaggactcctggctcatagagatagctcccaa

SEQ ID NO: 242577 - DNA, 1390 bp, Homo Sapiens
  misc_feature (309)..(595): n is a, c, g, or t
  misc_feature (718)..(747): n is a, c, g, or t
  misc_feature (1005)..(1040): n is a, c, g, or t
ttggcatcttttctgctgtgtttaggacatttgatttgcatatccaatatctcctcgaaaccttcagaaaatggttttatcgtgactgtgattcacactatctagaacactttaccagcacccagggacatggacttgggtgttcttatttatggtgtgtatgtaaagagataggggagaaaaacctcacccaagttcttatacgttattttaaacgtttgccaactctgaaatttcagagattcattgttcttaaccatattggactaaagtctgttggttagtgctgttgtaaaagagacctctggnnnnnnnnnnnnnnnnnnnnnnnnnnnnnnnnnnnnnnnnnnnnnnnnnnnnnnnnnnnnnnnnnnnnnnnnnnnnnnnnnnnnnnnnnnnnnnnnnnnnnnnnnnnnnnnnnnnnnnnnnnnnnnnnnnnnnnnnnnnnnnnnnnnnnnnnnnnnnnnnnnnnnnnnnnnnnnnnnnnnnnnnnnnnnnnnnnnnnnnnnnnnnnnnnnnnnnnnnnnnnnnnnnnnnnnnnnnnnnnnnnnnnnnnnnnnnnnnnnnnnnnnnnnnnnnnnnnnnnnnnnnnnnngagacttccgggacagtcattatcagataggccccaaacctgtgatttttcttgggcaagattggtgtttacttaggggtgctttaaaaatatatttttacaagtatacttgtaggaagttgnnnnnnnnnnnnnnnnnnnnnnnnnnnnnnggagtttggttaaacgactcttttattttctgttttgccttatcttactaaagtgaagttttcctaaggcaagcaagaagaggagtggaagcacagttgcctggatttggaggcagagttgtcaggcttttcaagctaagagtcttgtgcttggattttccagattaatttgaaaagacctcccatttgtggctttgtacataaccaacaggcagatactgagtgccttggctcctagagttttgtggttgggttagnnnnnnnnnnnnnnnnnnnnnnnnnnnnnnnnnnnncatttctgaagtttaagatgccttgactttttaaatgctcttaaggctattcgatgtaattcttactcctaaaactggctgttcttagcctgaaatctaatgctttgttttttgtacctctcccaggtgggtaacactctaggatgacatgatgttataattttaggggaaatcacatttttaccttatgctgttactgggcagaaccacgttttatgtaaacataccagacatcgggtaacagacagtactttaaatgttataaatttggtgatcagaactattaatagcataaatcgaactcaaatggaagcaaaactgatttcatgcgcgtcctgaattttactttg

SEQ ID NO: 242578 - DNA, 1084 bp, Homo Sapiens
agattgtcaattcttagcttctttatgtctattcttatgtcaaagcccaatcgaattgaatgagaagtttttttcaatcatgttgcatattaccagttgtcttatgtcataataaaaattaaatttagtggaatatctgtaacttcaccttttgtgtcacaaaggagtctctggccagcttataccttacttcgtctaagacatgatcagacgccaggcttacaagacacatttaatttctttttttctccattcaagcctttagtctcttttccattgcctcccgctatagttatattttcagtaagttttggtcgcaggatctgctgacatagtctaatatttagtgcattatgttttactaactcattataattcatagaaccttccatagatgtttaccatcgaggaaggagaagtttaagtctgaaccaccagctttcctcagtggaaatcaagtgaagtcatcatcttgcagtttacagaccctctttcctcctggtagctggttctcttgggtagtactgtagctaatccttttcttagtgcagatcttgcattctcagagaccacagttccctgtattgacctccttttactgaaacagagatgcacagctctgctttctagctcagtagaggattcttggaataaaacgtttaactcattccaagaaaaagtcttaggagtgcagcacttcaaaatcaggtaatgttcaggcaatttatcagagacacatagtaggttagtattttgactttcaaaatttcggagccaagttgtgtgctatagaggagcattgtggcataacatagagatgggatggtcttaacttctccatacaaacaagcttggagtaaggtaaaggagaaattgcatttgatgtcttaacactcaaaacacactatgcttattttacttctgtgaagactaaaaatcattccataatctccttatttgctcatttagaaaagaaaatgaaaattgaatactaggttgattaataaacactcaaagcttcttcttttagaattttagttaattgaaatgtttagatttgatatttaaaatagttgtgtgccaa

SEQ ID NO: 242579 - DNA, 1303 bp, Homo Sapiens
ttggcaagcatttcaactacacctcgctcatcgcgtttcactgtaagagaggtgtgagcatgggaacgcctaagctgttaaggaccagcgagtgcgactttgtgttcgaatgggagactcctgtcgtctgtcctgatgaagtgaggatggatggctgtaccctgacagatgagcagctcctctacagcttcaacttgtccagcctttccacgagcacctttaaggtgactcgcgactcgcgcacctacagcgttggggtgtgcacctttgcagtcgggccagaacaaggaggctgtaaggacggaggagtctgtctgctctcaggcaccaagggggcatcctttggacggctgcaatcaatgaaactggattacaggcaccaggatgaagcggtcgttttaagttacgtgaatggtgatcgttgccctccagaaaccgatgacggcgtcccctgtgtcttccccttcatattcaatgggaagagctacgaggagtgcatcatagagagcagggcgaagctgtggtgtagcacaactgcggactacgacagagaccacgagtggggcttctgcagacactcaaacagctaccggacatccagcatcatatttaagtgtgatgaagatgaggacattgggaggccacaagtcttcagtgaagtgcgtgggtgtgatgtgacatttgagtggaaaacaaaagttgtctgccctccaaagaagttggagtgcaaattcgtccagaaacacaaaacctacgacctgcggctgctctcctctctcaccgggtcctggtccctggtccacaacggagtctcgtactatataaatctgtgccagaaaatatataaagggcccctgggctgctctgaaagggccagcatttgcagaaggaccacaactggtgacgtccaggtcctgggactcgttcacacgcagaagctgggtgtcataggtgacaaagttgttgtcacgtactccaaaggttatccgtgtggtggaaataagaccgcatcctccgtgatagaattgacctgtacaaagacggtgggcagacctgcattcaagaggtttgatatcgacagctgcacttactacttcagctgggactcccgggctgcctgcgccgtgaagcctcacgaggtgcagatggtgaatgggaccatcaccaaccctataaatggcaggagcttcagcctcggagatatttattttaagctgttcagagcctctggggacatgaggaccaatggggaaactacctgtatgagatccactttcctccatcacaagctccaaaaacccgg

SEQ ID NO: 242580 - DNA, 927 bp, Homo Sapiens
ttggctcagtccgaccccaggacgcaggtacctacgtctgcaccgccactaaccgccagggcaaggtcaaagcctttgcccacctgcaggtgccagagcgggtggtgccctacttcacgcagaccccctactccttcctaccgctgcccaccatcaaggatgcctacaggaagttcgagatcaagatcaccttccggcccgactcagccgatgggatgctgctgtacaatgggcagaagcgagtcccagggagccccaccaacctggccaaccggcagcccgacttcatctccttcggcctcgttgggggaaggcccgagttccggttcgatgcaggctcaggcatggccaccatccgccatcccacaccactggccctgggccatttccacaccgtgaccctgctgcgcagcctcacccagggctccctgattgtgggtgacctggccccggtcaatgggacctcccagggcaagttccagggcctggatctgaacgaggaactctacctgggtggctatcctgactatggtgccatccccaaggcggggctgagcagcggcttcataggctgtgtccgggagctgcgcatccagggcgaggagatcgtcttccatgacctcaacctcacggcgcacggcatctcccactgccccacctgtcgggaccggccctgccagaatggcggtcagtgccatgactctgagagcagcagctacgtgtgcgtctgcccagctggcttcaccgggagccgctgtgagcactcgcaggccctgcactgccatccagaggcctgtgggcccgacgccacctgtgtgaaccggcctgacggtcgaggctacacctgccgctgccacctgggccgctcggggttgcggtgtgaggaaaggtgtgacagtgaccaccccctcgctgtcggggtgctgg

SEQ ID NO: 242581 - DNA, 1444 bp, Homo Sapiens
  misc_feature (376)..(418): n is a, c, g, or t
  misc_feature (1097)..(1106): n is a, c, g, or t
gcaaacatgtggcaaaaaaagtttgctgttttaattgtttgccctataaaaccatatcagaaccatgcctcacaattaaaaaactttggattaccagcactcccataaacatcaatatctattcgtgcttagtatcagcccagttgtacccaaataccataaaatacaaaaatgataggaaaatataaacatcgatttgtatttcaagtttaaacattttatttacaaaaataggctgggaggaaaagggtttgcgcccccacattctctcctgggacctaacgattatgcgccatgttctaatgttgttttctctaacaattttcaaagtcacatttggattccttcagaattgtatttgtcagctagcagctcnnnnnnnnnnnnnnnnnnnnnnnnnnnnnnnnnnnnnnnnnnnaaggaggaggctggcagacagcggtcggcacacggataaatggcttttactgaagggcccgcgccgcgcctcatgcaccggcaatgcaagcacgctgctgggcagcaacaccgacgtcgctatttacagaacggcggccttctctgggttctgaaggacacttgttccccaacgtgacaccatcgaacgacgcgttcaggcagacactaggacatgactccaaagacggggttgtggcggcagatgctgggcccgtactcttcatagtccttcttggtgtggcagacctgaaagaactcgggagtcgaggccagcatggagcctccgaaccacacggcgtagcgctgcatgtgatgcgtgaccacctggacctccacaggcttcggcttgatcctcccgccgctgagctcctcgctgagcctcagcctagcatccaccactctcttcaaatccctctgcagtcggcgtccgaaatccctgaacatggtggagcctcctgagagtacgacattctacaagacacaaagcagagggagccctgggtaaaaccgcccgcccacagttccgggaaccacccacaacagaactcccacaggtccaatcgcttgtgggcacaacacatcggccctatgaaagatgcgaacaaaagcaaacttaatgctattggaaaagtgtagannnnnnnnnnatggagacaacaatgtgccacagatggctccttaatcctttcctcaattacagcaaagcaaaaacaaggcgatcctgctccctcatgctccccctgccaacccctcacatagaccaggaagccaaaacaaacaacagaaactgtccagctgacttgagccaaaataacaccagctctcccctgctccgccttaaccatcactgggggaaagtcttctaatgggtgcttgaagcttctcagaaggacaatcttgggaagaaagcatccaagttaccggaaggaacattctcagatgagccacccagccagcactgccctccagggccaagactcgccaa

SEQ ID NO: 242582 - DNA, 1715 bp, Homo Sapiens
ctaatctacttgaaaatccaatattagaatactgccacagagtgacccccatattaaaatactgtttgccagtttttagtttgtctgtcactcaatgccaatgtgctcacaggatctttcatagttaacttacatgaggttttgcattattttctgcaacatggtcggatatttcataaaataaagaaatgtaagtagaaatatatgtataccctatatttcagactagtttaaatctggcatgattaaacacttacatttacctaaaatatcttgggatatatacagcactaggttaacttggtaaatattgagataactcatttttgtttcttcaacttcaagatatttttaagacattcatcatacctattttatttgaaaagtaaactgctctcattaagtaacatgtgatcattcttctctgtgactcagcatagtatataaattcattgtttggaaaatcaacactacttggtaaaattgacacttgctaattttacatatatttctacatttcattcgcttacttcttccaccatggttttcttggcctttaattgtcttttaaccaatacttcaaaattcaggaattgtcataatctatacatgcatttttcctgattagacatatgtatggacaaactaagtatacatgagtgaacttgaaagccaataaaattaaacttagacacgtctttctgctgtgactacatatatcctctttctaaccaccgctctagtctctgtacatctctgaaatctaacctcaaccatcatgaaaaggctgaaatcatttgggattttcatttcttatcaggtttccccatactaacgaatgcctagataataaaactcatatgccatttacataatttctttgttttccacctccctttcaagcttgttaaaaaaaacacaaaagctgccattcatcccctctaaaatatatcccctgggcaggaatttaatttgcagttaagaataagtgtcaggttttttgcctttctgtatttttgcagtttgatgaaaagtgatattcttgtgatagtaatgtccactatcatttggaagtatcagtctcctaaattattagtataaataaagcactgtgttgtacagcagtatgacactacacccttgaagataaattcatatttctgtaattaaataatcagaaataattcactttatcagcctgatggactgtaatggcatgaagcacttcaatcatatggtatgtgccttgccaatgtgtactgtcctggcaaacttctgctcattgattcactgaataaatatgtattagacagtttctatattccaggtgctatactagatgctggaaggaataacctaatcatgctcatgccactcaaattcacattgcctctgtgtctatctgactagaacttagggtcacaggaccaaccaagaggtaaagcctctttattatgtgatttcagtgcacttttgaaaaaaagtaggtagttttgtcttatacccaatgagatgacctacaggataatccaattctatggcatagagagattttagtatagtctatttatcaccttttccaaaatttagattagtagaaccatcattaattacataagcactctcaacagattttgtctccaaattcaatttgacatggtcatttaaaataattagccccaattgacataggctggtgtatatatcaatcccaa

SEQ ID NO: 242583 - DNA, 1205 bp, Homo Sapiens
tgagcaatgcttttcctataatggccaactttgtacaaaaaagttggcacttcccacgactcccgagacagcagtgacctgcagagctcccactgcacgctggacgaggccttcgaggacctggactgggacactgagaagggcctggaggctgtggcctgcgacaccgaaggcttcgtgccaccaaaggtcatgctcatttcctccaaggtgcccaaggctgagtacatccccactatcatccgccgggatgacccctccatcatccccatcctctacgaccatgagcacgcaaccttcgaggacatccttgaggagatagagaggaagctgaacgtctaccacaagggagccaagatctggaaaatgctgattttctgccagggaggtcctggacacctctatctcctcaagaacaaggtggccacctttgccaaagtggagaaggaagaggacatgattcacttctggaagcggctgagccgcctgatgagcaaagtgaacccagagccgaacgtcatccacatcatgggctgctacattctggggaaccccaatggagagaagctgttccagaacctcaggaccctcatgactccttatagggtcaccttcgagtcacccctggagctctcagcccaagggaagcagatgatcgagacgtactttgacttccggttgtatcgcctgtggaagagccgccagcactcgaagctgctggactttgacgacgtcctgtgaggggcagaggcctccgcccagtcaccatcaggccactccctctgcaccgggacctggggctgggccgcctcgtgctccccgggactgtgtggctccggtctcgcctggagccacttcagggcacctcagacgttgctcaggttccccctgtgggttccggtcctcgctgcacccgtggccgcagaggctgcagtccctgggggccgggaggatcccgccctgtggcccgtggatgctcagcggccaggcactgacctgccatgcctcgcctggaggctcagctgtgggcatccctccatggggttcatagaaataagtgcaatttctacacccccgaaacaattcaaagggaagcagcatttcttgttaactagttaagcactatgctgctagttacagtgtaggcaccccggcccagcagcccagcagcccacatgtgttcaggaccctccctgcccaccccc

SEQ ID NO: 242584 - DNA, 1163 bp, Homo Sapiens
  misc_feature (910)..(936): n is a, c, g, or t
ttggcaaatactctttttcaacccatgaacagtaagaatttgtgaattctgataatgaaaaaagttttcctccaggtatgtttgtttcacattcagtcctaaagccttgagctatgtgtacttccctcacacaggaacaccagctgtcctgtctgtgctctgcctgcgcccaaaactcaatattttctctcagcacagaagtcaaaaatgagatatgccccttataaaaccccttcgattcctgagaaaacataataaagccatatgttgcttccttgttggggctcctccacaatgctcccaacacctgtgacccctaggaagacagggagcaaggtggatctggccaggagtcacaggatatacacccattctggagctttcctctgttgttctagaagatgttatttgattagttggggctgggagcaggggatatatgattttgtggaaaaggtatcagataatcaaatcaggtctgcctctgctatagccagtgtgctgctgcattaaaagggaacaaaaggaaggtgcaacgtaagagcagacacaacctgagatgcccttgagatttaggagaacaggagggcgccctttctgttgtgacctgactcttaaaagaaatcttctaaaagaattctttaatttggtaatgagttgaagtccagggtaatggaagctctagggcagagaacaaaagaattgcaaaatgtattcagcaccaaacaatgctaaaccaagaaacatccaatcacaaaactaggaagtttggcaagaagtggttagagaaatctctgggcttttccatgggcagggtcgacagactctcttttcagtgatttctggctctgagaaacctctttactcactagaaaagaactttatttaaatggccaattttgttcctcannnnnnnnnnnnnnnnnnnnnnnnnnntaggatactgaagacagaaccatgtgacttggtgacaaacaaaaggaggggtgcactagaatttcaataggctctctaattccatagaaaaagcaagcaactcaatgcctcctgagcctgcagtgcatgaagagagtgcttgagctgactcagtcatcaggccttctggggctagacataacttctcactgggaacagcagcagcctctttctctctttgtgttttc

SEQ ID NO: 242585 - DNA, 1106 bp, Homo Sapiens
ttggctcaaaggtgtgctctttcttctggggaggcctaggctgaatgcacagtgtcccaggtccagagagcccaaggtggttgctagactggttttggctgcagttcttccccatccacactttctcaaattccagcttaccaaaatctccatcacccaccccctggagtctgctagttctcctttctctgccctgactgtcgcccttttctggtcttatacttatgacaagcatatattctgatcaaaaattgggagccagggtccaatagttggactattcaaagttgcaattgtgcagacaaggtagagtgtgtggtccctgtggctgtagctggctccctagcctacctctctggtgatctctccatctgaggctccttcactttctctccatgggataggggttgggggtactccctagagctgctaggcttgaggccttgactgttgtgtcacccagagccccctcaagccttctgctccccaattctctctgttgcagagttggaagtattggccaagaagagcccacggcggctgctcaagaccctggagctgtacttggccagggtgtcaaagggacaggcctccttgttgggagcacagaagtgctatgggccagaagcccctcccttcaaggatctcaccttcacaggtgagagtgacctgcagtctcactcatccgaaggcgtatggctgatctgacctccgagatgaatggaggcttaaaggctgagctgcaggggctttcagggggtcagtggagccatgtcaggagcctggccaggccgcaccccttgctgtctcagcagatgggatataggaagctcctgggcttagctgtgggaagccaagtaccctcaccggcatgggacatgaggggcagctagacttcacccccttcccgcagacctgcctccagagcaaggagaattctgccttaatctgttgggctccagtctccgggttgaattccagtgtatcccactgggagtgaatggatcatgaggtgggatggccccatctggatgttctgcagatccccacatgggaggagattcccaaagtagaggcagccagaattctgactccctggcagcagc

SEQ ID NO: 242586 - DNA, 950 bp, Homo Sapiens
ttggcacgctccctcgcctggaagcgctcctggagctggcgctgcgcatgagcacggccaacactgaccccttcaaggacgacctcaagatcgacctgatgccccatgacctcatcactcagctcttgcgcgtcctggccatcgagaccaagcaggagaaggggatggcgcacgccgaccccacggagctggcgctgagcggcctggaggccttctctttcgactacatcgtcaagtggcccctttcgctcatcatcaacaggaaagccctcactcgctaccagatgctcttcaggcacatgttctattgcaagcacgtggagcggcagctctgcagcgtctggatcagcaacaaaaccgccaagcagcactcgctgcactccgcccagtggtttgctggggctttcactctgcggcagcgaatgctcaacttcgtccagaatattcaatactacatgatgttcgaagtgatggaaccgacctggcacatcctggagaaaaacctgaaatccgcctccaacattgacgacgtccttggccaccacacaggcttcctggacacctgcctgaaggactgcatgctcaccaaccccgagctgctgaaggtcttctccaagctcatgtctgtgtgcgtcatgttcaccaactgcatgcagaaatttacacagagcatgaaattagatggcgagctgggcgggcagacgctggagcacagcaccgtcctggggctgcccgcaggggccgaggagcgggcccggaaggagctcgccaggaagcacctggctgagcacgcagacactgtgcagctggtgtccggcttcgaggccaccatcaacaagtttgacaagaacttctcagcccacctgctggacctcctggcccggctgagcatctatagcaccagtgactgtgagcacggcatggccagcgtcatctccaggcttgacttc

SEQ ID NO: 242587 - DNA, 1289 bp, Homo Sapiens
caaagggtgttaccaggtgaaattctctcacgtatatctcatcatttattcacttaactcatcacagggaccatcccaggcagaggccccgtggagagggctccgagccacagacatagcttagggccactctggggtgaggactgctttcctgtcataggcatgagaaggatgtcaacaagttggttgaataattaggaaaaaagattctgagaactgagaaaagagaaagaaaacaaagcggatggcagaacggaatgacacatttgtgagtgagtctcagcagaccgaaagctgagtcaaagcaccacaaaactctgggaccttatttcccatctcctagaaagacgggagacggagccacgccaggccaggcgtgatgttaatcgttccatcaaaagcacctaagtcactctacccctccaggacagggagcacagaggtaagcaggggccacaggaggccctggctcacttgtgggtccaagcaggacagtgggcagcaggaccggaactcttggttccccttccttttctctaaagacgcctatgttgtctgatatattcctgtgaagtttcatctactattcctctgatttaggcccttcatgtcctcaggcactttgctacaattttataaatctgtgacagcctttagcataatgcaataaaataatatttgtttcctccgaaagaaaagcagatgtggcctatctaccatcctttcagggcctaggaacagactgaaactcagtgtcttaatcaaagacaacgagtcagcaaagagcagtggcgagcccaggggcctcagagccaatgagacctgagtcggaagtccaggtctacactgtatttgctgggtaagctgggtaaaattacctttcaaagcccggtttcctgatttttaaaaagagaataatagttctgcaatgaaaaacccaattaggtaatatatgcaacgcttggccctcgtgtctgacatgtaatggacactgttatctttaattgcaaagctaatatttattcaaccctgtaataaaacagagtcctaggtgtctgtgaagtaatgaggaggatataaacctctgagcaaagctgagtgagctttcacaaccatgaggttctctaaaaatgacaaagcagacccttgagctcatctggctctaagagtgtcctaagcactcactccatctcctactggattgatgtaagtataaaacaccttcatgggcaattcaactgttaggaaagaggtgtaagcctcacaccacagactgcagagatagccaa

SEQ ID NO: 242588 - DNA, 1318 bp, Homo Sapiens
  misc_feature (183)..(197): n is a, c, g, or t
  misc_feature (1049)..(1082): n is a, c, g, or t
  misc_feature (1120)..(1133): n is a, c, g, or t
acagcagacccagtgtgagaacaataccagcccttcttttgtacctcctgcctttgtcaagccaaatctgaaggaatgaaagtttcacacagattcgagttggaaatcccagcatgacaaatatctgtaatatacagtacatgcaggccacatcctactgccttcctaactaagcacaaaggnnnnnnnnnnnnnnntcaactctgtcccattcagtcattcgcacaacagacgaacttgctttttcctacaaattagtgagaagtaaggccgattgggaaaggtggatggaatcatttggaacagaaacaaccagagcagaactgtatttcccccctccctacttcccctcctgtggcaactcaaaatttgtccacttatataaaaggaacagacctcacctgtcaggtctgtttagggcatggaaaaaggaggagtcctttctgccccaaacctttctggacagcgtagggtatctatactgagccgtctacagatacagaattaaagacagtgaaattcaatctcattgtgacacacctcacttgcagataaccctgtacagtaatgtagttccacagcaaacagaacattttctgaatcacagtctaattttctagtcttcactgctctaagtatttgaaacatgggcagcagcaaagagttttcattgtttgttcacccaaatctttacgacaacagagaagaatgcattatggatacactaaattctgaactatgaaatctaagctgtgctggttctccttttatgaaactgaatttggaacagaaagcagttaccataaaaataaacaaaagtaaaaaactagaacagaaaagggaaggaaaagagtctaaggaatcccagcaggcaaattccaaaatgggagattttggaaaaaatccgaaattggggtagagggaggaaataaatgtgcacaaagggggaaaagaaaggaacgcaacaaacaaacaaaaaacaaggcacagaattttctgcaatctactgaaactaaatccaagtatccaagtttgacttggtaggaagnnnnnnnnnnnnnnnnnnnnnnnnnnnnnnnnnngaggtgtcaaacagcagagtgtactttccaaagaacannnnnnnnnnnnnnacacagcaaatcccaagccttcccagtctcacacctttccacccattcataaaaaaacacacgaatttctcgcaagttccaatatcactgtctctttatcatctaaatagggccagttggacacctcattgaaacaaaaaggctgatctagatgaagtactctttcttttcttcggagttgccaa

SEQ ID NO: 242589 - DNA, 1045 bp, Homo Sapiens
  misc_feature (397)..(439): n is a, c, g, or t
ttggccactgcaacattcctgggctgtactactttgcctaccacatcacagtctatatgaaggatgtgaaggtcagcctcttcaagaaggacaaggctatgctcttcacctatgatcagtaccaggaaaataatgtggaccaggcctccggctctgtgctcctgcatctggaggtgggcgaccaagtctggctccaggtgtatggggaaggagagcgtaatggactctatgctgataatgacaatgactccaccttcacaggctttcttctctaccatgacaccaactgatcaccactaactcagagcctcctccaggccaaacagccccaaagtcaattaaaggctttcagtacggttaggaagttgattattatttagttggaggcctttagatnnnnnnnnnnnnnnnnnnnnnnnnnnnnnnnnnnnnnnnnnnnagtaactttaaaaaaatcatatgctatgttcccagtcctggggagcttcacaaacatgaccagataactgactagaaagaagtagttgacagtgctattttgtgcccactgtctctcctgatgctcatatcaatcctataaggcacagggaacaagcattctcctgtttttacagattgtatcctgaggctgagagagttaagtgaatgtctaaggtcacacagtattaagtgacagtgctagaaatcaaacccagagctgtggactttgttcactagactgtgcccttttatagaggtacatgttctctttggagtgttggtaggtgtctgtttcccacctcacctgagagccattgaatttgccttcctcatgaattaaaacctcccccaagcagagcttcctcagagaaagtggttctatgatgaagtcctgtcttggaaggactactactcaatggcccctgcactactctacttcctcttacctatgtcccttctcatgcctttccctccaacggggaaagccaactccatctctaagtgctgaactcatccctgttcctcaaggccacctggccaggagcttctctgatgtgatatccac

SEQ ID NO: 242590 - DNA, 1576 bp, Homo Sapiens
tcatggtggatgacggagcaactttttgcttggtgttgttgttgctgttgtggtgtctttgtctaggagggtaccaactgtggtttccgcaggcttcttaactggagacatactgctcattatacccagtgtggagtcaggcaaagtgatggatttgctctcttggccctcactctcagaacttctggagtgtgtggggtctccctctagcatatttcctccctgtagtgtctgagacatctctttcataccctttttaatcagtaaggtgtcttgagtgcttagactacttttcacaaggtggatgttgtctgtcagtccttgtagatgtgattggcctgggacacctggttcccctatagtagaatcctcaaataactgtgatgtactggagtcattaacccagatggtgggggttggagtaaggtgtgcaaaggtgtcttctttcatcttatcctcatctggttgtgacttagtctccaaatctgggtcaaagtattgcatgggctcagactcagccaaggagacagcatccaatggaggctcatactcactggatgtgggctctggtgacgatccaacatctgctgcagaccaaccctctgttgccgtctcttcatgggtgggcttttcatagactgtgtctaatgtgtgcagagtaggagatggttcataaggctcagatataagtgtaggggctgctgtccccttcaggtctccttcagtggaagttatctcctcagtcttctcggaaaggtcatcaacaacttcctccagaggtgtgcttgttacttcaggttcaacaagaataactccattgtggttgtgttctagccccatgctggctgaggaaatggtacccaaaacgtgctcttcttcaccaagtagaggtacatctgctgaggattcttcagcactggttactgtctgcacaggagatgctgaggggggagaaatagcaggaaaaggtggtgtgacttctagactcaaggatggaggacttgtggttttaatcaatgggggtacttctgtgcccttagggagatttttcccacggactttggctaaaatatcagcccagcgctccggattaatctgtttgtttgccatgtttatccttcgtctagattcaaacactctgcgaccttctgcaacattggtctctggttctttttccgaatgcttccagagtttcagctttcttctccctttcttggctttcttgtctccattgatggcatcatcctttgttttgaggaacacctcttggtcctttggatgcagaagtctccttgaagtgttctcttcatctcccatgcccgagcccccttcatcctccacgatgtcttctctgactctggaaagagcctttgcacctgggcgtctgcctcttttggatggcaagccagaccctttcttggtcactgtgattcccaccgtaaaatggtctgccccttgctggttgacagccacacatctgtagtaaccactgtcactgacttggacctttgggatggaaagagttccatttggcaacatgtatacatgtgatgtgttccaacttttttgtacaaag

SEQ ID NO: 242591 - DNA, 741 bp, Homo Sapiens
aaactgaagaaaaagccagttgaagtatttggatttaactttacccaactaagacattcacacaatatatgcatgtcagtctcctgttcagtcctagagcctgcagtattgtaatttattgtaaaaccatgtaaccaaatacttaaatatatccacaacatctataccacagaaatgcatagtacataatatactaacatctcaaaataaacttctattacagttttatgcaaattatggtaaaagattatcacctgccacattttgaaatggcaccaacttcaacatcaatgcactagtcaaaatccttactagaagtgatgtcttctgcattatcatctgaacattcaaaatcaagctgttaatctaataaccacagtatgttatcatttaaaatcactgtatatttggatgttaaagcaggtagtaatacagcaggaaaagtgtttctaattcacagtttcaaaactaaagggtgcagttttcaaatatctgattgcttaaattggtcactcaatttaacaactgcctccttcaatacatgtaaactatgtttgcacagcattaggagatgtcttttatttcagaattagttcttactgttacaggagcaccacaaattttaaggaagaggctacagtgtgaaatgagctcactgaaggatatgttaaataaaattttaactacaatataaggtactgcaaaagctttggtccccagcacccaacttttttgtacaaa

SEQ ID NO: 242592 - DNA, 1190 bp, Homo Sapiens
ctttgtacaaaaaagttggctcaacagcctccccacaggaaccacggctttcccgcttcgcacccaggagggtgtgcggatcaccctggactgcgcccaggccaccttcatctcctacgacaagatggtcatctccctcaagggcggcgagatctacgtgctgaccctcatcaccgacggcatgcgcagtgtccgagcgttccactttgacaaggcggccgccagcgtcctcaccaccagcatggtcaccatggagcccgggtacctgttcctgggttctcgcctgggcaattccctcctcctcaagtacacggagaagctgcaggagcccccggccagtgctgtccgtgaggctgccgacaaggaagagcctccctcaaagaagaagcgagtggatgcgacggccggctggtcagctgcgggtaagtcggtgccgcaggatgaggtggacgagattgaagtgtacggcagcgaggcccagtcgggaacacagctggccacctactcctttgaggtgtgtgacagcatcctgaacattggaccctgtgccaatgccgccgtgggcgagcctgccttcctctctgaagagtttcagaacagccccgagccggacctggagattgtggtttgctccggccacgggaagaacggggctttgtcggtgctgcagaagagcatccggccccaggtggtgacaacctttgagcttcccggctgctatgacatgtggacagtcatcgccccggtgcgtaaggaggaggaggacaatcccaagggggagggcacagagcaggaacccagcaccacccctgaagcagacgacgatggccgcagacacggattcctgattctgagccgggaagactccaccatgatcctgcagacggggcaggagatcatggagctggacaccagtggcttcgccactcagggccccacggtctttgctgggaacatcggggacaaccgctacattgtccaagtgtcaccactgggcatccgcctgctggaaggagtgaatcagctgcacttcatccccgtggacctgggcgcccccatcgtgcagtgcgccgtggccgacccctatgtggtcatcatgagtgccgagggccacgtcaccatgttcctgctgaagagtgactcctacggtggccgccaccaccgcctggcgctgcacaagcccccgctgc

SEQ ID NO: 242593 - DNA, 907 bp, Homo Sapiens
ttggctccacagaatctgaagacaaattactataattaataagagatttcagcaagattgctggatcagtaatatacaaagataataggactcatattcaccagcaatcaacagaatatgcaatttaaaagaaaaatattgtttaaataatagcaggtattgtgtggtatctaggaagggaagttgtattacaatttcagggattgttaaaatgtgaaatagtgtctttaaattgctatatggttgaggagtctatatgtgtatatattctaaaagtataaagaaaggtaagggaaaaataaacaacaaagttattcaggatagtgattatttctggtggatcaggagagacgttcatagcttcaactgtattggtaatatattgtcttagttgactggttaacacatgggcattcattgtatttttctttatatacctatggtatattgaaatatttcattaaaaatgaagaaggaaatctactgatgtcattagcccagagaaagaatgctggaggtggaacaaatctttgcagcaagatcttaagtttgggggagttatctgctatatgggcaaagaggagtcagagaaggagatccaaaagaactgtacagagaatgtggaggaaaaattgagtactttaataaagaaacaagggagagaaagtttttaacaagaaaaagagaagctttggtcaacagtgtcagatcccatagaggaactgataatagaaaactgagaagagactgttggactttactaagaagactgtattaacaagactgtcttgatagcaagtgatagaaacagacttcaaactaacataagaaaaaaacacaaaatcaaaggatgaactgtagatcatagacttggtaaaggtacagaaaattgcagacagacactcta

SEQ ID NO: 242594 - DNA, 869 bp, Homo Sapiens
ttctgagagcaatggagcatttcagatgatccttctcatcacaacctggtgagcggtccctgtattcctggtaggagaaagtttcagtcaaagtttgtaattcttttgtcttgcttcaccatgttcccttttcaaggccgatttgttcattaagaattctgtttaatatcagccatcaccaaggtgtgaacatccaactctggcaagtgcagcttgtttcttagccctgaagattgcttagacttcttagctcaatctattaaaggcgctaaacacagaagttaaaatatcttgatcctgaaaagaatgagatcatgtgagagaaagaaggcaactcaaaactcgaggcataatcaggagaagtttcagaggacaatcacatcaagaaacagtgttgttagtccacgagaacctgactttaccaatgctgcaaagccattcgtgagcttccagatgaagtctggtcggcgataacctgacaaaaatgctgggatgataaaacgttattcaagtcaaagaattggtattgaacttagtttacgtatattgactattttccctcaaaacatctcactcctcctcatgattggcctcctggtcatgtttagagaactctgcaaagacttcaagagattttcaaaagaggtcttcttcaatcaggaagtgttagtgtgctaagtggatctcagtgtaggtctagcagcttattatcttatgaccagccataaaattagacacagagtatcaaaggagtttagagacattttctattgaaaggatggaaaaacgaacaagtgaacaataatttctctttgagcttctcctcagcctttgtgataagagaagggatgggagagggggagctccaa

SEQ ID NO: 242595 - DNA, 1635 bp, Homo Sapiens
  misc_feature (1171)..(1227): n is a, c, g, or t
  misc_feature (1268)..(1276): n is a, c, g, or t
ttggtacgcctttgcaggttggcgaagtggttccaggctacccggctagtctggcacggccccgtcttctgcctcctcctccgtcgcgtggcggcgggaactgttggccgcgcggcctcgggaacggcccaggtccccgcccgcaggtcccgggcagataacatagatcatcagtagaaaacttcttgaagttgttcaagaaaaatttgaaagtagcaaaatagaaaataaagaattaacagcagatacagaggacagcatggaagtgttgtcttaggaaacagaacacagcagtgaaaaaacagacaaaatccgctcagatacaactgcagctgataatgttttccggcttcaatgtctttagagttgggatctcttttgtcataatgtgcattttttacatgccaacagtaaactctttaccagaactgagtcctcagaaatattttagtacattgcaaccaggaaaagcctctttagcttatttttgtcaagctgattccccaagaacatctgtatttcttgaagaactgaatgaggctgttagacctctgcaggactatggaatttcagttgccaaggttaattgtgtcaaagaagaaatatcaagatactgtggaaaagaaaaggatttgatgaaagcatatttattcaagggcaacatattgctcagagaattccctactgacaccttgtttgatgtgaatgccattgtcgcccatgttctctttgctcttctttttagtgaagtgaaatatattaccaacctggaagaccttcagaacatagaaaatgctctgaaaggaaaagcaaatattatattctcatatgtaagagccattggaataccaggtattctttaacttttgctttaatctttgctgtgcctctgtacttatgtatgttgaagtacttaaaatagtgtatttttttgactacagtcgtaatatttaaaataaatctaaagcatctttactgttacgctatttttctttaaatgggcagcgtaatacagtggttgaataagaactctctaggttagactttctgccatactgattatttgtagtgagcccttggacaagttgcttaacttcagtttcctagtgattaagatggggaaaataaattgtgcctacctgttagtgtaattgtgagaatcaaatgaacnnnnnnnnnnnnnnnnnnnnnnnnnnnnnnnnnnnnnnnnnnnnnnnnnnnnnnnnnggttcctagagtgtagtaggtactctgaaagtgttagctannnnnnnnnaatttccttatagccctcctttacctggtatagtagtttccagtattcagtaaataatgttgactaacttagattggaaggagcaaagatagagtaagggagaaaaataggaagttattgcaataagtcaagcaagagatgatgctgggtggcttggaccagggtgatggcagtggaggtggcaataaatttgaattttagcagtgtttgggaagtaaagctaactgagtttgctgatctattggatatagattgagaaatagtggagacaacgttggttctggggtttcagcctgagctacttgaaagttgaatttgctagcaactgagttcagaagactgggaatagataatttgga

SEQ ID NO: 242596 - DNA, 1177 bp, Homo Sapiens
  misc_feature (382)..(444): n is a, c, g, or t
caatgctttactataaaagacaactttgtacaaaaaagttggatctcttcaaaccctttattgggcatttggattttctcttcagtgaattgcttcatcatattctccatttattctaaagttgtgttcctatttgtcgctttcaaatctagtttggtggaatccttgcatgttagaaaccttaaccctcgtaatatgtgttgtagatatttttccctcgcctatgagttgtctttcatccttgagcatgagttttagagtcagaagaacaacagtaggatttgaatcatgttacgttattttctagttgtcgtattttttatttcttcagcctcttagaatcttagtttcctttaaaattgagataatagtatctactttnnnnnnnnnnnnnnnnnnnnnnnnnnnnnnnnnnnnnnnnnnnnnnnnnnnnnnnnnnnnnnnagttttgctactgaggattaatctccatttttctggaaaatccagttatacaaaactgctaatttctttacagtgctagataacagcagctaatgttcatttacttcttactctgcacaaagctgtgttctaagtccttggcaaatgctcactcatttgtgagcctcatttaatcctcactctgatgtacatactattgctatcaccattttaaaggtgaaaaggctgagtcccagagagattaaataacttgcttagctttacacatctaataagtggcagagccaggactgaagcccaggcagtggtgctccagagcccatgctccagacttcggtgataccctatctctggactcctttagatacatgaatggttattatctacatggcatttgtgcagtaaccactcagattttgtttagacagaggaataatcaaagtgacagttggtaaaagtctgatttctatctattggtaacatgctccatttctcagatgtggatcttggaacctaaagaggtcaataagaagactctgcctatcttgatgcttagaggtgttcagaattcctcccaacaaagaaataagcacaccttgctctcagttgattaaatcaaaaatatttattaatctttcgtgtgcaaggcactgtgctaggcattagagttgtaaatagaaggcagaaagagcaagtctttagttgtaactagggatggaatgaaatgtacaaa

SEQ ID NO: 242597 - DNA, 952 bp, Homo Sapiens
ttactagtttaggctaaattctggaaagtatttctaccttatggagaacaagcagagccacatctctgtttcaacaagaatatggtatgtttgtattaactctccacatacctttttggttattctcatgaattttaaagccttagaaaaagataacttaattgtatgtaatatattatgaccccaaagctctggatcttaactagtttaggaaagctatgatagaagtccattgactaactattatttaaaaagcaatgacattttatactatcaagttaaggctgcacaaaatatatcaaatctgtgtggatataattgttattcatgctgctcagcagctttcattgatatgtctttgaataacaaaacattaagaaaacacaataactatttcttaatagaagtacagtttggtggatagatacttcaaggtatagacttttctgggggaggagaaaataaaaggtatttttagtggcaaaaagcttgaaaccactgctgtctaaaataattcataacagtaaaaatgcagattagtaaacgtcatagacaaagagatcagaaacttaacatataactgacaagacaaaaacatttaactgggcttcatttagaataatttatatctgataaattgaatacatcaggatttgatgtattaagagcaatttcaaaagataataaaaataagctatagcatatgtcctgaaaactatttacaataccatttaaatattttattcatatctatccgaatattgaccaggacactaatgccacactgcagagttaataatctgtgcattttctttaccgtaatggacagagtatgctttcttagctgcctgattcacatttctctaaaaatgctttatcggttaaagctttcaaccagcttaaaaataatgcctctcccatgtctccatgagtggaaaaaaagcaaacccaa

SEQ ID NO: 242598 - DNA, 1580 bp, Homo Sapiens
  misc_feature (167)..(191): n is a, c, g, or t
taaacaaaggcccaaacttagtaataaaacagtatgatctcaaggaactgtcgtgatcttagtataaataacactgttgacagagttcaatttctatcaaatgttttgggtattttcacaatttagaccaaaataaagtatgttttctttaaaagagacactggggnnnnnnnnnnnnnnnnnnnnnnnnncactgttatggaataaatgctccccatcaccagaactgttgagtagaggctgggttttgcagtaagagggggtcctgagagagatgctatgtgacctggttggggaggggatccctctagtttggagatacttttactctaatccctgttgtcagtgacatttccgtttataacagccaatgattacctaaaattgcttttcccttaataaaaaataacattttaaaacatcattgctgaactttcagagttagcgtatgccataaaataagtaactgtttgcccatgttcctcctagattgtgacctccttaaggatgttaatttagtacctgacataataagttacaattattgaacaaacaaagaagattcattctattaaaaaaagatagatttgtatatttaattgacaccaggtgattttatatcaagctatcagttcccagactccaaataaaatcactggcacagaactttgccataggccaaggagtctgcatctggcttggtcatcctgctaaactattcacatctgattttattttctaagtgatttcacatatcttataacaactccatgtcagaaatactacagagcagatctgacatatatatgagctggagtagcagagacttagtctaaagaaatagtttcatctttttaatgcagtttctttgggaataaggtaaagactctctcaagtgaaagccaatccaattcactctgaaatcaaggtttaaaattttcttttacagttcagcaaatgcattaatattttaattccttatatatgttatgtaagggtaactgtgccttttaaaactttctaaggcaatagtcatttttttaagttagaaagatgttttgtaaacaaggaaaagtgctgaaaattttcaagatattcatactgaaattttcagtctgtatactttcaaatacattttaaataattaacaacccatcaaaatttccactagtcattatgatttttttaacccttttattcaatacaacattttgtttgcaatgtaaaagatcttatatttggtccaagcctaagtcatgccactttgaatctctcaaggccttaagtagaaagatatttcctgaaaagcacacataagactgctagtgaatcttctccagcaccaaaaagtctgccactgtcaaagcagaatgcattttaaaggcacaaagtcagcagtctgaccattttccagcgtcagcaaagaagcattacagtatagaagaatcaattgtgcatttaagaaacaaaacacatttagagttatcttaaaaaagttcaaattgcatttgttgatccatatcattattagaaagaagaaaaaaacggagtgttatatttaacttcccctgataaagctg

SEQ ID NO: 242599 - DNA, 1155 bp, Homo Sapiens
ttggctttgggatgagtcacgaagcctgtgctaccttcaggggagggctggggaagagttaaactccatctcctggaggggctgctacatatgatcatatgatgttatttggagtaagaaagatttgcctcttctccacatttacttgtttattcaattatttataccagtatgggctcatgatatttactgtatattttttattataattcaatcatccaatatattatttcttttgttgttcaaatttttccatctttggccattggcagccctttcacgttggcatctgtgtccattggacaatcccccatccttttgtttttttgaaaatttccttactttttgatatcatgagatactccaggctcatcttgtcttctctctgatccaccctagaatcagccgtggttcccctcattggagaatgatatttagaaacggaaacctgggtgctgggtgtgctcagtgggacgagggtgtcactgcctccagccctgtcagtgaagagagctgcgtaatgtgcgtgcagataataccctatgtgtgaacacatacttcagattatctctggatctgtccatccttatatcgatgcaaagctaaacatgagttcacactgatgtctctgattctcatctagtaccacagggttcagtctaaacttcctcttatttacaaataaccttcccctccaacacaagaagcctgcctcccatggtttgccatccgttgacttatctgttcaatcccagtgtatgtgaattgttaacttgtacccctgtgggaaatttaccaacaaaggaatgatattaatgtccttttgtctttagctttacaatttccactcaaaacatcatattctgaagttactcaggtcagcttcctgtttctttaagttcgccctcattactgtccgcgctttgtgatgtgcagtcatgtgttaccaccccagtgccagaaagaagagctcctcgtgtgtccgccgatggccaagcactcctctccccagcccctggcaactgctagtccaagcttgtccaacccacagcccgtgggctgcatgcggcccaggatggctttgaatgtggcccaacacaaattcgtaaactttcttaacaccttatgagatttatacatggactttttttgctc

SEQ ID NO: 242600 - DNA, 1263 bp, Homo Sapiens
  misc_feature (933)..(985): n is a, c, g, or t
gacccaggagacccagcgctcctgccgcttccggagatctgacccgagataacagcctgaaatagggaatgcggacccaggccagtgtgcgtggccggcccgtgtggcccccatgctgcttaggaagtccccgtccaggagcactggaagttgctgtgagagccaactagggttggcggcctgagggacagtcacccagccacagaacgacggcacggaagacatgaggcagcatgctcacgagagaggtgagggtctcacctccaggggcgggaaggagagaaagtgggcagacaaggtgtagcagtggtgacaagcatgagggagaggtgtggcctagtccccaaactacataggaaacaccagacttcccaagaaagcctaaaaaccaacagacaccatgacatgcgaagcctccacgatcctgtcctccccacctcctgccccaactcccctgggggccctgcctaagcctcaggacaagacatgccctgctccaggacctctgggccttaagcacagcctcaggccctcccgccccccaggcgctctccaggcatacgacgccatccctgcctcctgtctttaggggtctgtgaactccagaaaggcacggccaggcctcctcctctatcctcagggcctccccagggcctggcattcagagacagcaggaggtggaggggccctggggatgggacagctgccgccctgagttctccacactactcagtgtggctggccctgccgccagctccagcgttttgcagagggaaacaagtccagctccatggccacagggcaccggggccaggccgtggacagaggtgggggctgctgcccctccccagtgtctcaggactgacctgatcacatggcagtgcccccgccttacccaagctggcttctagctcctgtgcagtcagaggcagnnnnnnnnnnnnnnnnnnnnnnnnnnnnnnnnnnnnnnnnnnnnnnnnnnnnncgcttaccgcggaggcgctggccgagagaatgtaattacgaggtctagtctcctgaaagtcaggcaccgtcgtggctttggcttctgcagccttggccttcttcagcctcgctttgcaggcatccaagtccagacgccggttttggaggagccgcctctccttcgagatggtcttccagtccccctccaggaagttgcgcaagggtgtgaggaagctgatggaggccgtgtggataaaatccctctccgcggctcccagttgcttttcagcttcccaa

SEQ ID NO: 242601 - DNA, 1064 bp, Homo Sapiens
aactttgtacaaaaaagttgggtttgaagccgcgccgcgagggagcgaggtcgcagtgacagcggcgggcgatcggacccaggctgccccgccgtacccgcctgcgtcccgcgctcccgccccagcatgacagccccggcgggtccgcgcggctcagagaccgagcggcttctgacccccaaccccgggtatgggacccaggcggggccttcaccggcccctccgacacccccagaagaggaagaccttcgccgtcgtctcaaatactttttcatgagtccctgcgacaagtttcgagccaagggccgcaagccctgcaagctgatgctgcaagtggtcaagatcctggtggtcacggtgcagctcatcctgtttgggctcagtaatcagctggctgtgacattccgggaagagaacaccatcgccttccgacacctcttcctgctgggctactcggacggagcggatgacaccttcgcagcctacacgcgggagcagctgtaccaggccatcttccatgctgtggaccagtacctggcgttgcctgacgtgtcactgggccggtatgcgtatgtccgtggtgggggtgacccttggaccaatggctcagggcttgctctctgccagcggtactaccaccgaggccacgtggacccggccaacgacacatttgacattgatccgatggtggttactgactgcatccaggtggatccccccgagcggccccctccgccccccagcgacgatctcaccctcttggaaagcagctccagttacaagaacctcacgctcaaattccacaagctggtcaatgtcaccatccacttccggctgaagaccattaacctccagagcctcatcaataatgagatcccggactgctataccttcagcgtcctgatcacgtttgacaacaaagcacacagtgggcggatccccatcagcctggagacccaggcccacatccaggagtgtaagcaccccagtgtcttccagcacggagacacagcttccggctcctgtttgacgtggtggtcatcctcacctgctccctgtccttc

SEQ ID NO: 242602 - DNA, 1394 bp, Homo Sapiens
  misc_feature (811)..(847): n is a, c, g, or t
tggtgattatgctgaggacagacttggaaggaaaagaggaagaaaagaaacagaacagtcagaagtttgtggcaagacaccaggtgagagataacagggacccgaaaaaacaaaaggcagtggagaaagagaggggaaaccagattcaaaagcaaaaaccatttctgtggtagactaagatttggtgaccaactaagtttggccccactaaaggaagggatccagtgatgagcaccatagagcagaggagctcccagggtggtactggcagggcaagggctccgttacccaggaataaactgcactgaggccacagctacaggaagtctagtttctttcaagtctcttttctttctaccattcttaacccacagtgtgccttccaaataatcaagagtcaaactacagtgtaaatcaccactattattctagttaccgctgtggcttcctagtctagtaattttttttccttcccttaaaggtgactacctacttcagtctcattccaattgtggtcttctgaactggcagcatctgtaccacttcagagcttgttagaaatgcaaattcttaggtcccagcccacacctactgaatcagaatttctcaggtagaggcagtaattcaggtgattcttaacacacgctaaagtttgtgaagcactagctaacctcttcagatcacagctttcaatcctgtatccattttccattactctatcctaggtacactttcaagaccaaaatgtaaatttacaaatgtgtctcagtaagaaaagttacagaagctgggccgggcgcagtggctcatnnnnnnnnnnnnnnnnnnnnnnnnnnnnnnnnnnnnnattctgtaccttccaattcctatcttttcagaataactgatgttgactgtagctccttgcctggccttactcctgccctctaaaatctggattctacagggacagcatagctccctcgcatttcctctttctagaccaatgtaattccaagatctcagcgtctgagagcattacagaagtaaaaatacgaagggtaatagctaagatgttaagtgaaatctaaagaatggctcagaaactcaagggataatttgatagacattacagatcctaattctgttctccacctccctcctgatatcgataacattcactcctacctaacctgaggaaatgagtatgatccaatcttcaacaacagtctttaagattacctttttttcagccaagggtatagcgtcccttagaaattaatccagtggatgcctttgattcctttttctcacaactccagaaagatgtgcctgtttataccctcctaatattctgccagcaccttcacttttccctcttccatctgccttatacacatgcgggtctttgccaa

SEQ ID NO: 242603 - DNA, 1275 bp, Homo Sapiens
actttgtacaaaaaagttgggtgtgttcaccctctatagagaaccagcgctggaaccccgtcacaggctacaccagcaggggtctgcccacggaccggtacatgtggagcgatgcctcggggctgcaggagtgcacgaaggctggcacgaagcccccgtccctgcagtgggcctgggtttccgactggttcgtggatttcagcgttccggggggcacggaccaggaggggtggcagtatgccagcgacttccctgcctcataccatgggtccaaaacgatgaaggattttgtgaggaggaggtgctgggccagaaaatgcaagctggtgaccagtgggccctggctggaggtgccccccatcgccctcagggacgtgtccatcatcccggagagcctgggtgccgaggggagtgggcacagcatcgccctctgggccgtcagcgacaagggggatgtgctgtgccgcctgggcgtgtcggagctcaaccctgcgggctcctcctggctgcacgttggcaccgaccagcccttcgcctccatctccatcggggcctgctaccaggtgtgggccgtggcaagggacggctccgccttctaccggggatccgtgtacccctcgcagccagccggtgactgctggtaccacatcccgtccccaccgagacagaggctgaagcaggtgtccgcggggcagacgtcggtgtatgccctggatgagaatggaaacctgtggtatcgccaagggatcacgcccagctacccgcagggctccagctgggagcacgtgtccaacaacgtgtgccgagtgtccgtggggcccctggaccaggtctgggtgatcgccaacaaagtgcagggcagccacagcctgagccgggggacagtgtgtcatcgcaccggcgtgcagcctcacgagcccaagggccacggctgggactacggcatcgggggaggctgggaccatatctctgtccgggccaatgccaccagggccccccggagctcgtcccaggagcaggagccgagtgccccaccagaggcccatggccccgtctgctgctgaggcccccccacacacctacatgcagggacggtgcccagtttgggggatcaaggctgagccattcttgtgctggagtgtgcaccgtgggagcaatgtgggcccaggtggactcaggaggggaacctggccccaggctgcggccacttcagaggcactggctgaaacggccctgaaatgtgaagctccgcggacactcccacacgtggtcccc

SEQ ID NO: 242604 - DNA, 963 bp, Homo Sapiens
acaaaaaagttggcgtcctcctctcaggctccctcttgtccacggcgggcgggcgccgagctgctggctatgccactgaagcattatctccttttgctggtgggctgccaagcctggggtgcagggttggcctaccatggctgccctagtgagtgtacctgctccagggcctcccaggtggagtgcaccggggcacgcattgtggcagtgcccacccctctgccctggaacgccatgagcctgcagatcctcaacacgcacatcactgaactcaatgagtccccgttcctcaatatctcagccctcatcgccctgaggattgagaagaatgagctgtcgcgcatcacgcctggggccttccgaaacctgggctcgctgcgctatctcagcctcgccaacaacaagctgcaggttctgcccatcggcctcttccagggcctggacagcctcgagtctctccttctgtccagtaaccagctgttgcagatccagccggcccacttctcccagtgcagcaacctcaaggagctgcagttgcacggcaaccacctggaatacatccctgacggagccttcgaccacctggtaggactcacgaagctcaatctgggcaagaatagcctcacccacatctcacccagggtcttccagcacctgggcaacctccaggtcctccggctgtatgagaacaggctcacggatatccccatgggcacttttgatgggcttgttaacctgcaggaactggctctgcagcagaaccagattggactgctctcccctggtctcttccacaacaaccacaacctccagagactctacctgtccaacaaccacatctcccagctgccacccagcgtcttcatgcagctgccccagctcaaccgtcttactctctttgggaattccctgaagagctctctccagggatcttcgggcccatgcccaacctgcgggagcttt

SEQ ID NO: 242605 - DNA, 636 bp, Homo Sapiens
tttgtacaaaaaagttggcatcctcaagaccccgaaggaggacctgtgctccaagtttgggatggacctgaagcgagggatgctgctgcggcttgcccggcaggacccccagctgcaccccgaggaccccgagcggcgggcagccatctacgacaagtacaaggaatttgccatcccagaggaggaggcagagtgggtgggcctcacgctggaggaggccattgagaagcagagacttttggaggagaaggaccctgtacccctgttcaagatctatgtggcggagctgatccagcagctgcagcagcaggcactgtcagagccggcggtggtgcagaagagagccagtggccagtgaccacacagctcctccatgcctgaccaacaggcccagctttccctgccaggccctttgcactgaggacacagatcccggggagctgtgagggccaccggtgggcagtgggtggatcctggtttcgtgtgctgcccatgcaccttccagcccggggccagcttggcagggatccccaggaggcctgggccgcccagaggctcctctcaggctgggccccgacgtttgcggcagtgttccttgtgcccgtggggccgggagcgagtaaagtctgggccagg

SEQ ID NO: 242606 - DNA, 828 bp, Homo Sapiens
gaaaagattcaaagatgctgttcttaaaagtgtaaaaaataactaatatacaagagagtcactaatatctaaaatgatcttgatacccatctgtttaaggactagttcagtaagactcaaagattgaactaggttatttattgctctatgttctctacatatggaccacagaagtccgactcaaagaatgtaaaacaaggcagattatgcatatatgtgtgtgtgcatgcatgtatatgtatatatggttaggcctaccaggcaatccttatcatctctgggtttatgatatgacctagattataggtatgttatgaactgaatgcttatgttctcctcctcgtctgcaaattcatatgttgaagccctaacatacaaagtgatggcatttggaggtggggcctctgggtggtaatcatgtcatgagggtggagccctcatgaatgagattagtgcccttataagaagagacaggaaagtaacgatgtctctctctctctgccaagtgagaatacagcaagaagccagaagagggccctcatcaggaattgcgctggatggcactttgatcttggggtttctcagcctccaactgtgagaaataaatgtgttttgttacgccacccagtttacggtattcacccaaaatgactaaggtaaggtaaagccctcctttcattcttcatggtctttttgcaaaacaagagttaattatatgccaagaagcattagtgccagcacagttaaaacactctagcgcacgttaattatgatgattacaacttaagaaaactataatcagaaacctggccaggcacagtggcttat

SEQ ID NO: 242607 - DNA, 1251 bp, Homo Sapiens
gaaatacattgggttatgtaagcatgttatataaccatatttggaaaagaagatgctctgaaacaatgtttttatttccaatgttgaatgttttacttcactgagaataataatagtattaatgtattaatttataattaatttaaggatgtagtcatggtattaaaatattaagtacttactttgcactaaacactatgctgaaagctctacctcattaattgtcaaaaccatgagttaggcgctagttttgctggtgtggcccaggtgggcttttgctaccacagtgtgctgagggctgctcctcagacaccttccttggcctcacccatctcagagcacatactcaggagcatgctgggtaatacagacaggtacatggccagagctaaagaacaatctggatagaggaaggctgaatgcgcccctccatgacagcagcaaaggagcacctcacagctgctgaacatcccccctgccgccaccaaccaaccaacaacactagtggtgccaccagtgggacatcctgagaggaatcttgggtcctgggcagcaggacctccaccgaggtgcatcacattgcattatgttctgctttgtgtgatggtctctgcagtttctgcattggttgccattaaaaactttacatcttttgtgtctaatgggatctgtctatccgtcagcatctcattgcaacaatcatgcaagttatctccaatttacaaacacacgagcaacttaagagaggccaagtaagctgacaaaggcattaagtgatcaagccaaggctgtctgactagaaaggctagaatttacccaaagggagagctggttaaggctttttcaatttttgcttctttttgcttgagattttaatgtgaagctccttgggggagagacagtccatagctatgtggcacctaacagagctttgtgtacaatgcaggcactcagtaaatatttattgctaaacgaatgcactaaagtcagtgacaagcaaaaggcaattttaggatataaatactgatgactaagagactgcctgcagaaagttcacagaattcagttattttagaataaattgttcatcaaatattcctttaaatatgatctatattttaatgaatgaatactaaaaaaggctaaaacaatttgcctccagacgcagcaattaattcattactatatgctgttttcaggaaagacataactactaggaacaccatgaaattcattttagaaaaaggccaa

SEQ ID NO: 242608 - DNA, 1502 bp, Homo Sapiens
ttggctttgcactgctgctggggcctctcctagaggagaatgcatccgacctctgctgtctcatttcctctctggtgcaactgatgatggacccccactgcagaaccagaattggtttccagagcctcatccaaaaggagtgggtcatgggtggccactgtttcttggatcgctgcaaccatctccgccagaacgacaaagaggaggttcctgtgttcctgcttttcctagattgtgtctggcagctggtgcaccagcatcccccggcatttgaattcacagagacttacctgactgttttgtcagatagcctgtatatacctatttttagcaccttcttcttcaattcacctcatcaaaaagatactaacatgggtagagaaggccaggatacacaaagcaagcctttgaatctgctcaccgtgtgggattggtcggtgcagtttgaacccaaagcccagacattgctcaaaaaccctctttatgtggaaaagccaaaactggacaaaggccaacggaaaggaatgcgcttcaaacatcaacgacaactttctttgccacttacacaatctaagtcatctcccaaaagaggatttttcagggaagaaacagatcatttaattaaaaaccttctgggcaagagaattagcaaacttattaattcttctgatgagctccaagacaactttcgagagttctatgacagctggcatagcaagtccactgactaccatggtttgttgttaccgcatatcgaggggcccgaaatcaaagtctgggcccagcgctacctacgttggattccagaagcccaaatcctaggtggtggccaagtggccactctgagcaaactcttggaaatgatggaggaagtccagagtttacaagagaagatcgacgagagacaccacagccagcaggccccccaggctgaggccccctgcctgctgaggaactctgcccgcctctcgtctttgtttcctttcgctctgctccagcgacattcctctaagcccgtcttacccaccagtggctggaaagctttgggagatgaagacgatttggccaaacgagaagatgagttcgtggacctaggggatgtgtgacctgtttgttgagtgattgtgaaagaggaatgtgggagattgggacagctgatccctggatttgtgtcacgctacagctcatgctggctgggtccttagcccggcactccgttagaataaacctgggccttcgggaaaagaggtggctctcattatttttcatgattctaaaagactatgcaattaaaaccgcatctgtagtattattaattggaaaggaattattacttgacccgtaatagggttgtggccgttttctgatgcctaaagtattatacagagcccacaatggccagtttactaccagaaagggcttcagtaagatattcttggacttgatactttcttcagatcctctttgtgccagataatttatccagtcattgggaatagtaa

SEQ ID NO: 242609 - DNA, 865 bp, Homo Sapiens
  misc_feature (370)..(419): n is a, c, g, or t
  misc_feature (518)..(598): n is a, c, g, or t
  misc_feature (617)..(645): n is a, c, g, or t
actgaaataagattttaaacgataccatttatagaaacccatgtagattttatatactccttgcttaaactgtattttaaacttaagaactatcagctctagatttgtcaactagaaattattttaactaccataatatattagtgcttaaaatatcataaaaaagatatactttatatggaactaaaaacttttaatagaaagctttgaaattagaaatatttgctgaagtcctcaaaagaaagaaatacctttcactgctttaaaatatatgacagaaatgatatttaatttccaagcttccaagattaaaatttgatccctaacatttgaatatgtacatattttataatttttcaacatctgtgcnnnnnnnnnnnnnnnnnnnnnnnnnnnnnnnnnnnnnnnnnnnnnnnnnncaagagtgttaagtgaacaaatagtggaacaaagaaggaataaattattgactattcaaaaataatcattaaaaaaaagatatttggaaacaatttccnnnnnnnnnnnnnnnnnnnnnnnnnnnnnnnnnnnnnnnnnnnnnnnnnnnnnnnnnnnnnnnnnnnnnnnnnnnnnnnnnagagcaagattctgtctcnnnnnnnnnnnnnnnnnnnnnnnnnnnnnccataaaagtccaggaaacaccaaggaatgatttcagattcaaagaaactaaagagatatgacaactaaatggacatataattctaaactggatccttttgctatacaggaaattattgggacaatttgcaaaacccaaataagatctaaggacaaggtgaaaaaaatgtattgatgttaatttttattttgatagctatattgtggttacataagccaa

SEQ ID NO: 242610 - DNA, 960 bp, Homo Sapiens
ccgccccggtgggcaggcgcgggcctcggcccatcggcgcgtaggggcccagtaaccatgacgacggccgttgtcaaggccgagagccaatagaggcgtcgccggggctgtttcaaaaacctaaagcaaacaacgaaaaacgctacatcgttgggggaggggaagagactgagaggacccggggcccctccctgaggctcagaccaggcctcgcggccccggccggcgtgagccgtacaaaatctacgtcacttggggtagaaaaacaaaaacaccgaaaagcccacgccggccgctctgaccggccgacacgctcacttgcggcccttgggcactttggggacgctgggcttggccgccttcttcaccttcttgcccccggcggccgccgtcttcttggccttgccgcctttgtccttcttggcgccagcgcccttcttgtgcgagcgctgctccggcttctggcccctggcgggcttcttgtccgcgcgccgggagccggccgcgcccggggctgccttcttcgctttgtgcgcggtgggggccggggcggtggcggccgccggggctccgcgccgctccccgccgccctccagcttcttgcggttgagcttgaaggaaccgttggcgccggtgcccttcacctgcagaagcgtgtcgttctgcaccagcgccttgatcgagtacttgaggtaggtgcgcccattctgctggtcgaaccacggaaccttcttggcctcggtgtagatcttggccagcgacgagccgttgcgctcgcccagcctacggatggtctccaccaccagctggctgtacttgcccggctggttcttcttcttgctattcttcctcttcttagatggggacaacgccgccgagccgccagccttggtcaccttcttggccattccctcggcggtcgtcactggcagggcctcctcgccaacttttttgtacaaa

SEQ ID NO: 242611 - DNA, 341 bp, Homo Sapiens
tacttgaggttggtgcgtctcattctgttggtcgtaccacggaacctttttggctttgttgtagatattggctagcgaagagcatttgtgctgggccagcctacggattgtttccaccaccagctggctgtattggcccggttggtttttcttcttggtattcttcctcttcttagatggggacaacgccgccgagccgccagccttggtcaccttcttggccattccctcggcggtggtcactggcagggcctcctcgagctccacggacatgatagcaagaggattggtggcgggcggcgcgcggaagccggggggccgcgccgggaagaggaaggcga

SEQ ID NO: 242612 - DNA, 1403 bp, Homo Sapiens
ttggccagcaacagacgccggccgccaagatctgcatccctaggccacgctaagaccctggggaagagcgcaggagcccgggagaagggctggaaggaggggactggacgtgcggagaattcccccctaaaaggcagaagcccccgcccccaccctcgagctccgctcgggcagagcgcctgcctgcctgccgctgctgcgggcgcccacctcgcccagccatgccaggcccggccaccgacgcggggaagatccctttctgcgacgccaaggaagaaatccgtgccgggctcgaaagctctgagggcggcggcggcccggagaggccaggcgcgcgcgggcagcggcagaacatcgtctggaggaatgtcgtcctgatgagcttgctccacttgggggccgtgtactccctggtgctcatccccaaagccaagccactcactctgctctgggcctacttctgcttcctcctggccgctctgggtgtgacagctggtgcccatcgcttgtggagccacaggtcctaccgggccaagctgcctctgaggatatttctggctgtcgccaactccatggctttccagaatgacatcttcgagtggtccagggaccaccgagcccaccacaagtactcagagacggatgctgacccccacaatgcccgccggggcttcttcttctcccatattgggtggctgtttgttcgcaagcatcgagatgttattgagaaggggagaaagcttgacgtcactgacctgcttgctgatcctgtggtccggatccagagaaagtactataagatctccgtggtgctcatgtgctttgtggtccccacgctggtgccctggtacatctggggagagagtctgtggaattcctacttcttggcctctattctccgctataccatctcactcaacatcagctggctggtcaacagcgccgcccacatgtatggaaaccggccctatgacaagcacatcagccctcggcagaacccactcgtcgctctgggtgccattggtgaaggcttccataattaccatcacacctttccctttgactactctgcgagtgaatttggcttaaattttaacccaaccacctggttcattgatttcatgtgctggctggggctggccactgaccgcaaacgggcaaccaagccgatgatcgaggcccggaaggccaggactggagacagcagtgcttgaacttggaacagccatctcacatgtctgccgttgcaacctcggttcatggctttggttacaatagctctcttgtacattggatcgtgggagggggcagagggtgggggaaggaacgagtcaatgtggtttgggaatgtttttgtttatctcaaataatgttgaaatacaattatcaatgaaaaaactttc

SEQ ID NO: 242613 - DNA, 1454 bp, Homo Sapiens
  misc_feature (907)..(1002): n is a, c, g, or t
ttggtaattattggctttgaatttttacaatgcaacattgtattctcacttttagagtgtattgtgcattttatttgcatacaatggatttatatatgtgtgttcttttctgttttcaaatgaaatgggagcaagctacatttcgttattgagactgggttttggatatccttccgttctttttattgatgatctcccatgaggaacttttgtgtatttccaaggggttctgctattacaaaccatgctgatgtacttccttgtgcatacaagtggaagtatacacttgtgggagattgttttcagaataaattactaaaattgagtaatctgccacatgaaaaatgggctcaccactgttttggttacatttctttaatcatgatggcattgagcaccattttcacacttattggtaattcatatttctttttctgaaaactaactattcctgtcctttgttgatttttccatttgggtatttgtgtttttcttgttggtttgcaagagctctttgtatattaaggaaaatcacactctgattttcacacagtgttgtaaattttttttctagtttgtcatttgggagtttttaatggagtctctgctctacaaaaatagaatttagcattctgtttatggcttttatgttttgtgttttatttaggaaagattataaaataattcacttattttcatgggttctggaactatttgttttaggaaatgacctaaaaatctcaatggcacctaccattcattttctgcctaacacatagtaggggctctacatgattatctgtaattgttataattacaaggaggtgatggttttcctatttgatagttgatgaagttgaggctcagggaaggcaaagaacttacctaagcaacatagttctaagcnnnnnnnnnnnnnnnnnnnnnnnnnnnnnnnnnnnnnnnnnnnnnnnnnnnnnnnnnnnnnnnnnnnnnnnnnnnnnnnnnnnnnnnnnnnnnnnngtttattagtcttttattgctcctgcaagaagttaccataacatcagtggcttaaataacataaatctattatcttatagttctgtaggataaaaatctgacacaggtctccctgagctaaaatcaagggcttcattcctttttggaggttctcaggagagaatctacttccttgccttttccatcctctagaggctgctcgcattcctaggctggtggccccatcctccatcttcaaagccagcactgctgctctctgaacctgtttctataatctcattttgctctgcctctcttcttctgccagttttggggacccttgtgattacactgggtctgcctggatgatccaggagagtctccctcttttaaagtcaattgattagtaacttgaattccatctgcaacattaattcttcactctgtagcccaacatattcacaggtttgggg

SEQ ID NO: 242614 - DNA, 776 bp, Homo Sapiens
catttaactttttattactttttaaaaatccaaattcagataaattaacacactaggttagaacctcaattgtatttgatacattatatactggatttctattactaaaaagccagttggaatatggcctatacgaaccaaagagtgtatacaaaatggaagtggtcatcaggcaataattgtttccttggaactctgcaccgactgtccatgctctgtggggacttacacattcaagtttgacagttgaaaaaccaactggagctgcttttccaagaatgttctgttgtccttcaaatagaattccatgttatttctttcttgccttaagctcttatatctttcaaatgacctaagctgatgaactggagtaaacacaaactgctgcagttatcaattagcaagcctagttcaccaatacttcaaaataaacagacttcacaagtttatttccattcctaacagtggaataataacttaattttgtttacttttgtctttgtagatttctgtctgcagctccagtaagaatgccaaatcagatggcttttaggaaatgctcataggagagaactagagttattcctcacactgaatttaagtcttaccagatttctgcaggttcatatgttaacgttctgatctagcctacctgtaagtctagtttatttctgtacacacttccaaatactcttcataaattttcacttctgactgaaatataacaccttgattgataaaatagtttcataactatagaattttagtgaagccaa

SEQ ID NO: 242615 - DNA, 1314 bp, Homo Sapiens
  misc_feature (961)..(988): n is a, c, g, or t
gctaaaacagcaagcttcatctacaacataaggccccagctatgtattaaaatgtatcctgatgtcctgaattattctttaatcgatatgctacgatgccaaaatccacccccagttcttttcctcaaaaaagcaaatttaaaacctcttccaatgcgtgatgcttattactcaagtactagaaagatttgggtgcagccagtaattttcctttttattcaagagcagggctggtgcaggactactacaaaatgtgtgcttcttggactagtcactcacagcataaaggcctgagtttaagagtttgaaaagaaggaaaagaaagcaaacagaaagaaagttgatgtgtgtttatagtccccgctctacctcaggtgaaggccagacatccacatccacagaaaggaacaactggccttttagacagttggaccagggatccagtgtccattgggatggccgtgtaatgaaaatggctagctccacttgtcctggccattcctaatggaggaggattccaaatgcagtacttagagtagttcttgctttagatctggaaatataggtagccagatacagtactatcagaaactctggttaaaatacacataaaaactcagaatctactgtgtttagggctttcttccatcttaacttagaatgttttagcttataaaaatggaaccttgaaatagtctcttaaaccacagaccaaaacatgtaggtggatgtgtatatacacgaatatgggtgtatctctgttcacacacacccagttttgaccattttgcttcattactacattatgataaatggtaaagcaaaaatcttatttaaaaaaagctgtagtaaacgacgcaatcagcagccaggtatagactctacatcccaaaccaaacacgatgctatatatttacaaagaaaatcattttcctcaacaaccctcaactgtaaaggtaannnnnnnnnnnnnnnnnnnnnnnnnnnngtacaaacactatctggtaacagttttaccggttacaactgggaaggcatctggaagaaggtcccctctttgtctttctctctcccctgtctcaatgaggctccgagctctgcctggcggacattcccacacagtgctggttttgaaaggtagtcaagacacagtcgcccgttcaggacgggtctccacagtcctgcccctgggccctccccgttacaaggcctttttgtgagggctgctacgcaaactctctttcccccgcctctgccgtaccacaaagtccttctcattagaaagagagatggggcggtcagtgtttgggccaa

SEQ ID NO: 242616 - DNA, 1321 bp, Homo Sapiens
actttgtacaaaaaagttgggcaagcgccatgttgaagccatcattaccattcacatccctcttattcctgcagctgcccctgctgggagtggggctgaacacgacaattctgacgcccaatgggaatgaagacaccacagctgatttcttcctgaccactatgcccactgactccctcagtgtttccactctgcccctcccagaggttcagtgttttgtgttcaatgtcgagtacatgaattgcacttggaacagcagctctgagccccagcctaccaacctcactctgcattattggtacaagaactcggataatgataaagtccagaagtgcagccactatctattctctgaagaaatcacttctggctgtcagttgcaaaaaaaggagatccacctctaccaaacatttgttgttcagctccaggacccacgggaacccaggagacaggccacacagatgctaaaactgcagaatctggtgatcccctgggctccagagaacctaacacttcacaaactgagtgaatcccagctagaactgaactggaacaacagattcttgaaccactgtttggagcacttggtgcagtaccggactgactgggaccacagctggactgaacaatcagtggattatagacataagttctccttgcctagtgtggatgggcagaaacgctacacgtttcgtgttcggagccgctttaacccactctgtggaagtgctcagcattggagtgaatggagccacccaatccactgggggagcaatacttcaaaagagaatcctttcctgtttgcattggaagccgtggttatctctgttggctccatgggattgattatcagccttctctgtgtgtatttctggctggaacggacgatgccccgaattcccaccctgaagaacctagaggatcttgttactgaataccacgggaacttttcggcctggagtggtgtgtctaagggactggctgagagtctgcagccagactacagtgaacgactctgcctcgtcagtgagattcccccaaaaggaggggctcttggggaggggcctggggccttcccatgcaaccagcatagcccctactgggcccccccatgttacaccctaaagcctgaaacctgaaccccaatcctctgacagaagaaccccagggtcctgtagccctaagtggtactaaactttccttcattcacccacctgcgtctcatactcacctcaccccactgtggcctgatttggaattttgtgcccccatgtaagcaccccttctttggcattcccacttgaaattacccttttgcccc

SEQ ID NO: 242617 - DNA, 1182 bp, Homo Sapiens
cctgctataagataaagaaaaggctgtatccctaagatatatacctaatgaagattatctcaacagaagctccaacgttttccatttttcactgtctttcctgaagttcacctggatgttccacagcaattttctaaccctttcattgttgattagcctactaaaagtagaattctttagcaacacacaatacaaaagacacaggctaaaacaggcctcacaaatacactttgaaataggtatatttggatataaatataactttccagtccattattttttctaatgactaaactctaaatttttaaaaatggaagttttcaaaccaacgatgtgttaagcccattctcatgacacattcattttaacttaatcatctgcaaaacataacgcaataaattaccaaagaggaagaaaaaaacatgaagctcacctgccttataaaatgaaaaccaagcattacaagacatgtaatagcaaatactaagctacacattttttttctgagcaattttttaactcttcttgatcctaaaagtcacaaaagatcaatgtagaaaatttgaaaaatattctgagtttttaattaatattctgaggtttcaattaatatgaggttatttctagtagtatattttctattatacataagtaattgggtttaaaacaagcatgtgacagcatactttttcttgaataaaattaggatattatatttgcatttttatcttttgtttacttagcatacggcatgttaagcatctatgacattaaaaatccttctaaaacatggttttaacaacatatcacatggatgtgtcatgatatatttaaccattttccctactctaagacatttatgttgtttccaaacttttaacataatatgactatcataaagatattcaaaactcatacttctgattattttaagatgtatttgttaaaagtgaatttaatatgaccaaaaccacccccatctcaaaaaaacagactgttctaccagattttaacctagtcaaaagtcacaacaattacaatcacatggtatatatatttacaaataaatgtttaaaatcataaaaacttcaatgtctaaaaatattagaaataacaggaaacagaatcactattatgtttcagtacatacttttagaaaaagaaatgttaacttaatcccaa

SEQ ID NO: 242618 - DNA, 1449 bp, Homo Sapiens
  misc_feature (55)..(71): n is a, c, g, or t
  misc_feature (1177)..(1258): n is a, c, g, or t
  misc_feature (1286)..(1299): n is a, c, g, or t
ttccaccaaatgaacatctgctaagtattgagggacacaaaaaagagaaatcttnnnnnnnnnnnnnnnnnggttacagtcttcccaattttgacatgtcagattaactacatgaaaccctctattgcatagtgagagtaaaggtcacaaaagtcccatcactgtacacggaaaaggtccccccaactagtaagatgccaaatagggtagtgactccccagcctaagtgacaacaaaggtctaaagatttacaagtaacttttcctattaaaacatgacatttatgcgaccagcacattactgagattaaatccatctaatttaaattgccacagaggtcatttaaagcaatcacaatcatctgtgaaaatattcaagaagagttcttccttttctccaagaaaaggctaaaacattagtcatctctactttccaagctactggaaacagaatatcatacattaaaaaatacaaaggaacactccctccaataaagatctgctagaggtagaaatttaaagcagcatatactgtttaagctccatctatcagggaacaaaattggtattaatctgaaattacatgatggctgctgcttacaatattgaagacacagaccacgggcagtaatatatccctgaatttcataatcaaaattccccacattaatactattatgacagtttttcctagtatataatttttttaatgaaaaaagtgcttgctttcataatccagatattctaaagaaaagacattattgtaaacatcacactgtcaaactctgtattcatttagagtctgaaaatcacatatttcaaatgggtaaattttattcttattttctctgtttcctagcactacttttaataaaggctttttatttctcactttgaatgttgagatctcgtatatttcaaagtgatccatgatgagtatgctttcataaagtgttcagtttattgtggccaaaagactttgatatttctgttacttgaatatattttaccggcctgtgatgctattaaatttaacatttcataaaaaagaaatgtttgatgcttctttaagttcatctgagccagaaaatacaaaattaaattaatctgaatgataaaatagacacaggccaggcgcggtggtacatgcctacagtcctagctactcaggaggctannnnnnnnnnnnnnnnnnnnnnnnnnnnnnnnnnnnnnnnnnnnnnnnnnnnnnnnnnnnnnnnnnnnnnnnnnnnnnnnnnagacagagcgggatcctgtctttgaagnnnnnnnnnnnnnngacatattttacgcatagttttcttagattgaaagtgaacaaagtcccaactccagatgttgaatatgactgaggatccttagactcttctaaaagttacatgtgcaatgcatacaaaacaacaaaaaaaggaagattattatgtaccaa

SEQ ID NO: 242619 - DNA, 1018 bp, Homo Sapiens
ggcgcaattgccgttaaagacctgcagctccccctcccccagccggcccgcccgcctttctgtctcctctctccctccgtactggctcgacccggtccatttccgggctccggatatttggtatcgattggggccggggacgcggagcaggtggccgcggcggggcagctgggccgccagcttggtgcctcggggaccgtctcccgctgctttggtcaccagcccctgcccgcccgacccgctccgttctccggcctgcgagccctgccggccggactttgcgccgcgtccggcgctgctgctgcgctcggggccccgctcggcgccggcggtgaccgggaagcccgcgttaaaggggcaaccgggaccctggcccggtatggctgaagtcagcatcgaccagtccaagctgcctggagtcaaggaagtatgccgagattttgctgtcctggaggaccacaccctggctcacagcctgcaggaacaagagattgagcatcatttggcatcgaacgttcagcggaaccgtttggtccagcatgatctccaggtggctaagcagctccaagaggaagatctgaaagcgcaggcccagctccagaagcgctacaaagaccttgaacaacaagactgtgaaattgctcaggaaattcaggagaagctggctattgaggcagagagacgacgcattcaggagaagaaggatgaggacatagctcgccttttgcaagaaaaggagttacaggaagagaaaaagagaaagaaacactttccagagttccctgcaacccgtgcttatgcagatagttactattatgaagatggagaccaaccagggtcaaggagggccagggaattgggttctggattctcaagaccttgtagactccaaagagatggaaagactgtgaagcacaagaaagagaaaccagaacatccactggagaacttgggaagagccagaacaacattgttcatcggagagatccctggtcatcctctagctcgggcaagggga

SEQ ID NO: 242620 - DNA, 527 bp, Homo Sapiens
agaggccaagtgtcccatataagtgaaatatttacttaacccaaggctcaatgtgttcctaaatttgcaagcagtcctcttcctcatttgcaataaagcaaagttcatcctcccctgagccgaggcaaccgtgaaattgacaagccaggagctgggaaatgaccgatgcaaagaagagcaatgccctttaacgcttcaatagaaaaaaaacgtaattacatcctcctaggccatgaaggcattgaaaatctataaggacaatgagcttagacttgattgttcgagtcatcaaaaaaacccagaatatatatatatttttttccagaaaaatgtttctgggtagtataatttgaggtaaattatactaaaatataattccctagagaagaaggaaattggtttgaggtattggttatttccctcttgttgcagaaacaaaagtggtgatttagaattcagagaccaggagatacctaggaggtgagagccatctgttagatctgttaatgtttcttaataaactgggg

SEQ ID NO: 242621 - DNA, 930 bp, Homo Sapiens
cccacaaagtcagaaactttggaaaagccacggtcgcatgcacacctctcaaacaaggaaacaaactacaagaaagggctcagtcattgtacacagcaagtgtgcagtgggcaaagttctgttctttgacattggccaaatgcgtaagtccctggtttcttgggctcaatcacggtccaaggttagtaagaaggccaacaatgttgtgagcaggattcaatttctacagggtcatggggcatcatccaccatgtgaaggggctccagcaggttggacatgatcaatacccatccagattaggaccctgacgcccttgccagagctcgggctcgggcagctttggcctcgtcttctagctcatctaggaaacgctcctgggaaatcgagtagaaggtgtaaccatctggggaggtaggttcaggaaaccacacagaatatgcacattcccctttcctagatttgctctaccactcttgttactctcccaaatcagtgattccggcttcccgccgctgctgtttctaaaccctgaaccccaattccgttattattaataaatcaaattaaaagagtaccttaggaataacaaaggaaagtactacccattttaccccaaaattaaacgggtggttcagccctcttgcacactctgttcccctgcccctatatgcggtccccttgagtctacaacacggacggatacaaatagccaacaccagggccccgatgcctaggccggtcacgatgttccgggttcgccgccgtggtaggaccttctgccactgggcaagctccgcctgccgcatggaatgcagttgctcgggtgtcagcttctcccgagtcgggtcgatacgctgagcgaacggggcctctccacgcttagaatccagagggtcaccagctcccgaagacgccatgttgccacccaa

SEQ ID NO: 242622 - DNA, 899 bp, Homo Sapiens
ttggcgccatggcgcggaagaaggtgcgtccgcggctgatcgcggagctggcccgccgcgtgcgcgccctgcgggagcaactgaacaggccgcgcgactcccagctctacgcggtggactacgagaccttgacgcggccgttctctggacgccggctgccggtccgggcctgggccgacgtgcgccgcgagagccgcctcttgcagctgctcggccgcctcccgctcttcggcctgggccgcctggtcacgcgcaagtcctggctgtggcagcacgacgagccgtgctactggcgcctcacgcgggtgcggcccgactacacggcgcagaacttggaccacgggaaggcctggggcatcctgaccttcaaagggaagactgagagcgaggcgcgggagatcgaacacgtcatgtaccatgactggcggctggtgcccaagcacgaggaggaggccttcaccgcgttcacgccggcgccggaagacagcctggcctccgtgccgtacccgcctctcctccgggccatgattatcgcagaacgacagaaaaatggagacacaagcaccgaggagcccatgctgaatgtgcagaggatacgcatggaaccctgggattaccctgcaaaacaggaagacaaaggaagggccaagggcacccccgtctagaatgccagaaccagcgggtggccttaggggctgtgaggcagtggggaccttattgatgaaagaaaccgtctttgcgttacacccccagtctgcctctcggagcaaggagctcaccttccgcgacgtgttctgagggtctgcatcttagggggaaggctggggcaaatcgaccacctgtgcctttcttctggccctgctgcccccatacccaactctaagggcccacgctggggg

SEQ ID NO: 242623 - DNA, 717 bp, Homo Sapiens
acttcttttctctttattccctttcatagcttctgccgggatccaggcagagagagcactaatgggggaaagggagcgagcgcttcccgctttccccagcgtgggccctcggagttgggtgtgggggcagcagggccagaggaaaggcacaggtggcgatttgccccagccctcccccctaagatgcagaccctcagaacacgtcgcggaaggtgagctccctgctccgagaggcagactcgggtgtaacgcaaagacggtttctttcatcaataaggtccccactgcctcacagcccctaaggccacccgctggttctggcattctagacgggggtgcccttggcccttcctttgtcttcctgttttgcagggtaatcccagggttccatgcgtatcctctgcacattcagcatgggctcctcggtgcttgtgtctccatttttctgtcgttctgcgataatcatggcccggaggagaggcgggtacggcacggaggccaggctgtcttccggcgccggcgtgaacgcggtgaaggcctcctcctcgtgcttgggcaccagccgccagtcatggtacatgacgtgttcgatctcccgcgcctcgctctcagtcttccctgatgaagaaaaagaggcgtctgcacacacttgctgtgccgtcggcggtcggcatcgaactgccgggcacccgctctcccgagccttacctttgccaa

SEQ ID NO: 242624 - DNA, 1211 bp, Homo Sapiens
  misc_feature (1090)..(1099): n is a, c, g, or t
ttttaaacactgcaatagtctttcaaaaattcagttggttaaaaagtaaacaaaaatactatcctgcatttggatttccataagttaaatccatggtcttttaatataaaaagtaattgtttcatagttttagtgttcaatgaactctagtagtcctatttgaaccatatcttgatatagtaaatctaattagaatgctggttcctgttttgtgacattttaaaacaggatttaatcacaaagaataaaaaggcttgagtttatacgttacattactataacatataagagaatatcaaatgtgtgtttgtcaacaacttgaaaaggcaagtaacaactttttgggaagtaaattgtgcatttttttaaaacaagttgctgcatttatatccatctaagtgcttgacaaaagccacatttagatttactcctgaaactataaagattgtctttcactgactttgctttgctttctttcgtttctttctgtgagggaaagatgactttttacaagttagcaagttgctaggcaaccccaaactcctcactcactaaaaggcagcgtgcagagtatcataagcagaaccattccatgagctcagtgagaaataggcagcctaacctatttcgtatggaagaacagatgtccttaaaacttattttggacacagaaattaaaatttggtttaaaataagtgtttcaaaaatctgaaacagaggtagaaagtgttctttatttttcctgacatgttttctcgtgagaaaacactttcctttttatcccatggactgctcccagtccctaatgttaaaagcagttctctttatagaactactaatacaactacgttggttaaacaaaaaaacactgtgctagtgatggctgttgtattggaagttggagtcagccgtgacccgcgcccactgcaggagcccacactgattctgaatcagaaacgagtatgggtcaggtgaaataggtaggcaccctatgtttacacatttcagagcgcaagtataaactagagtgcaccatagctccctgttttaaatatcagataaaatcatcagaaagcgttacttctgaagnnnnnnnnnntgtaaacatttcccccatgatcactgctgactcccctcatttgaggtcttaactacgaaaactcagttcacttttctggcctcataaaggccacagttaagttttcagccaa

SEQ ID NO: 242625 - DNA, 959 bp, Homo Sapiens
ttttcctggacacctttatttttttggagggcaggtatggggaaccaaatttgtttcccttacccctagctctagccatttccaccaaaggcttttatagataatgttccatttgcttaatatttttagtttaaccaataccttaatatgtgcccacagctcactacctaggccctgatttaggcattaggaataaaaactatctcgacttagttaaaaccaccagatgcattgcttgaaaacctgttctgccacttaatagctgtgtgatttgagcaggttacttaacctctccatttgaaagcaaacatttattgggctcctgttacacattaggactggagatacagtattaaaacaagtacctgttcatgaaacttacattctaatgggaaaagatcattgattaatatacaacaggtagtgataagtgctatgaaaataatgcacttataaaaagaataaagaatgacagcagatggggtatgaatgtgggggcatatggcctattttagaaagcatagtcagggaatgtgtctctcatcagatgatatttgaggagagacctgcaggaagtgagccagccagccatgaggttgtgtatggacaagagttgcaggaagaggcagtggtgtgctggtgctggcttgcatttgttctgatggcatgcatctcttcccaaactctgtattcagtgaaggcaaattagtggctcaaaaatagccttgatgagagtatttacacatagatacctgcaaatgctacaaatgagggttttctcccccgtcccggagaactatttgttaaatattttaccagcacacccctgggaagaggaagaataaggacagaggccctgaggcaggagcaggcttgttctgttgaggaagtcaaggcagtcaggatggtggaacagaatgagagggaaattgacaggagatgagccaacttttttgtac

SEQ ID NO: 242626 - DNA, 881 bp, Homo Sapiens
ttgggtgcgtgttgcgtgtctgcgtgtgtgtgctgctgccaccgcagcatgtctgtaacgcgtgtgggcaccgttgctgctgttgtgtgccgtctgtgcaggaggctgcctttgtgttgagggtgtgcacggcctcacacctgccctgcatgtgctgctgctccatacgggtacgagccctgcctagtgtctgtctcctgtgtcacggacctgttcaacctcgtgctgctgccagcctttatcgcgactcagctgtccctggaacctgcccaggatcccctgggtcttctcatgagagcagagctgtgtggggggtgggcggtgaagggtactgcccaagtctcagcgtcccgggtatctgtggatcccgccatgcccagagccggtgtcggaggctggcaggagggagaagcccgccctttgccatgagaggctgtcttttctttggttgggctgcacttggagcctggatggagtggagggggccaccagtcattcctcatattccagccagtcgctggctctggtcccaggggccaaagaaaagggccagggtaaccgtaggatcccaccctttatttcttcctctggccgggctactcccgccagccgcagccccagcccgtttcctcctggaccctgcccgctcccctccgcccgtccccccttggctgtgcgcccctcacctggcgctgacccctctccctccgcaggctcttcagcagcctcggtgagctgagctccatttcagcgcagcgcagccccgggggcccgggcggcggggcctcgtactcggtgaggcccagtggccgctaccccgtggcgagacgcgccccgagcccggtgaagcccgcgtcgctggagcgggtggaggggctggg

SEQ ID NO: 242627 - DNA, 1062 bp, Homo Sapiens
  misc_feature (122)..(141): n is a, c, g, or t
  misc_feature (309)..(326): n is a, c, g, or t
  misc_feature (624)..(646): n is a, c, g, or t
acatctataacgttattattttcagtggtgtgcagcatttttgcttcatgagtatgacctaggtatagagatctgataacttgaattcagaatattaagaaaatgaagtaactgattttctnnnnnnnnnnnnnnnnnnnntttctacattataactcacagcattgttccattgcaggttttgcaatgtttgggggtaaagacagtagaaatattattcagtaaacaataatgtgtgaacttttaagatggataatagggcatggactgagtgctgctatcttgaaatgtgcacaggtacacttaccnnnnnnnnnnnnnnnnnnaagtttttcccattcaggaaaacaacattgtgatctgtactacaggaaccaaatgtcatgcgtcatacatgtgggtataaagtacataaaatatatctaactattcataatgtggggtgggtaatactgtctgtgaaataatgtaagaagcttttcacttaaaaaaaatgcattactttcacttaacactagacaccaggtcgaaaattttcaaggttatagtacttatttcaacaattcttagagatgctagctagtgttgaagctaaaaatagctttatttatgctgaattgtgannnnnnnnnnnnnnnnnnnnnnnagttctaatcattgatgatagcttggaaataaataattatgccatggcatttgacagttcattattcctataagaattaaattgagtttagagagaatggtggtgttgagctgattattaacagttactgaaatcaaatatttatttgttacattattccatttgtattttaggtttccttttacattctttttatatgcattctgacattacatattttttaagactatggaaataatttaaagatttaagctctggtggatgattatctgctaagtaagtctgaaaatgtaatattttgataatactgtaatatacctgtcacacaaatgcttttctaatgttttaaccttgagtattgcagttgctgctttgtacagaggttactgcaataaaggaagtggattcgaactaag

SEQ ID NO: 242628 - DNA, 1089 bp, Homo Sapiens
  misc_feature (59)..(78): n is a, c, g, or t
ttggattgagcaattatcattaactttgttgggtgtggtaacggtaatgtggttatggnnnnnnnnnnnnnnnnnnnnaagacctactgatgtgttgacagagtgatctggtgtcaggactgtaaaatacgcctatgaaaactgggggagaggaataaaacaagctggcagaacgtttttcatcgttgaagctgcgtgatgcgagcatatgtgctcatcatacagtctctttacttgtgtatctgaaattttccataataaaaagtttaaagaagtgaaccagcgattgcctctagggaggacagtgaggtggcggatgacgggaggaaggagtcttaatttttcgctgtacgcctttttgtgctatcttaggtttttcccattcaatgtgttacctaattcagaaaattggtaagttttttttaaggctaccatgggaaaacagcgttctaaagagtagcgcaaccagttccccctaagagaggtgcatgattcgtcggactccgacagccttggtgtttgttaggcggttaatggagacccacctgggaaattagaaaactactaattgctttcagtgagaagcccgcccttctcccacaaatggataatttgcttttaatgcacccagaagttatccagctccctccggtataatcggggaaactccaaataaaggaaaaatagttcagagaccctgcagctcttcccaagaggaatttaaggtggattttagtgtggttggattgttttgcctacctgactgcagaatttatattctgacatttacaatttcctaaatactgaatcagtactttttcttgtttcaaaataaatcaacttcttctgtagtttatatgaaaaacaagtccatgtcttccactgtgggtgggatgcacatgactgttttatttgggtcagttttgtctctttttttaattggcagtttaggaacttgtttttatcattttgtttaaagatcttctggcagaggtgcaggctgcacttactataattatttagatgacaaggtggtgggtggtaattaaagggtaattatcatcagaggcaaaaggtaagatcaaaaaa

SEQ ID NO: 242629 - DNA, 2499 bp, Homo Sapiens
  misc_feature (580)..(611): n is a, c, g, or t
atacttatgattagttttattataaaggatacaaatcagctccacaagccaaggaagacacagggaaaggtctggaagggtcttgagcacagtgctcccatgccccctcttcgtggaattagggcacactgccctgccggcatagccacagcttcaccacccaggaagctatgctgagctttagtgtccagagtttttattagggtttcatgatgtactgattaaagcactggccagatgattaaactcagcctccagtcccccgccccataggtcaggctgactcaaagcctcaaacctctaatcacatggtcagtctgtctggtgaccagccccagctctgagtcatcccaccttttagcataagctcaggtgtgatcccatggcctcacaaataacaaagacactcctattaccctggaaatgtcaaggactgaaagtctccctcccaggaagcagggacaaaggccagttcaattctttagacaacctccaatccacacctcctggaactcctaccccaattgaaacaaggataaaatccactgaacatggagggcccattgctggcctgaactannnnnnnnnnnnnnnnnnnnnnnnnnnnnnnnattatagacattttcaaacatatacaacagtaaaatgaataatataatgaaccctcacacctccatccctagtaactgattatccgtgtgtggcttactctttgatcgatactctcatgctttcccctagcccccacagttagactgtcccgcagcaaagcccagacagacatcctatcggtctgagaattccttatcaaaagcttcccgaagaggaactctatatagggcaggactaagtgtgctggctataggtctgcagaaatctcaacccttgggagcccttgggtggggcctgggcaggtccctgggcagtagccgtctgtagtgggcggctcatctgctgacaacagtatgacgaacaaatagcattttgtacccgcactacaatgcaggagaacgccaaacaccgctttattgcattcaaaccttctaaggcacgtcagccagccctggccttgtctacagccatgattatctccttaaagagttaactctaaaaaaatattaagctcaagaaataacagctcaaatactcctaactaattaaaatcaatagtgagaggcagaatacggtaaaagataacatattagtattattgatcacagatcaatttcagagtacttaaaacaggaataatcagctaccacatcttgaaaaatacaaagacttgatcctaaccttttatttatcatgccacacggactgagacagtccccagtacctgggtctaggagagttattttatgtttgtgtttctgggaatttccgatacttcccagtgtatcagagtgttcccctcacacatgctagcaggcatctccccactaatggaatagcaagagtggtgaacagagcgatcctctactttctcatcatattctgcaaaatgagaagtcagatggatacaaaggttcctccaactctaggactccagggttgtgtggcggccctgcaaggctaggttatgtaaggtctcaccattgcaaacagaatggttcaagacagcaaggatgcactcctcaatttacaactccaaagcaccttgcacagagcttggctttggttacctacttgactctcttttaaacagagggtcttatgcttccctatcctgagctgcacatttgccagggaagtggcctcactgttgccctcatttctgcagaagagagccagagcaggagccatggatttatctctggcattctactcctccaagcccagctgtttcccaagtattaattggtttcagacaaggctttcgtttcagaaaatcaatgaagatgcttttgatcatcttcaaaagcagagaagaatcaccaaagaacttttcttccaagtagtaaaggaataaaacttctaaggaccacatatcacctattgcagggatgtctttcctacaaagattattgctctcccgaggaactgaaaatccttgttaggagatgacaccgatcaggtatgtacctgcatgtcaggtgtgtagctgtcaggaatatcaagtgttctgagcctgcctagagtgccctagagttccagcacgaggcctgagatgcattacattctcaaatatccatatgaaaaggtctggggtctctagttccccaatggtgacttcttttcatattataggaagcctgacaggagctctcctctaagcaaagcccagagttggactcatttcactataagaggctaaattcctcatactcacatcctgacaacattaggctataaggagcttggggaaaatccagccatccattcactcccgccccttagtggactgggttattttcaccacacagaaacactgcagggaaaatagccacttgtgtgaccctctttagctctttccctccctccctgatcaatgtgagccaa

SEQ ID NO: 242630 - DNA, 1616 bp, Homo Sapiens
  misc_feature (715)..(727): n is a, c, g, or t
  misc_feature (949)..(1045): n is a, c, g, or t
  misc_feature (1137)..(1263): n is a, c, g, or t
aaagttcactccaatatttcttttcttaactacactctctttggccactccaggaggcatgttgagtggcacggtcattccagggacccagagcttttctcctcagatgcgtcttttgagtctctagaaaagtcaaggatcaaaatgactgtcttccaaacttttgtgtcttacagagatctttcttagcggcctgtgttcttatcctctctagaaaggaccagtcttgtaagaaccctctgggctggggttgaaccacactctatattccagcagtgccagaagctcagctaatctgcacctggatctttttcttcttccctcctaggttgtggatctggtcagaaagagtgggaattcagtgactttactagttctggatggggattcctgtgttcagttgaccgtggctctggggtattggttggaaccagaggagctgtgttagctggtcgattccttcttgaacactgcctctgcctatgttctttctggggctggagaagcactggtggtaggtcatgatttggcaagtgatacagcagcagaccagtggtaaatttaaaatagtttctaaggcttatttaacctgtaccaagagatgtaaactcacgataaggggtatttctcaggtctgtcagttattaaacacagtggtgtgtatagtcaaaggaagcttggcacgtcttagaagcctattatcagtaaagtggtnnnnnnnnnnnnntcataattcagattctactcatctggctcgtgtgctaatgcacatggtgaatggtttaggttagctttatgaggaaaatggtctcttcatgacaaatatataacaaggtagcaggagaaatgctgagtgtttaaggaagcagagtttaagttactgtcattccttacaagtgatttatgtagtcattagcaagcgatcccttgcctaggttgacatacaagnnnnnnnnnnnnnnnnnnnnnnnnnnnnnnnnnnnnnnnnnnnnnnnnnnnnnnnnnnnnnnnnnnnnnnnnnnnnnnnnnnnnnnnnnnnnnnnnntttttgcattgtgaaccattatgagtagtgtaatgaaatcttgtgctgtcctgccccgtcttggacatgaatcctctgtttgtctagcatcnnnnnnnnnnnnnnnnnnnnnnnnnnnnnnnnnnnnnnnnnnnnnnnnnnnnnnnnnnnnnnnnnnnnnnnnnnnnnnnnnnnnnnnnnnnnnnnnnnnnnnnnnnnnnnnnnnnnnnnnnnnnnnngaaagaaaaatatcacatattctcatatgtgggagctaaaaaaggtgaatctcatggaggtagagagtagaatgagagataccagcagctgggaagggtatgtgtgtggggtagggtggggatgaagagagctaggttaatgggtacaaacccacagagagaaggaataagttctaatgtttgatagcacagtggggtgactgtagttaacaacaatgtattgtacatttcaaaatagctgtaagaagatttgaaatattctcaacacaaagaaatgataaatgttcaaggatggatgtcctaaatattacaccctgatttgttcattatatgctcttggtatcaaaatccaa

SEQ ID NO: 242631 - DNA, 1356 bp, Homo Sapiens
  misc_feature (1246)..(1266): n is a, c, g, or t
gtaaaaagcaacatatctcttaagtagggtttgttatcagtaacactatcgaatgtaaattattttcacttcatcacttgaaacggtagaaataggtacctcctagaaactggagaattaccaagcatatatccaatttgtatagatttcttaaaatacattctataggaataattaaccgaagaaactgccaatcaaagtttttgggcatatttaacaaaacttgagtcatgggaagacataaagttaattaattgcattacaagagttttgttttgactttggttttaaatgcaaagaggggctttattttgtttagtacacagagcacttccaagtcatatttcctgtggagttatagtgataaatttctcaggggctacctatcgctattaaaatttgaactggtcactaaaggaggtatctgatttttaacactgtgtaggttatttcaaccaaaatgcaagaacacattctttaggagaaaggcagaaattttagacttctagatacagaatgtatgatgtcactgaacacacagatatcctgctgatcagggggattaagttaaaacagcttctttgttctaggatgtcatctatcttacatgcagaccacaggacactaagcctcaggtacctaaatatctccattccaggcacaggatttcattagtgcctgctcccacaactgggaacacatacatatagagatatgggtcattaccaaagatttatattaatggcttcacaatagcaacacaaaatgtactcaatgtcacatttccataggaaaggttatatatacactatacacttcagccttgaaatgtggacccaaaaaacattcaattttcagtaatcaatgaattcggtgagggtcccacaccctcaaatcctaatttagcacagcaaaagcccctccttggctgccaagcgctggcggtgaactttgtcttgctgcagctcttcatgatttggatgccagagtttcgtgatgatcctttcaatgttaagagcatagacagtatgtgtagggatgacttccctgtgcacctgggattaaaaaattaacgcatgtccaattatacttgagtagacttatttttctgacatataaaagggtttatatcaacaaaacatacacacaatctataaactttcagtcatacactaaaatgaatcaccaattggataataataaggaaataacaagcttctgaaacaggaatagcagaacaagggannnnnnnnnnnnnnnnnnnnnattggggagatagaagatgggctcaggatttgaaaaatgaggctagtattaataacggcttttccaacttttttgtacaaagttggcttt

SEQ ID NO: 242632 - DNA, 901 bp, Homo Sapiens
tgtacaaaaaagttggcgtgctgtggcctttaaaaaagaccgccgtgcctggcgcgcccgaggccctgcgggcgctgcgagcccgcggcaagcgcctgggcttcctcaccaacaacagcagcaagacccgcgctgcctacgccgagaagctgcggcgcctgggcttcggcggccccgcggggcccggcgccagcctggaggtcttcggcacggcctactgcaccgcgctctacctgcgccagcgcctggccggcgcccccgcgcccaaggcctacgtgctgggcagcccagccctggccgcggagctggaggccgtgggcgtcgccagcgtgggcgtggggcccgagccactgcagggcgagggtcccggcgactggctgcacgcgccgctggagcccgacgtgcgcgcggtggtggtgggctttgacccgcacttcagctacatgaagctcaccaaggccctgcgctacctgcagcagcccggctgcctgctcgtgggcaccaacatggacaaccggcttccgcttgagaacggccgcttcatcgcgggtaccgggtgtctggtccgagccgtggagatggccgcccagcgccaggccgacatcatcgggaagcccagccgcttcattttcgactgcgtgtcccaggaatacggcatcaaccccgagcgcaccgtcatggtgggagaccgcctggacacagacatcctcctaggcgccacctgtggcctgaagaccatcctgaccctcaccggagtctccactctaggggatgtgaagaataatcacgaaagtgactgcgtgtctaagaagaaaatggtccctgacttctatgttgacagcatagccgaccttttgcctgcccttcaagttaaagattgagtgtctttaatctgcagaat

SEQ ID NO: 242633 - DNA, 951 bp, Homo Sapiens
ctttgtacaaaaaagttggcttagaagcaccttttgaacggcccccgcatgcaggcctcagctcatgtgactcggccctctaagaggcccagcaagatagggtttgacgagggctttgtcatcagcctggctcgcaggcctgaccgtcgggaacgcatgctcgcctcgctctgggagatggagatctctgggagggtggtggacgctgtggatggctggatgctcaacagcagtgccatcaggaacctcggcgtagacctgctcccgggctaccaggacccttactcgggccgcactctgaccaagggcgaggtgggctgcttcctcagccattactccatctgggaagaggtggttgccaggggcctggcccgggtcctggtgtttgaggatgacgtgcgctttgagagcaacttcagggggcggctggagcggctgatggaggatgtggaggcagagaaactgtcttgggacctgatctacctcggacggaagcaggtgaaccctgagaaggagacggccgtggaggggctgccgggcctggtggtggctgggtactcctactggacgctggcctatgccctgcgtctggcgggtgcccgcaagctgctggcctcacagcctctgcgccgcatgctgcccgtggacgagttcctgcccatcatgttcgaccagcaccccaacgagcagtacaaggcacacttctggccacgggacctggtggccttctccgcccagcccctgctcgctgcccctacccactatgccggggacgccgagtggctcagtgacacggagacatcctctccatgggatgatgacagcggccgcctcatcagctggagcggctcccaaaagaccctgcgcagcccccgcctggacctgactggcagcagcgggcacagcctccaccccagccccgagatgagctctaggtccaggtgatgactg

SEQ ID NO: 242634 - DNA, 1702 bp, Homo Sapiens
  misc_feature (1442)..(1538): n is a, c, g, or t
  misc_feature (1542)..(1569): n is a, c, g, or t
aatctttttaacattctccctcttgatatccaacgtacttcagcatgaagcggtaaactcacatgctcagatcccatctcttcacacaaaattgttaacatacgtgaatttaatgcattgctcttttataaaacttaaaatttgtgctgactgcaaaagaattttatgtaaacatggagacaacttttctgccactaaacgttcacggtgaataaaacaatgtgtaaatgccgctgtattcatggcaacttcttgaatttttgcttttaaaccagaatacctgccagtcatgcttgcagccccatcggtacagagaccaacacaatgtttccaattcagagatttactatcaatatatttatttattagttcaaatatttcaaagccagttatttgagtaggcatttcaatgcaaaataataattcttcttttacatcacgacaatcataatcaatgaaacgaatatagcacaaaagaagtgtgatatttgagatttctgatgactcatctatctgaagggcaaaccactttgactctctgaccttttgaatcagctggtcttcaatgtctgcagatagttcatcaatcctgtgttgaattgtaacattagaaagtggaatagttttcattttgtctccagcacttgaacccaaaacttctgaacacatttctactaaatatggtttaattaattcttcagcaatggagaatggcttcttgcttgcagcagtttggaaagcaattaaataagaagctttcacaagtgacttttcaactagtaaacacttttttaaagaactattttgacattccatttctaaagatttttgttcaaaaaaatctactggtttgttttctaattctgaatgttttgtcttcaaatgatgagaaagatttgcggcttcatgttttcactggataagatctctccacaaatgacacactgtggccttggtgaactttcttttgatccaggacagataataaaaccaacttttaaatattctgtatcataagtctggaaaaaacctaatctttttttctttgaaggtggagaatcaagttctgcatcatttttttcattaggcataggtaaatctgaatgaaatatttgaatcactgttattttcaagaacaaataagcaatgttctttatgtatctccccacatatttaaaattcatattttgttactatttctatttatcaaaagaatgcactggtaaaagtttaagcacaagtcataatacttccaatgatgctactgaaaactgaatttttcctttgcccaaagcttgatcattaggtataataaaactgtaggatgtggtacatgtacaagtaatcccaagcacccaataggttattgaaattagggctgaagaccatgatacacatcaaattaacaataaactttttggctgagcagggtggctcacacnnnnnnnnnnnnnnnnnnnnnnnnnnnnnnnnnnnnnnnnnnnnnnnnnnnnnnnnnnnnnnnnnnnnnnnnnnnnnnnnnnnnnnnnnnnnnnnnnattnnnnnnnnnnnnnnnnnnnnnnnnnnnnttggctggatgcaatggcacacacctatagtcccagctacttgggtagctaaagcaagaggattgcctgagcccaggaggttgagcctgcagagagccatgatcacaccactgcactcttgagactacgtctc

SEQ ID NO: 242635 - DNA, 1130 bp, Homo Sapiens
ttggacctgatttgttgaagatttttcctcttgccttacacatggaggttccaggaaacctcttgcagaacttcacacgtgattcttcaagccacacccacctgaaatcaaaccaaaggagtgctgtggctccccttgccctgccaccctttccctagtcttttgtagattgcactaatttacatcctagcaagaatcaacactgtatcagtccacggacctgctgagctgcagccacttgctctaggagctaaggacttgcattttcagtttgttcctgttgcccagaggccctgttctcacctcatgctgctccccagagtagactaacaggctcagtcccctgttgtccttgtggagactaggccttggccctggccctgagactctgtgagggggctggagcagcctggttatttcctatctgtaccaaagaggagtatggtgggagagggagtggagtgcagtgtggcttgggcctggtgctgggaacctgctagctgagcacttccacaagggcatacccctgggggcaggggctggggctgagaactgcagccctgggtcttcccttagggaggaagggcagatgaacccagcaggcttaggaggtggcactgggtgaggacagctgggcaggggctgcagagggaggtggaaatgaaccctgagggctcccccaacttgccatgccctgtcccttagtagatgagttgctcctgattggtcattgggtttgggtgaggcctggaggcttcagaggtgaatttatgcttgggaagcctgatcccaaacctgaagggaagggacttggatctccttatattgaataagctgtttggaggaaggtgtctgtctgggaggatggggcagtaaatgaggttggcagagtggcagtgggggctctgcagagccagccttggagcctgctcattctgggcccttgctgccaaggagcccagcctcacctagcaggaaaggagatgaaggccctcctcccaagaggtagggtcttggctgccccgaacttaaatgctcttgaaatctcttagatgtggaaatattttttcgaacctgaaatgcagctgtgaaaatttcaatggaagcataatccatggaaaatatatttt

SEQ ID NO: 242636 - DNA, 1530 bp, Homo Sapiens
  misc_feature (296)..(309): n is a, c, g, or t
  misc_feature (321)..(443): n is a, c, g, or t
  misc_feature (1149)..(1177): n is a, c, g, or t
aaaagcggctgagcattaaaattatctgctgtaggaacaaattattacaaggagagtgtgaaagttgttctatttcccagtgcaatttttccatctttttcagacgacttcatcattgtcaacttgtagataaaccttatgttatctagttgtaagatactggttttttccaaacctttttgaaaaccaactcataattttaaaagcttaacgacctctgctagctaaaagttggttgtttataaagtaaaaaaataatagctaccacttattaaataactgccataagccagacnnnnnnnnnnnnnnctaatccttacnnnnnnnnnnnnnnnnnnnnnnnnnnnnnnnnnnnnnnnnnnnnnnnnnnnnnnnnnnnnnnnnnnnnnnnnnnnnnnnnnnnnnnnnnnnnnnnnnnnnnnnnnnnnnnnnnnnnnnnnnnnagaaccagatctggctggtttcacatcctatattatttcctgtgaaatgtagttttttcccccttttaatgtacggtaagctctttcactcaaatatatttacctcaaaatttaccaaaacacatggcataagataacatataagtaatgattctgattctagcagtaaggtaataactactttctcaccataaattctttattagtttagccctctgcatatcacacttaataaaccgacagatgccacatactaaatagtaccttgggtcctggaagaatgtcttttcaataagagagttggcaatttacttccaattagaatgatataatatctatttatatacttttaagaatacctgcacaaaaaggaaaattttaaaaacacaattctataggtaaaactaataaatctaaaggcctttcaaaagcttttcctaaatgaccgttacagtctgcagctttcacactctaatacatgatggattggcaatgttattactgggtagtaaggtctagctttcaccactgggaaatcagggatatgtttctcagattatcataatgtggtagaaacatccgcctacttgtcttaattgatccacgccttatggtctgagctttcagtttaatgagctctatccagctgctgcatctgtctgcaaaggaactgtaatcaactgacgttgctgaaaacacagacagnnnnnnnnnnnnnnnnnnnnnnnnnnnnntatggatgatgtctcttactcgtcttaacactcctttcgatgatgtaatttaactgtaactcagaaaaagaatggtccttttcaagtcagataagagagatagtaaagagtcaagctttagacactgatttgtccaaaaccaagttctcagttagcaggctgagcatctggtgatgtcatagttgtgtggtctcctagggagagcctgagtggggtctaacataaatatcaatgaaaggaccacatactgtgctttaactaactttatttcctattcttcttaatttacaatatttcagttgtttctattttattttataatcaaagctttgtgaataattcatttcccccaa

SEQ ID NO: 242637 - DNA, 844 bp, Homo Sapiens
tacaaaaaagttggtgctgttgggtgctggggagaaggcggcgcgggaggtgaagttgctgctgttgggtgctggggagtcagggaagagcaccatcgtcaagcagatgaagatcatccacgaggatggctactccgaggaggaatgccggcagtaccgggcggttgtctacagcaacaccatccagtccatcatggccattgtcaaagccatgggcaacctgcagatcgactttgccgacccctccagagcggacgacgccaggcagctatttgcactgtcctgcaccgccgaggagcaaggcgtgctccctgatgacctgtccggcgtcatccggaggctctgggctgaccatggtgtgcaggcctgctttggccgctcaagggaataccagctcaacgactcagctgcctactacctgaacgacctggagcgtattgcacagagtgactacatccccacacagcaagatgtgctacggacccgcgtaaagaccacggggatcgtggagacacacttcaccttcaaggacctacacttcaagatgtttgatgtgggtggtcagcggtctgagcggaagaagtggatccactgctttgagggcgtcacagccatcatcttctgcgtagccttgagcgcctatgacttggtgctagctgaggacgaggagatgaaccgcatgcatgagagcatgaagctattcgatagcatctgcaacaacaagtggttcacagacacgtccatcatcctcttcctcaacaagaaggacctgtttgaggagaagatcacacacagtcccctgaccatctgcttccctgagtacacagggggccaacaaatatga

SEQ ID NO: 242638 - DNA, 943 bp, Homo Sapiens
acggcgggatgggctgcaccgtgagcgccgaggacaaggcggcggccgagcgctctaagatgatcgacaagaacctgcgggaggacggagagaaggcggcgcgggaggtgaagttgctgctgttgggtgctggggagtcagggaagagcaccatcgtcaagcagatgaagatcatccacgaggatggctactccgaggaggaatgccggcagtaccgggcggttgtctacagcaacaccatccagtccatcatggccattgtcaaagccatgggcaacctgcagatcgactttgccgacccctccagagcggacgacgccaggcagctatttgcactgtcctgcaccgccgaggagcaaggcgtgctccctgatgacctgtccggcgtcatccggaggctctgggctgaccatggtgtgcaggcctgctttggccgctcaagggaataccagctcaacgactcagctgcctactacctgaacgacctggagcgtattgcacagagtgactacatccccacacagcaagatgtgctacggacccgcgtaaagaccacggggatcgtggagacacacttcaccttcaaggacctacacttcaagatgtttgatgtgggtggtcagcggtctgagcggaagaagtggatccactgctttgagggcgtcacagccatcatcttctgcgtagccttgagcgcctatgacttggtgctagctgaggacgaggagatgaaccgcatgcatgagagcatgaagctattcgatagcatctgcaacaacaagtggttcacagacacgtccatcatcctcttcctcacaagaaggacctgtttgaggagaagatcacacacagtcctctgaccatctgcttctctgagtacacaggggccaacaaatatgatgaggcagccagctacatccagagtaagtttgaggacctgaat

SEQ ID NO: 242639 - DNA, 904 bp, Homo Sapiens
  misc_feature (411)..(442): n is a, c, g, or t
attttttaagcttttccactccagaaaaatgactttttgttgcagatgctctctaattagaaagtcaaccagtacttgttttgatattattgcagttccctttctaggtgtctagctgtcagtggtaaaagaaacaggctagcagaatctgtaaatgatgtttcagcattaacactgcccaatgaccactggagaagaaaataaagaaataattgcacctggttttgatttagaaagtctcattttgcaaagctgccctcagtcaaaagtgaagccttttatgtgatgagacagcagacgcctctcttgtcagttatggtttgtcatctcttcttcttttccttcttagtctgtaggtcttttcaatctgttgccccaagccaacatcctgcaccactgagaacaagggannnnnnnnnnnnnnnnnnnnnnnnnnnnnnnngcagggggaagggcagggagtatatcgtctacacaattggacaaattcatcttttctgctcttcacttcatgtccacatcaaagtccagcaccagcagcttggtttcttcagtcccattccgactcccaactgcacacaccagctttgtgtttgaggctctgatccgccacacaactcccccactccccccactctccaatgtgactaggtttcgaataaattcacccgttttcaagtcccatagttttacagttccatcatctgagctggtaattacaaagttcttgttgaactgtaaacaggtcacagcactctgatgcttgttgggacctagacaaaaaccaaaagaatttaattactggttagaaataatggctatgagttagttacattataatttgtagacttctactttagaacatacaataaatgcaacatttgaaatgatacatatttaccaa

SEQ ID NO: 242640 - DNA, 1725 bp, Homo Sapiens
  misc_feature (129)..(147): n is a, c, g, or t
gagtaaggcaagagggtatggcaacgaaaatggcaaggctgtggccccagcccctgggccccacgggtggacggcagcccctggcagtttggtggctttggaatgagtggggtgcatgtggcactaagnnnnnnnnnnnnnnnnnnnggctttcctgcaggcttagcccgcgctttaggaccccatgagcaggcagatggcctggcacggcttgcttctggctctgcccttcctcagtctcccctcagaggcagggtttgtgggcaaggctgtgacaaaagtaaggctcctgccactgcccccagctggggccatcatgctggtgggggtgagctgtctgcctgctgcccatggggacaccaatgtggggggcacctcctaggcgaacctccctcccagaggactgagatcagaagtcctggggccagcagggtggagtgcaggaacaggctgctccgggcagtgtggcagcttggatgatggggtggcaccttatagatagggtctactccctccagtcaaaacacaaacatgaaaccagctaaaggccatttctttctctaagcagaagggatagccaccattttctcccctgactgctgcgtggtgggcacaggacaggcaggcggggtctgaggaggctgggtcatttctgcctaagcgccctggggctgggcttgctggtcgatgggaccagcttgcggggaggtggggaggtggctgtgactcagccagctccacagcttgtcccttcctgccaccaggcctgaatggggaggtggcaggcaaggtttgagggcaggtcacccacaccccagtcccacgacatatacctgtcaccatgtgcctcccaccccagcctaagcaaaggtagctgggggctgctgcatgctcagcctcagctggcaccgtccacctccctcactgcctctgccttccacaggaaggcctgctatagaggctgtgtgccctcggccacaccgggcatgtggtgccaggaccccccacgcccagtggtactccgggggcaagacatggccatgtgctctccacattcacccaacaactgccctggccgcctccacatttgctctaagaagacatggtctccatgacccccaggcagggacaggccaagatgtctctgtctgctcagagccaccagctcttgggttcggctgtccgggatcacaagtagacatgcctccggcaggagctacagcaaccagaggtgagctggttccccggctctgggacctgcccagtgcccggcataccccatgtgtcagccacctgagctagcaacaccatctctcagggctgtggggctgggggctttctgccagctccttaaagctgatttttaagaagtgccacccacatattgggaacttgaaccaccatccttttgatgtagtaaaaaaataagatttaaacaacgtttcccaaaaagcatctttcttgaggagaaagaaggtgagaagcatctggactcaacctgcagaagcgaggcgttcactcgtccatgaagacgagcaaaagcaaagtgactacaaaagtgctttgaacgcgcgtgtcagccaacacaagggagcgcaccagttatttttagccttatgggaaaatgagccacttgctcctaagccagcccaattgctattgtttgcagaagacgccacattcgctaaaagccagattcccatagagcagagcccatgtggccaa

SEQ ID NO: 242641 - DNA, 1054 bp, Homo Sapiens
ttggatgacatcgccgccgtctcctatgttcgggatgacgctgcacacctggtggtcctgaagacagcccagggcccagggatctcccccagccagagtctgtgtgcggaaagttccagaggcctcagtgcaggctccctgtcggagagtgcagttgggcccgtggaggcatgctgcctggtcatcctggctgcagagagcaaggtcgctgcggaggagctttgctgtctgctaggccaggtcttccaggttgtttacacggagtccaccatcgactttctggacagagcgatatttgatggggcctctaccccgacccaccacctgtccctgcacagcgatgactcttctacaaaagtggacattaaggagacctacgaggtggaagccagcactttctgcttccctgaatctgtggatgtgggtggtgcatcaccccacagcaagaccatcagtgagagcgagctgagcgccagcgccactgagctgctgcaggactacatgctgacgctgcgcaccaagctgtcatcacaggagatccagcagtttgcagcactgctgcacgagtaccgcaatggggcctctatccacgagttctgcatcaacctgcggcagctctacggggacagccgcaagttcctgctgcttggtctgaggcccttcatccctgagaaggacagccagcacttcgagaacttcctggagaccattggcgtgaaggatggccgcggcatcatcactgacagctttggcaggcaccggcgggccctgagcaccacatccagttccaccaccaatgggaacagggccacgggcagctctgatgaccggtcggcaccctcagagggggatgagtgggaccgcatgatctcggacatcagcagcgacattgaggcgctgggctgcagcatggaccaggactcagcatgatggacagtggatgggggggcacccacaccttccgcgcagtcgtcatagccttcccagaagagctgcccagacctgcgtgtcagccttggtgtggccagggagagcgcccggtgcagatggcccc

SEQ ID NO: 242642 - DNA, 692 bp, Homo Sapiens
ccaatattattaacttagaaataagtttctaataaattattccacccgaacttagggtaactgaattttaatgctgatgtattaagcaggttcttcctggggtcttttgattctcaagggatccttcactgagggtggacttcaaattaataggaagcaggaaggagccacttgcactgttttcttgactggggatgacacctaaacctttctgattgcattacttgccctatttatgactggtctccctcattgtaaaataaagactttggatcacaggagtggttcttgaccttaataagtccagagtgtttattacttttttccaccaatatttattggtaaaataaaccagaaggcatgtctattaagtaataaataatgctttcaaattttaagctaatcagtgaaacatatgttaaaacataatcatcctttgggctattgagatattaactataatgatgagcttccgttatcaccttgtggacctctggggatggagcatcttgaacggagaatcactggattaaataaagagataaaactcaagtattttttaactttaaactttgatgaaaactctccggtaaactggaatactttagacaatttccaaatgactagagacaaacattaactttttgcctcagaaactctgatattttaaatcagtttgttcttctggccca

SEQ ID NO: 242643 - DNA, 931 bp, Homo Sapiens
  misc_feature (193)..(235): n is a, c, g, or t
aaaagctggccaaaagcgagctgagggtagcatcctgcctcagacacgttattcagagggaaaattgcccctgggccctaactcacttgccccaaatgtcctgggatgagaggatgttggaaacacggcttcttgagtgccagaacagctttaactatatcaataccaaaaatctctgtgctaggatggcagnnnnnnnnnnnnnnnnnnnnnnnnnnnnnnnnnnnnnnnnnnnttgtccatgcaatctgttaacaatgggagaagtctcacacaattttagggtggtagaaaatgcaggtacaatactgtggatcaaggctatctctttccattcccatccctgttctttcttgtaaaaggttactatcagacttggaccctgtccaggtcaataatttgaaggtagctgatgatcttgatcaggtgggctctgtcttgaacccctccatacttctatcaatgctgcccaaacatctgtaaatgggagcagggacaaccaggacactgaactgattgctgtagagatcactgccctaaacctatctggtactagggggcaggtaaatccctctcctgggaggcagaatctcaacctctgcttccagttcagatcttttgggctaagggagagacaggcctagggggagacctataacaaaagtgacttgaaaaaagagaataactcgatcaaactaactcctagatgcaaaattgcaacgacccagaagtgctgcaacatgggaaaccccagtgatagaagaaacagcctgaatgcaaaatgttccctgaacagaagtccactccagcatcatcatagtctgatactcccttgcttctgtttggttttttgatcccttcacagtacctaaaacacagtaaaagcaataggaatactgagcagttttgtcacagggcacaacagagccaa

SEQ ID NO: 242644 - DNA, 767 bp, Homo Sapiens
aattcaaataaatatcctttattaaagaaaaagaggaatattgttaaaagcaccaaaactgtaggttgttacattgcatgtacaacaagagaaaggtgattgcaatacttggtgtacaagtacttaactctgaagtcatgagtgtaaaaaacatgaaatacaaagcaatacaattacaatgcagaaaagctgcactaaagagcaaaaggcaacagtcaaaacgattactggagatttcatggtattgctataaatgcttgcttagtttttcctctgtacttttaatactttaggatgttaattgaacatatttaagtattgtaaatttgcaagagttggcatttacaatacactgtgcacactgtccatttaatgtaatggtactaaagccatccttacaagccaagcaaagcacaatgtgctagtgttttgcttctaccttttataatattgcacaaagctagtaaatggtgaatgagttttccattaaaattttcatttacccagaaccgataaaaatcatgtcagtctccttagccctaatgggcaattaattattcatgcaaaataatctgcagccttccatttttcattaactacatattatagtttgcacacttggaaagacatataatacaatgagaaattcaatgaaacaatggagattctgtcaaagttaaagaactcagaagtcactgtatgggtagcatcatttacccctcttggttcacaaatgaagggaaaatgccacctagtgattatgcaga

SEQ ID NO: 242645 - DNA, 1453 bp, Homo Sapiens
ttggctgaaattgacttaattcctcgagataggccgtttgtatgtgcaccctcttcaaaaactgggtctgtgactacaacatattgctgcaatcaggaccattgcaataaaatagaacttccaactactggccctttttcagtaaagtcatcacctggccttggtcctgtggaactggcagctgtcattgctggaccagtgtgcttcgtctgcatctcactcatgttgatggtctatatctgccacaaccgcactgtcattcaccatcgagtgccaaatgaagaggacccttcattagatcgcccttttatttcagagggtactacgttgaaagacttaatttatgatatgacaacgtcaggttctggctcaggtttaccattgcttgttcagagaacaattgcgagaactattgtgttacaagaaagcattggcaaaggtcgatttggagaagtttggagaggaaagtggcggggagaagaagttgctgttaagatattctcctctagagaagaacgttcgtggttccgtgaggcagagatttatcaaactgtaatgttacgtcatgaaaacatcctgggatttatagcagcagacaataaagacaatggtacttggactcagctctggttggtgtcagattatcatgagcatggatccctttttgattacttaaacagatacacagttactgtggaaggaatgataaaacttgctctgtccacggcgagcggtcttgcccatcttcacatggagattgttggtacccaaggaaagccagccattgctcatagagatttgaaatcaaagaatatcttggtaaagaagaatggaacttgctgtattgcagacttaggactggcagtaagacatgattcagccacagataccattgatattgctccaaaccacagagtgggaacaaaaaggtacatggcccctgaagttctcgatgattccataaatatgaaacattttgaatccttcaaacgtgctgacatctatgcaatgggcttagtattctgggaaattgctcgacgatgttccattggtggaattcatgaagattaccaactgccttattatgatcttgtaccttctgacccatcagttgaagaaatgagaaaagttgtttgtgaacagaagttaaggccaaatatcccaaacagatggcagagctgtgaagccttgagagtaatggctaaaattatgagagaatgttggtatgccaatggagcagctaggcttacagcattgcggattaagaaaacattatcgcaactcagtcaacaggaaggcatcaaaatgtaattctacagctttgcctgaactctccttttttcttcagatctgctcctgggttttaatttgggaggtcaattgttctacctcactgagagggaacagaagatattgcttccttttgcagcagtgtaataaagtcaattaaaaa

SEQ ID NO: 242646 - DNA, 190 bp, Homo Sapiens
gcagcgtactcgtcggcagtgtgcctgcaagtgatcagccagatgttctggcagacgtatttttctggcatcttcaaaaggctgagcaccacaggacccaggtcagacacggacatgccatccatgggaacgtcacctgtgggcaagcctgtggggcagagacgtgaggtggtatatgtcccgagcctaa

SEQ ID NO: 242647 - DNA, 1187 bp, Homo Sapiens
gggggggggtgaaggggaggggagggaggaaggggaatatataatatctcaacattagttaccaaagtactgttttgatctcgagatttaagacagtaaacagaaattttatagcaaatgtaaaaattttagaaagcgactcaaatggtacatttctacttaacaaattgaatccaaaagctgaaattccagcccatagagtgttattcataggactattaagtcagatcaaaatacaatgatcacccaaactagcattcacttcctaaacataggaggagtagaacaactgggtttgcttaacagcatgaacatatatttctcaatgaaaggtctcttcctgcaaaaacaatagttctcccctctgttactatcagagaggcactaactgcaccaacaagagcagatatgttaagatttacactcatgggctttattagagccacaaaggcttagtttctgtagaaactcttctgaaaagacctcaaacaatttgattttgctgatgtaatcacaactataaatacaaaatggttatactgaaataaccactttaagcaataaaacaaacttaatcagtttatctgttatttaatttgggtgcacaaatcaaagatgctaagataacaaaaatttctctcaaattcacacataggcaagaaagagaaaatatgatagaaaagtgcctcttgtcaccctaattctacctaaatctcactgtaccagcctctatttcttccgctaaatgcatatctttggcacatggtacagtcagttggtttgccactaaggacctatttctctggttcctatcaaacagctcagctgagctgcagctacccaagcagaaaccatctggctctgtgctaaaccagcgtccccttgatcctactgtacaccactgtcgggctttactgatattaaaacccagccatgtaacaagaggcaatctcttctccgtttgctatgtttgcattataatttcctaattttggggcagttcatgctgcttttatgctatttagtattttattaataaaacaaagttctctactgaaattatatgagaaggcaaattaattttgaatcagcaagcttccttattgcagcaattcatgctgtgttatcatctgttctcaaaatggataccatgaaataacaaattctgtagaatataaaaatgccaa

SEQ ID NO: 242648 - DNA, 1135 bp, Homo Sapiens
ccagtttgggttttctctttttaattaagatacaattcgcactttaattcaaagtctcggcattaacatatattttgttgatctggttgatgattttaaaattatttttcctttgtattctttacctacggctaaatttctaatcttcaaaatgcctacattcatttcatttaccttacattttatcttactcatttttaaagccttcaacattttttgagtttgaaataattctcaatttcttagtctcttaattcttaaatttaaaaaggttgtttcttaccttttaaaatttttaaaaataattatgtcaagtaatttttgaatatagtaacctgattctacatttctcatgggataaattctaaggtaaaaaaaattgcaaataaatcttaaactttatttagtaggtttattattagcagcagatgtctagccagggtagattacttttatcagaccaacctctcaccaacaactactagaagagctagagagggagaaaagtctatttgaagacatcaaggatttgatgagctaagattgcagagagaagggaagtatggtgaaacagtaaaatcagaagacaataatttcttcaaagtgctgaaagaaaataattgccatccaaacttctatgcccagcaaaaatatccttcaaagaatgaaagagaaagagacgttttcagataaataaaaactgagagaattcatcactaccagatctgcattggaagaaatactaaatctagatgaaaaattatcccacatggaagcatggaaatataggaagaattgaaggacactggaaataaatggtaaatatgttggtacatataaataaatataaacaaattaaaaatgtttcatcgggtttcaaatataaatagaattaaaatgtgtgttaaaagcaacacaaaaagcagaagagagataaataaggcttaaagtattcaaaggtctttgcattgtctggggaatgatgaatatactaatttacattacagttcaataagtcaaggatgcatgttataatctctagggtaagcaatgaaagaattagaatgtataactaacaacataataggggtgaaaatgaaatagaaataatgcaaaagaaaccaggaaaagccaa

SEQ ID NO: 242649 - DNA, 1536 bp, Homo Sapiens
aaagtatatacaaactgatgaagtggaccttccagaagtctgtttacaagagggctgaggagactgtgagagaatttttaacaagatagtcctagatatgactagcttatggacttgatagagatatcctgagctgtcagaggagagatgtcactctgagtactacatggtgtctgtagcttggatttgcctcttggtccaagtccttcagacctcatatttaagttctttggaaagtagagtgttattgaatgaagctctgtaaaactctggagcctaagcatctttgttttagcatccctccaacccaacatctagaaaagggagacttcatttggatcgttttagttgcaataaacagagctgcactgatttagtcgggggtttactgaaatgatcagcacagtgacaaagaagaaagactatctaggaatccaagaacagaaaccaggcctagggtacactgttcattgtgggcaaaggcagttttaggagcttttggagtagaagttcatgtatcttccttttaatatgataccattattaacatgaaccagatactctctgaatgttggcttccttcttcatcctttaatcattttttgatggtaatggtccggttgcttcattcttggcttcctagttcaaattcttatgcttgaataaccaccagtcttgtttggacagtgttttactccaggctaagtcagaggccattagcaagacaataggctgcccatgactctggggcctgccccagttcagtcagctgggcccagagcatgaaggtcatgcggtgtataacatggcttgctttcaagatgcttgtttcagcaaaggctgtgaacaaggcttaaagggggctgttggcacagcaggcatcaaggagaaagatattctcttccgtatccccccagcctactccctggctttggcacagagcaggtgttgacagaccattgttgacagtgtccatggaggagacaaatggggaaatggcagaagtgttgaggcccagtgcacctgtgatggaagcagtgctcagcagggtaactacaggaagcagaaaacctggtatgagcattcaacactgagtgcctactggcttcactgtgtgctgggtcctatgcatggtgggaaatatataagatgtggctactgtccccgaggaagacatggcatgtataggtggaaaatttgtaagtgttctactttttaattactttaaaaataaatataggtactggtaactccccctgacacaggtattgactggtcagtggtcattttctcttgcccattgagcatgttccctagctgctcacttattttaaggctacctcttctagtccatcacactcaccctcaggagtcagaaaggaagagcaagagtttagattgtataagtttatataaaactctttttggctcatctatatcactactttcctcattgaatgttgatggaagtgtcatttcatgatgtttgcaaataatgttgaggaatgtggaaagagcatatgccttaaagtttgg

SEQ ID NO: 242650 - DNA, 931 bp, Homo Sapiens
ggttgctgctgagacttatgctggcagtggcatctgacttagagcgctggtgagtcattttggagggagacagccctgtgtcaggggccgggctcaaggagggcagctccctcttcctgtgagctggctttagctcatctgagaggatcagcttccgtagcttggtcccacgggagtgtcgttgagtggaaatgtgcatgtctgaagaataggccccaagcaacagggcacactggagggaagagttaatgttctggcggcaacggtggactatgtagggcttaatggcatcacccacgtcctcatccatgtggatgtacatgttaagcaactggggcagatagaagtccacgtcctcgttgcgaaagcagaagagccggttgccaatgtaggcttgtactccaggctccttggagttatacaggtatgaaatggccatggagatgtcaaacagttttgactcaaacagcctcagcagccaagactgtttagctgagttgttctgccgccgtcttcttgctcctttggctgtgcctgaggccacagcggcccccatctcatcttcctcctccctgatctgggcaggtggatcatctaggcaacggatctcactgtccacaccatccccattgaccaactccagtggggtgcctctgctagagactgccacgcctccatgcaaaagcttgactttctccaacacctcctggcaggccttctgggccacctcagggtcaatcactgatagttccccgaccccctccgtgatgacacttagcagggaccccccattattccctggtgggccagaagtgggctcagaagttggcttcaagggggcaggctccactactgtatctcccatggccacagccagacttcgagcttccaagctacaggaagagggagggagaaaagaacagaaagccaa

SEQ ID NO: 242651 - DNA, 1283 bp, Homo Sapiens
ttcataggtccttggtctagggaaaagtgtaacacaaagtaaatgatgaaactcagttctatcaaaaatgaaaatgttgttgcatttgagaaccattatggtgggcaatgtagtaaaaaggataagacattcatcctactttaatgtaaaacaaatttgaaaagaaaaaatgataagtaaagaatttcatgaaggtattatcgtcactgcatataatatgctttctactaaatttcaatggcagtttatgtttacctaccatattaaataattgctattacattggtatcataattcctcttatgagaggaactgttctttctgataaaagaaattaaaaatccacttagagtagagcagactcttggtcataaatgttatcaggtgctcaaatatcaggggaagaattctcctctctatgaatcaaattagaaaatgcattacttttactcatgcaacagaagctggaaaatgagtgacaaaaagaaagaatggggtaaagacacaatgaagtcaaaaagagagaggccaaaatagattattgggagaaataagtgacatctaaaaatggtcatttctactatttgatttgaagttgtttgcattggtagtatgtgaacctctcccatatctgctatcatgtaaatctttaatgaagtctactgtctgtgtgagtgaaattttttacagagatcaacaccagggctgtttcagggatcaatgcaaagcagaacaactatatacactaaagaagagtctgattaagggcaaattaacaaggacattgcagggaagcatattcatgagggattccaccattttacagaaataataataatatgaaaatcttttagtgatgaagaagtactggtagactttcatggcacttaagatgagaccctcaaggcacatgatcaaggatgattaccagtacttacttatttaagccagtgtcatatttaagtcccagctttattttgctgtggaacatgtaagttaacataaatgacaagtcacactgacctcatttggttgaattttaattactttaattggagacactgctcattatacagcaaaatgagaataagtatttgtaaacattctattaacaaaaatgaatcttttgaatctttaattatgacctacaagtcattaattgtgtctctcatacacatgggagtatacctaatttgaactctgagaaataggacagtgtgctataaaattttaaagagatgataagatgatcattcataaaattgattcattaagcaacactt

SEQ ID NO: 242652 - DNA, 823 bp, Homo Sapiens
  misc_feature (423)..(505): n is a, c, g, or t
ccagtctgttcaccgttcattgtattttataaaatatttgataacagtcacccactacagacatttttttcccctgtgggatgtcatactgcattaaaactctgtatttacataacaataatatgagtttggtccatttcacatggaagaattctggttaattttgaactaaatagggattatagcacaatccctagactttagaacacgtggttgtttcatctgcttttacactaatatgttaacatgttgtgcagcactcaaaagggaaatacaggcacatagataattatttaaaactcttttttaaattaaatggagtatcatttaggtctgagattagcaccattgtagaatgcacagtatttggcatagatgttgctcctcttctatctaaaagttagaaacctatgtctgataatnnnnnnnnnnnnnnnnnnnnnnnnnnnnnnnnnnnnnnnnnnnnnnnnnnnnnnnnnnnnnnnnnnnnnnnnnnnnnnnnnnnggcaattgagtgacaaccaataaataagttggaagatattttgaaaagtgaaatttggttttaactaaaaagataatttctctctttcttggtgggaattaaaagcccatacatgtacagataaatacaattttacaaatcacctgatctgacttgcttttaaaccatttcaatgtggctgtttagcagaaggagcccaatggatccatgctgcccaccatagtcatcagcccaaaaccagtatcctcaagaacaacccaaagtatatttggccacatagatgctgtctgctttgaaaacaaaggttgtggaggacat

SEQ ID NO: 242653 - DNA, 1014 bp, Homo Sapiens
  misc_feature (198)..(216): n is a, c, g, or t
aacttgaccacagtcttcccctgaagaagggcatgcatttcatgttacagaaatgcgatagagtaaactgtaataaattatttacaagcacttagtttgtttaatttatgtggaagccatcactgttggaaaacaatgagaatgtatcttttagcaaaacggtgctatctggaagcttcattgtgaagatgctttcgnnnnnnnnnnnnnnnnnnncagtcatgaggcactgaagaatgagttgtgctgaaattaactcaaaggtcagcttgtctggatgagcataactttggttgagatttttctcccttaaaaaagattttcaaagcaccagttaattacaaaaagcatgcatatttatcctcacagtgagttaagtggtgagagagctagcaaatcatacattgcattccccaaagcatctgaacgtacttctagaaaacaaaccaaccaaaagggaaaataatgcaagagaagccgtattttctttgcttaggttggcaaagcagcagctctttgcagcaatgacaggcagggcagagtgtcgactgggaagcgagtcccaatcttgaataatggtgagcttgagtaatccttaatttacaatttaaaggatgaaaaaaagagactagtgaaatgtttgcttccccagataaggaacacccaagactccctgggtatcctccaaatgtagccaagaaaagtgttcttctaccctagtcagtaaaatggaatgctaaaacatgatatctcattcaacatcagagctactacaactgacaatgacttcatggtatacatcaattcctataaagaaaaaatatattttaaatgcagaacttgagagggatcacaacagcatagcattattgctatgagtttcaaacatggtatttcatacaatgtgaaatatcaatcagcatccctccctctcccaaaacacacattactcatgagatactatcagtgtttaaaatccaagcttatggaagtacaaacttaattctcagccaa

SEQ ID NO: 242654 - DNA, 1493 bp, Homo Sapiens
tgatggttgatatttcgcagatggctttcgggctcccagaagtgtttcttgtttaaataacagagctggaaaggctggatgaatcatacgtttcctttacgtttggttcttgagcttgaacatctgaataatcttgataaagctgttttaaattagataagaaatatgctgcattcctaagggaagactttctctctttaagttcatcatattttgtttgtagttgtttcagctgtggctctaacctaaaacaaaaataagtgacaaataataaaatgtaccagcctatcgtggtgaaactgaggttgtaagtacgctgagcgagtgtgaagaaccggggctggccaactagatgacttgctttggctctgaaactacgaatgtgtaaaagattctgggtttcagtttaaaatgtaggaaaaaaaatctctgaaatacaatgcacaatgaataattagcagtgatatccacagaagaatattccttataaatgctgaaattcatcaagccgttcaagtcttgggaactactggatcaaatgtatgcctggttgacattcagaggctcgtgccagcggagccaggcactacagtctaacacagaaaccatggagaaaaagccttcccagtgctccttcctcttatcaaatcttgtccactttccaaagtctaataaaaccagtggaagactgtcagtgcctggatgaaaatgtgtgacttggggcaaactgtttcatctctcagtggctgagtttcttcatctataaaataaaaagggataacttgggttttatggaccaacaaaaaaatgaggggcaaaggcggcaaattttgtattttgccaaataaagatataaaacacacctcaaaaatctcaagaaattcattagatcagcattctcttaaaattgcaccgttttttaacatacacaatactgctaaatactggtttaacctgagacgaaacaagagttctgttatttacatggtttaaaccacagcttatttgtattcagaagtatcctattatacaacatatcatatagtaatcaagcaaagcctagaaacagttcctaacttagagcttcaataaacaaatgtctaatccttcaattcctatctcaacatgtctctggctacttgcatgcttgggattagtgtattagatgtcagtgacttggaaggcctgcttttcttcagtttttctagacagaactttccaagtttccagttaaagcccttatccctggagcctcattgtactgcaatgttaccaggacacaaaggtttcttttgtctcactgctgccctgttcattctttccttttaattgaaaaccaaagggcatctcacactcaacagcacttctccccagatgctactttgggggacactatatgtcttatttgctagtctaccaaaataaaacataatatcattcaagtgagaagtgtaatgaatgtatttccttagaggaaggaagcttggtgccaa

SEQ ID NO: 242655 - DNA, 937 bp, Homo Sapiens
ttgggtggtggtggggcggcctgagaagatattatggctgctgccacggagcataatcgcccgagcagcggtgacaggaacctggagcgaagatgcagccccaacctctcccgagaggtgctctacgaaatctttcgctccctacacaccctggttggacagcttgacctcagagatgatgtggtgaaaattacaatcgattggaacaagctccagagcctctcggcattccagcctgcattgctctttagtgcacttgaacaacacattttatatttacagccttttttagcaaaacttcagtctccgattaaagaggagaatacaactgctgttgaagagataggaagaacagaaatggggaacaaaaatgaagtaaatgacaaattttccattggcgacctacaagaggaagaaaagcacaaagaaagtgatttaagagatgtgaaaaagacacagatccattttgatccagaagtagttcagataaaggctggaaaagcagaaattgacagacgaatatctgcatttattgaaagaaagcaagctgaaatcaatgaaaacaacgtcagggaattttgcaatgttattgattgtaatcaagaaaatagttgtgcaagaactgatgcgatttttaccccttaccccggatttaaaagtcacgtaaaagtttctagagttgtgaatacatacggaccacagactagacctgaaggaattccagggtcaggtcataaacctaacagcatgcttcgagactgtggtaatcacgctgtagaagaacgactacaaaatattgaggcccacttgcggttacagacaggtggtccagtgccaagagacatttatcagagaattaaaaaacttgaggataaaatccttgaattggaaggcatctctcctgaatattttcagtctgtaagcttttctggaaaaa

SEQ ID NO: 242656 - DNA, 922 bp, Homo Sapiens
ttgggaggagccagcggaaggacggtgtgcgggccggccagccctggacgaaagaagagggcccctccaggccagtctgggcaccctgggatagcggctgcagccaggcatggccgactctgcacaggcccagaagctggtgtacctggtcacagggggctgtggcttcctgggagagcacgtggtgcgaatgctgctgcagcgggagccccggctcggggagctgcgggtctttgaccaacacctgggtccctggctggaggagctgaagacagggcctgtgagggtgactgccatccagggggacgtgacccaggcccatgaggtggcagcagctgtggccggagcccatgtggtcatccacacggctgggctggtagacgtgtttggcagggccagtcccaagaccatccatgaggtcaacgtgcagggtacccggaacgtgatcgaggcttgtgtgcagaccggaacacggttcctggtctacaccagcagcatggaagttgtggggcctaacaccaaaggtcaccccttctacaggggcaacgaagacaccccatacgaagcagtgcacaggcacccctatccttgcagcaaggccctggccgagtggctggtcctggaggccaacgggaggaaggtccgtggggggctgcccctggtgacgtgtgcccttcgtcccacgggcatctacggtgaaggccaccagatcatgagggacttctaccgccagggcctgcgcctgggaggttggctcttccgggccatcccggcctctgtggagcatggccgggtctatgtgggcaatgttgcctggatgcacgtgctggcagcccgggagctggagcagcgggcaaccctgatgggcggccaggtatacttctgctacgatggatcaccctacaggagctacgaggatttc

SEQ ID NO: 242657 - DNA, 2140 bp, Homo Sapiens
ctaggtgcaaactggagctacaaatgattgactcataaagtccacagccacatgaggcaattaaaactcaacgggacatgctggcaatgtgtagcctggccaactagggttattccaatccatttagccttgactagaagcagattggccaaagagggtctcacttacattgaacaggagacactagtcatagaatttgtcttttggaataccacagctcatctgtctcagtgggcaaattaaggatttaactctgtattgcctctttttctcccaggaggcagttaacaggacaaagaatttctgcctagtaaatatcaaacatggggcaaaaaccagactttctgggaggtgccacagtaccaggtaaatcaccagtatattgtaacacgcctgcaataatcaaaacgcaaactccaaaagactattcagtctccagcttgttcaccctgctccatcttgcaatgctggttagtggctgaaggatgcatccaggaagcagaacacagacagggcaaagttgctgtactgctctggtcagccagaagtttcagcataagccagggctcccaaggcacagaagcctgtcacgtgcatttagtgaagctgtaactacacaatgttctcaaatactcctgaagaggtgacagatctcctagggaacctgacccccaagaggcagttcaactcctggtggggctctagcccaacacctgttaaagacacccaaaagcctttcatgaagaaatattctacaacaaaaattattcaaacgtccctccttcatgttgctgacagaaagaacagaatcactaaaaatagctctcactatgccctttcactgtacctaagcaaaaccaggaagtgttggcaacatttacccagaagtgcattatcaactaaagtcagcctggaagtgggataagggttccaggacagggtaagctgtcactcttcctgatttgcaaagtatgctcctctctgacaccaaattcaatcaactgcttgcttttttgaaagtgctcaagtgaactcaggatctgtttccttactccctcagaggggaagggcggttaattaaatggcagcatagttcaataaaaaggacatcggtttgatgtattagcaagtcatctttctctgagttttgttttctcattggtaaaatagggagagtaagacccatatgacacaagatactatcctttactcccagtggaattttctcaggtcagaagatgctagaaaaaagtgagtctaaggctcttaatgaagcttgtaacttgggagttggttgcagggataattctagggacacagcaccaccagccaagctttagtaaagccaaaccaaaagacaggaatatgaaaatgatctcaatataaatttgcatatcaaaaaaaatcaaaaccctaactgtttaggtcaacagagtccagtggattccaaacccaatgaaatagacactggtgtgtgcattagtgcaaaggtaccaaatctcttgcacactggctgtacaactggcctgagcaaacacactaatcctcaaagtcaatggatatctctgagtcaagtcatagggttatgtttgagttaacacctccaccctccagattaccccaagaggcaatttaggcagtgcccattcacagctgctctcccaaaatgcagcattggttttgagagaagttggcaagctcagtaggtgagccaaggggcacatgatgtaggtgagaatgttgaaaggagggaagtttgctcattgctcatgccatttaagaaggaagatgatagctctaacactgacactgccagagaaaaaccaaccattgacaatacaaagacgtctaaccagcctttcccctcaaaccaataaattcagaaatgtgggacctcatcatattcatccaaagagcaaccaaacccaaaggaaggtggcaagggaaaacagacttgcctgtctgcaattttcacttagagagggagtcaatgctgagctgcactggtttacaaaacacagctctttacttgtacctcatctcacattgcagcatttggattcacactattgccgggtaggtagggcaggtgttcttaatccaatttacagatttgcggcttttgagtgctgaaacccaa

SEQ ID NO: 242658 - DNA, 1193 bp, Homo Sapiens
aaaacaaaagatgtttcaaatgattcgtctagagcacttccatggtaagcagtcttttgaaagcaaggtagaggtgaatgaacaagttcactttcagttggcccagattaaggatacacttctttttaattgagaatttagaaacataaaagcaacaaataatccgtgtcaaagtagaagagtagttaacccatagccatccacagcatcaactgtaatttgaatctatgttttgccagaatcttcttgggtatattcacagaagttggtaaatgtggctccctaaactttgtccacctactgttattcacctcttgacagaaaggaagtaacaacggcagtgatgaaaacatgtatctatcaaaacaagaagagtgcatgaactcttaaatactgtgcaggcaggtatctatcacatgagccctggcagattgtgtaatttccagatatgactgagatttttttctattaatgagtaatctgagataacatatgctccaactggatcttaacaaacatctccatttctgtttcaaagaaaaatgtaatctgagaaaacttcaactgggagctggttatattattaatttccaccatattaaaaacatattcccataaaatatccatttagtccatactgatataagcaaataactgaataaataagtggagaagagtgaagtctcccatgcctaagaattccacataatttacacagttactccacctgaaaagaggtgaggtgtaatgctccactccttaagtgtgggctatatattaatattatgacttcattccaaagagtacagtatgaaaagtgggaaataagagtagctgttgttgaagaaacttgacaaactctacctcaagcagatgatcaagatcaacatcaagtcatactgatagtatacatccatgacatggtatgatgaaaatggcactttacctgtgtgatcttcctctcaaaaaccgacaattccctgtctaatcatgagagaaatagtagataaatcccaactgagggacattctgcaatatactatacaacttctcatcaacacactagctgcaagaagagagtggggctactcagggcacactgcctatgggttagtcctgccccgcaagcagtcactctgtaaataattttcttgattaaaatgaagaggaggaggagaatggaacaaaaccaa

SEQ ID NO: 242659 - DNA, 1028 bp, Homo Sapiens
  misc_feature (661)..(710): n is a, c, g, or t
  misc_feature (861)..(874): n is a, c, g, or t
ataattacaatttacattactccaacagaggagcccccttgctatgttctaattcttagccattaagtcctacaaaaataaacccaagcttttacagtaacttaatcaatacagaactaaagcctttatagctattagaggggtttagttaccaaggtgcttattttcgacaaaatgccctgtcactcagaggacgcatgcgtatactaaagttctgacccatcgactcatgcaacaaatgtagaccccaccctccctccacccactgttacaacacaaacacaaaacaacgatgtacaacagaggggaaatatgctcttggtcaactgaccttgcagaaaagactggcttgtttccaagtggatgagaacgccagtgtgtggccagagtccagcaatgactgaccggcccaggtcagaggctggcagggaccacagaagggccaaggcgctgccggggctcatcccaggctccaaccccaacctggaagcttgtggacaccaggctctgtgcagcagctccgtggctagcgtccagggcccctggccactactcccaaatgcttctagtccacccacccctggccagccccaaccttgacatcactgtggatgccatcagggtggtctggttcacttatacaacatgatccatgggaaannnnnnnnnnnnnnnnnnnnnnnnnnnnnnnnnnnnnnnnnnnnnnnnnntgctggccctgcctgactcctgagaccccacccttggcagtggggtgccaggccaacagcaccaggggccagctgggttacagagatgtacttggctgccacctctgccaacagatttggttccacttttaaaagtcaaagcttgtcattnnnnnnnnnnnnnngtcacaaagtaaggattcagctttcactatagaaacctttttgcaaaataccaaaaccttagaattaggctatgcgcaactaaaaaggaaacacagataaagagacctcaaagaggttacccatgaatacttccccaaaacaagtggttcccaa

SEQ ID NO: 242660 - DNA, 552 bp, Homo Sapiens
ttggcgcaagaagggccctacggccgcccaggccaaatccaagcaggctatcttagcggcacagagacgaggagaagatgtggagacttccaagaaatgggctgctggccagaacaaacaacattctattaccaagaacacggccaagctggaccgggagacagaggagctgcaccatgacagggtgaccctggaggtgggcaaggtgatccagcaaggtcggcagagcaaggggcttacgcagaaggacctggccacgaaaatcaatgagaagccacaggtgatcgcggactatgagagcggacgggccatacccaataaccaggtgcttggcaaaatcgagcgggccattggcctcaagctccggggaaaggacattggaaagcccatcgagaaggggcctagggcgaaatgaacacaaagcctcgaaatcagtgcgctccagctgatctcgttccgccggttccccttggccgccagttccgttctcctcacgggccgaacggaacaaggggtccagcttgcgggggaccctccccagcccattcctgc

SEQ ID NO: 242661 - DNA, 1233 bp, Homo Sapiens
  misc_feature (233)..(242): n is a, c, g, or t
  misc_feature (930)..(938): n is a, c, g, or t
ttggctctaaattatactcaatttcatggtaattacatgaagaagttacctgcaattattcttaacactacatggaattcactgggtaattgtgggtcatttatttcctgaaagtcacgtgaaatccttagctggttgaatgttgcacagtatttgagaattacggtttgaagtgatttctgtgggagggaatcattgcaatgtatattctaaataaagtcatctaactattnnnnnnnnnncacccttcctaacccttcttttcttaaaattccacattcatccacaatctcatccctttgtagaaattcttgcctgaattctcaccaagttttgaattcctaaggtagccccgatctaggatgtgaaggctgcccagaaaaagtttatggctggaggagtatcatacagtgtctacatatgatagtacttacagattaggtctttggatgctttaacacaaaagatttttgttatccttattagtcaaataacgctattcttttgtggttctagaccctggcttctatctccctgtgatttgttttaatgctgaaatgacttggctatccaaagcttctagtctagaggtctgttggttgaaggcagacatttccaagtttgttgaaataatacgaagctgactagcttacgtgaatgatgttgccctcatttgttttgggtgaggactcattactgcagtatattgatctcttcaccaaatgctttttctttttctgaataaatgctgtattagaggttctatttatatatgatttttaaaactttggtttccttctatccaccaaatactgtgaattgtttttccatttatttttcttagctaatgtaactttattcttcacttttttttagccctagacttcctagattttctgtggcattctgtaggacattgtattgcttggnnnnnnnnngatcaaaatcattctggggcaaatgctctattatccttatttatgacaagagaataatgaaattcataagaaattaataacattcagatattgctataaatgtacttgagtcattttcatttggggatagtaataatggctgtggcagctttaatggagaaacctgtgttggcctctttttctggcattaagatctcttgtcatagaactattggtaaagtacaaggtttgatagcagagttcctgaattcagcatatcatcagaaatttccatttaacgtttgtcttttctttt

SEQ ID NO: 242662 - DNA, 2045 bp, Homo Sapiens
  misc_feature (154)..(209): n is a, c, g, or t
  misc_feature (270)..(319): n is a, c, g, or t
ttggcgatgtgaccttcagggccgccaggacgggatgaccggagcctccgccccgcggcgcccgcggctcgcctcggcctcccgggcgctctgaccgcgcgtccccggcccgccatggccccttcgctctcgcccgggcccgccgccctgcgcnnnnnnnnnnnnnnnnnnnnnnnnnnnnnnnnnnnnnnnnnnnnnnnnnnnnnnnngttgccggcgcgcgaggccacgcatttcctgcggcccaggcagcgccgcgcctttcaggtnnnnnnnnnnnnnnnnnnnnnnnnnnnnnnnnnnnnnnnnnnnnnnnnnntgtgcagccgcgaggaggcgcgggaggtgttcgagaacgaccccgagacggattatttttacccaagatacttagactgcatcaacaagtatgggtctccgtacaccaaaaactcaggcttcgccacctgcgtgcaaaacctgcctgaccagtgcacgcccaacccctgcgataggaaggggacccaagcctgccaggacctcatgggcaacttcttctgcctgtgtaaagctggctgggggggccggctctgcgacaaagatgtcaacgaatgcagccaggagaacgggggctgcctccagatctgccacaacaagccgggtagcttccactgttcctgccacagcggcttcgagctctcctctgatggcaggacctgccaagacatatacgagtgcgcagactcggaggcctgcggggaggcgcgctgcaagaacctgcccggctcctactcctgcctctgtgacgagggctttgcgtacagctcccaggagaaggcttgccgaaatgtggacgagtgtctgcagggccgctgtgagcaggtctgcgtgaactccccagggagctacacctgccactgtgacgggcgtgggggcctcaagctgtcccaaggacatggacacctgtgaggacatcttgccgtgcgtgcccttcagcgtggccaagagtgtgaagtccttgtacctgggccggatgttcagtgggacccccgtgatccgactgcgcttcaagaggctgcagcccaccaggctggtagctgagtttgacttccggacctttgaccccgagggcatcctcctctttgccggaggccaccaggacagcacctggatcgtgctggccctgagagccggccggctggagctgcagctgcgctacaacggtgtcggccgtgtcaccagcagcggcccggtcatcaaccatggcatgtggcagacaatctctgttgaggagctggcgcggaatctggtcatcaaggtcaacagggatgctgtcatgaaaatcgcggtggccggggacttgttccaaccggagcgaggactgtatcatctgaacctgaccgtgggaggtattcccttccatgagaaggacctcgtgcagcctataaaccctcgtctggatggctgtatgaggagctggaactggctgaacggagaagacaccaccatccaggaaacggtgaaagtgaacacgaggatgcagtgcttctcggtgacggagagaggctctttctaccccgggagcggcttcgccttctacagcctggactacatgcggacccctctggacgtcgggactgaatcaacctgggaagtagaagtcgtggctcacatccgcccagccgcagacacaggcgtgctgtttgcgctctgggcccccgacctccgtgccgtgcctctctctgtggcactggtagactatcactccacgaagaaactcaagaagcagctggtggtcctggccgtggagcatacggccttggccctaatggagatcaaggtctgcgacggccaagagcacgtggtcaccgtctcgctgagggacggtgaggccaccctggaggtggacggcaccaggggccagagcgaggtgagcgccgcgcagctgcaggagaggctggccgtgctcgagaggcacctgcggagccccgtgctcacctttgctggcggcctgccagatgtgccgggtgacttcagcgccagtcaccgcgttctaccgcggctgc

SEQ ID NO: 242663 - DNA, 909 bp, Homo Sapiens
ttggggcagaaagaaggccgaggacacagtgtcgcctgcccttgacggaggcagcacatgaggatgagaagctgattggagaagaggatgactgcagtgctaagagcagcgtggtcaggttgccaaggatggagcagtgggcacagcagggggacttagggtcagcggaggagtcggtgaggaaagggaggtttggcaggaagtgatcaaaggggtcatgtttttgtcaggatgtgggacttggatgtgttctgtgtgaaggagccagggcacggggctgtggtgatgagggcggccaggctttgactcatttgcaggcggctctgtgggggctcagtgagacaacgaggggcgtgtgccctgcacccacagggatgtagagggtcctgctcctccctactgaggtgggtcagggtgggcagcaggcaccccacctggtgagctggaagcagcgtgggaatcacagaatggacgggaacttaaaggctttgcttggcctggattttatcttgaaatacttttgacagctggctggttgagggtatctgctcacaggaacgccgcatttgctggctttgtccactagtgctcgcccctggctgctgatgcggagcctcacgtggccgcagcccaagagtagggactggcttggccacctacaggctaagcttcgggctcccaggtggctgggagggccaggggtgcacaggtgcatcagagcaggtgctgccttgctggagggccagggctcttctggccagggtccaggtcatcattgtccccagccaggaatccaaggggcctttccaaacctgcagggcagagggaattcgggtatctgtgcttgagtgagcccctgggcccaggagccttcgcttgctgtctctgtttctcaaggggcctggcctg

SEQ ID NO: 242664 - DNA, 1212 bp, Homo Sapiens
ttgggtcgctggcgcggtccgggcgggaggctcggcggcgggcggcagcatgtcggtggcggggctgaagaagcagttctacaaggcgagccagctggtcagtgagaaggtcggaggggccgaggggaccaagctggatgatgacttcaaagagatggagaagaaggtggatgtcaccagcaaggcggtgacagaagtgctggccaggaccatcgagtacctgcagcccaacccagcctcgcgggctaagctgaccatgctcaacacggtgtccaagatccggggccaggtgaagaaccccggctacccgcagtcggaggggcttctgggcgagtgcatgatccgccacgggaaggagctgggcggcgagtccaactttggtgacgcattgctggatgccggcgagtccatgaagcgcctggcagaggtgaaggactccctggacatcgaggtcaagcagaacttcattgaccccctccagaacctgtgcgagaaagacctgaaggagatccagcaccacctgaagaaactggagggccgccgcctggactttgactacaagaagaagcggcagggcaagatccccgatgaggagctacgccaggcgctggagaagttcgaggagtccaaggaggtggcagaaaccagcatgcacaacctcctggagactgacatcgagcaggtgagtcagctctcggccctggtggatgcacagctggactaccaccggcaggccgtgcagatcctggacgagctggcggagaagctcaagcgcaggatgcgggaagcttcctcacgccctaagcgggagtataagcccaagccccgggagccctttgaccttggagagcctgagcagtccaacgggggcttcccctgcaccacagcccccaagatcgcagcttcatcgtctttccgatcttccgacaagcccatccggacccctagccggagcatgccgcccctggaccagccgagctgcaaggcgctgtacgacttcgagcccgagaacgacggggagctgggcttccatgagggcgacgtcatcacgctgaccaaccagatcgatgagaactggtacgagggcatgctggacggccagtcgggcttcttcccgctcagctacgtggaggtgcttgtgcccctgccgcagtgactcacccgtgtccccgccccgccctccgtccacactggccggcaccccctgctggg

SEQ ID NO: 242665 - DNA, 322 bp, Homo Sapiens
acaaaatacactaaaataaaattgcttaaaactagtgataaagaaaaattctcaaagtggccaatgacaaaaacacagtttgcacagaggaacaaaaaatgccagcaaacattttattggaaacaaagaaaattagaagataatgaagcaacatctttaaagtactggaagataaacattgtcagctgggaattgtagactcagagaaactatctttcaagatgtaggtgaaataaagattttgttcaggcacttagaacctgaaagaaatcatcaccagtaaaacaacactataaaaaatgttaaagaaaatgtttcccaa

SEQ ID NO: 242666 - DNA, 1130 bp, Homo Sapiens
  misc_feature (58)..(66): n is a, c, g, or t
  misc_feature (549)..(557): n is a, c, g, or t
gcttttttttaatggccaactttgtacaaaaaagttggtgaatataattacttgaaannnnnnnnncttaatggaattagtttattataaaatgtctgcgttaaatccgtaaaaaaggaagaaaagtgtagcaacaaaaatgtagctattatctaacttgccataaatatttgcagttatgataccttggaatgttgccacgatatggattgctttgattaaaagatgtcagttgaataaaacagtactgtgggagaatcgctttctgctgctagataaatgctgatgtttatttttaaaccaggaaacattgatcctgtaacaatgcccgattacaattgctttattacaccccagggctgatggagatgtaatcacttggctaatggatgtgggtgcaggacagatgctcgcttgctggcctgctttcctgcttgcattctgatgagctgcaggagtgcgcctggccttctgcaggtggagctgctgtcagagcttcgtttcactgatacccaaagccatgtctgactgaaataaaacaggttcccnnnnnnnnnccctttggaaaatgccaactaagggagactaatcagatatcttaacacaatttcatccaggcttagtgctaacaagattgcggggctttttagggtttaagaagatgagaaatgagtgtgcacgtttcacacgttgacttgccggtttttccatgtcatacaaaaaagtcctggctgtttctccgaactggctgcctgcattcccgtctttcttttgtttttaagaaatagactgaattcagctgttaatcctctagtacagtatccatgttaaaatgtttttccattgcatcttttatgtgaattcaaaggtcagaatttattgtctgtgatattgagaccatgtgtacaagaactactttttgcttttcatcattcactccttagcaaacgttttcgtaagtaccctctgttttgctactatatgaggtgctgcgaaatttagtggggcgtggctttttatatttttcattccgtgtgtagcctaagtaaggtgactcaagatgatacccccgagagaaaaatgcaaaatatatttggttctcattccggttgctgtcgtttctcttttaa

SEQ ID NO: 242667 - DNA, 938 bp, Homo Sapiens
ttgggaccgactttgccatccagttcaaccgcaacagctttggcctggcccccgccgcccccctccaggtccacgcgccactcagccccaaccagacagtggagatctccctgcctctcagcacggtgggctcggtcatgaagatggagcctctgaacaacctccaggtggccgtgaagaacaacatcgatgtcttctacttcagcaccttgtacccactgcacatcctctttgtggaggacgggaagatggaccggcagatgttcctggccacatggaaggatattcccaatgagaatgaggcccagttccagatcagagactgccccctcaatgcagaggctgcgagcagcaagctgcagagcagcaacatcttcactgtcgccaagaggaacgtggagggccaggacatgctctaccagtccctgaagctgaccaacggcatctgggtgctggcggagctgcggatccagccgggcaaccccagctgcacgctgtccctgaagtgtcgagcaccagaggtgtcccagcacgtgtaccaggcctacgagaccatcctcaagaactgagaccccggccagcgcccaccccagccttctgcccgccccatcgaggaggcccctcgggggcagcacatcttcctcctcgcaggagggaccaggcggggctccaggccactcagtgggctccctggtcctgatggcagaacccacccgatccctggggtagggcaccaccccctcctggggtgagagcgcagtgcactcccgtgctctgggacacccctgctcctgtggctgtgatgtggggttaagtgaggtggggaccaaaggaaacagagccagagcagccacagaagctgtgcctgaagggtgagtgtggagcttgcccctccggctcacagcccccggcagcccctggctccttggtctctccgg

SEQ ID NO: 242668 - DNA, 1252 bp, Homo Sapiens
  misc_feature (522)..(543): n is a, c, g, or t
atctataaaataatggttaacatctactccttaattcacaaatagatcacaaaaccaagatccttcccaagaaaaccttactgtaaaccaagacattcccactatttagactaggttttaactcaaagcttaagaactcaaaggttgagaaagacaaactggagcatttgtcttttatttaccagatgcataccttaattctgcagaaagataatctggttgagataagcattgccatctctcaatttttacaaaacaaaaagctaccaacaagaagttaatggtgaagaaaaatttgtctcaaaaataacacaattgagaaatagctttgtattaagtgcagtacttataacatccctgatgtcaaatgtacaaaatttagctttaggtcactaaagcatgtttacccttttgaagaaacatgtattgctaggtcagccatcctacttcactggaaataacgttaaacttgtagactgttcaaatggccaatcaaaatgactaagaaacattatcgtgtgnnnnnnnnnnnnnnnnnnnnnncatcctttctctttccttttcgttcaaaaattcagttccccatcctagaccagactcctctgtcctctgccagggtataagaaaagttagcattctgtcactatagaacatagaagaggaattagcatgttattgaataaagaatcaggaagataattctaattgggtatagaaaaatttatacaccataaacatctgtatatgtacaccatttatcatatatacgtattgtgacaaccatatgtattaataaaccttcaaaaggtaagcacctatattttcttgtaattaacaattttagttttgtgcaatgtagtctatatttgtggacttccccttacatatggtgacagagagactgaaacattgttcacagagaaacacagaacatatacaaatctcataataaaataaccatgtataccactgtttagggaaatattttagaggaaacatactttcactactggccccaaatcccatcatccacttaggttcttcaatgtcaacttttaatacaaaaataccttcaagctgataattaagaacattcacaatgacttacaaaatggacaatattccaatgctacacaaaacggttctataatacacagcttaaagttttaaagttcttggctggcagttgattttttttatagctgatagacacgataactactgatctgagtaaaatactgtttttagccaa

SEQ ID NO: 242669 - DNA, 1231 bp, Homo Sapiens
ccgctccagctccccagtgagggcggccaccttccttcggctacccacagcattgggcttggtgagacctggcgcagtctagaagccaggggtgtgagggccgcctcattttcgttggtacagaccaggaggaactggcactttttccgggcccggtaaaagatgatctcgctcttctctagccacggcctgtttccgggcacggcccagggtctgtgccaggtcccccagtgctgccagcgtgtagcctttctggttggtcgagccctcgcccagcaggatgcgggcgacctcgtgcatagcccctcgtgtgcccaggggccccggcgggtgctcgcctgcttccagcacgtgggctgccgcctgcagagcttcttccgcagaggcgaagacttgctgggcacccagggctccggaaacgccgagcagtgtggcacagaagtcagagagcagcgcgtcgtcaccgccgtgatacagggcgagagtatgcgcgtaggcgaacagcacattgggcagctggaagcgcacgagcggcgagactgggccgcggctcaggctgactatcgcggggatgcgggtgggtacgacgggcgtgcaggcccccgggacatctccaagaacccgctcggcggccgcgggctccgcggcggaggcatctttcacagaatccggcggggtcctcgcaggggcgagctccagctccgcggcgtcactacccggggcattatccagctcctccagaagctgcggtccggctccgcggttccaccaccacggccgccatggaggcagcagccgcccggcctcaccgcggctcagcagccgctcgaaggcagctttttcgcccggcgccagccgctcccagagtcccgataggccgccgggcgccgggccggagctgaggcctgcttccccaggctcgtcctcggtctcgcgttgctgacgcagccggcgtagggcgcttgctaggcggctgggaggagcgctgcaaccgcggagctctcccagcacctggtcacggtagaagttttctgcgcaggtgccatgcgtccggtagcagcgcagcgagcagtagggcgcattacagcgagggcaggtgtaacgcgctggctggacctcccccgccgggcagaagccacagggcccggccggctccatggcaactggcaccgcgatctacctgcgaacgcacgccggtggtagttcgaaacttccggggcttcttcgccaa

SEQ ID NO: 242670 - DNA, 1058 bp, Homo Sapiens
ttggatcgtatatactggttgtgcaaaatgtggattggaactagaaacagatgagaacaggatctacaaacaatgttttagctgcttgccatttactatgaagaaaatatattataggccagcgttaatgactgccattgatggaagacatgatgtttgtatccgtgtagaatcaaagctgatagagaagattcttctcaacatttctgcagactgcctcaacagagtgatagttccttcctcagagatcacctatgggatggtcgtggcagacctgttccactccttgttggcagtcagcgcagaaccttgtgtattaaagattcagagcctttttgtgttagatgaaaacagctatccattacaacaagatttctccctcctggatttttatcctgacattgtaaagcatggagccaatgcccgtctctgaggccagaggaagaaattgcaggcatttcaaggaagaagtactgaaatgatttgtcttttgaaataaatgaatgacagggcttttgctttggattttttatgaaatatattttacaaagagaattgcactagatatataaattaaaacttttttctaagaaaatcctgtgaggtttaaaaagattgtttttgtcttttggtttcttactttctcctggagaaatgatctaccagtcaaggcaatatgtagcagatccctgggaattaaaggtttgcccatttgttcactgtatttagtccctgctacattccaggcattgtactaagtatggggaaccacagagaagacattccctcagaaactgctgcagtgctttcgcttatccctacctaaaaaaccgtcaatgtgaaatcatttccttgattataactataatgataatggattagtttatataaacctatgtttagacaagttcaagacaagcgtgtctttctataaaaagtattgaaaatgaaggaaatgagatcatgtttcaatttattaaagcagggaagagcgttctgtgcttagttcgtgtctaggatttgagtgccttactgaatgcatttaccagcaacatgta

SEQ ID NO: 242671 - DNA, 960 bp, Homo Sapiens
gtacaaaaaagttggggtgccatgactttcaaggaaactgcggatgtcattgccaaggtggcgttcaagatgtacttgggcatcactccaagcattactaattggagcccagctggtgatgaattctccctcattttggaaaataaccccttggtggactttgtggaacttcctgataaccactcatcccttatttattccaatctcttgtgtggggtgttgcggggagctttggagatggtccagatggctgtggaggccaagtttgtccaggacaccctgaaaggagacggtgtgacagaaatccggatgagattcatcatacggattgaggacaatcttccagctggagaggaataaccatccctacaactcgaggatagccatcaggagcactgttggaatcagcaggcctctgtgctccctctgccctccagaactcagtgactcttgaacatggatgttatatattcttataacctgtttccattctccattcaaataaagagcagactgcgatatagtccatttaccccatgtgtgcacattcaggagcgacagtctctgcccccattcccttgagaggggctggatgtaatcacctttggttggactagaaagagctcaaaccattttacattcctgtttgaatttttccaaagcaaaactcactttgaccccattaagaggcaagcctggcacatctatccctgggcctttagaaagccatttgcctcaaatggctatagggttgtggggtggagggaggaagggctgggagggagtggggaggaattgctagctgtagtgtgacacattgtagtgtttgccaggaaaggagccagtcatgccggaaacactgacttctgggaagccacccaggtctcattcctccctgctgttggaggcaacatctcctctttttacagagggtacatccttttttcttacaaattcttc

SEQ ID NO: 242672 - DNA, 932 bp, Homo Sapiens
ccagtcttgttctcccttgtcctggccctgggcctctagtcacttcctgcttcccaccaacagtttctccttacccccacccaggtcctggatggtcgccggcccacaggggggcgactggaggtaatggtccggattcgggagccactgacagcccagcagttggagatgacgacagagaggtggctggtcattgaccctgtgccggcagctgtgcccacacaggttgctgggcccaaagggaaggcccctcctgtgcctgcccctgcaagggagtcagggaacagatcagcccggcccctgcatagcctcagtgtgctggcgtttgaccaagagcgtctggagcggaagatcctggccctcaggcaggcgcggcggccggtgcccccagaagtggcccagcagtaccaggacatcatgcaacgcagccagtggcagagggcacagctggagcaggggggtgtgggcatccgacgggaatacacagcccagctggagcggcagctgcagttctacacggaggctgcccggcgcctgggcaacgatggcagcagggatgctgcaaaggaggcgctctataggcggaatctggtagagagtgagctgcagcggctccgcaggtgaggagcccatggggcgggcagcccccagaaagcgggcagcaggccccgataccgggaagagccgacacagccacgaaccagacaagcagacaatcagcggacaatcggttctggactcacccctcatccgggcccccagccccgccagagcctccgtggctgcgggtgttgggaaccatgcctgccagccagtatgtgcccctcacccaggcctggctgggccctggagagtcctgtttgcacagcccaggggtgtccggcctctggcccgccccggagcaaggaagggtggctgggggccaagccccc

SEQ ID NO: 242673 - DNA, 954 bp, Homo Sapiens
ttggcgcaatgggctgcctgtggacatcaccaaggtgccgcctgcccctgtcaacaaggacgactttgccctggtccagcggcctggcccgggtctgtctcaggaggccgcccggcgctatggtgaactcaccaagctcatacggcagcagcacgagatgtgcctgaaccactcaaaccaattcacccagctgggcaacatcactgaaaccaccaagtttgaaaagttggcggaggactgtaagcggagcatggacattctgaagcaagccttcgtccggggtctccccacgcccaccgcccgctttgagcaaaggaccttcagcgtcatcaagatcttccctgacctcagcagcaacgacatgctcctcttcatcgtgaagggcatcaacttgcccacacccccaggactgtcccctggcgatctggatgtctttgttcggtttgacttcccctatcccaacgtggaagaagctcagaaagacaagaccagtgtgatcaagaacacagactcccctgagttcaaggagcagttcaaactctgcatcaaccgcagccaccgtggcttccgaagggccatccagaccaagggcatcaagttcgaagtggttcacaagggggggctgttcaagactgaccgggtgctggggacagcccagctgaagctggatgcactggagatagcatgtgaggtccgggagatccttgaggtcctggatggtcgccggcccacaggggggcgactggaggtaatggtccggattcgggagccactgacagcccagcagttggagacgacgacagagaggtggctggtcattgaccctgtgccggcagctgtgcccacacaggttgctgggcccaaagggaaggcccctcctgtgcctgctcctgcaagggagtcagggaacagatcagcccggcccctgcatagcctcagtgtgctggcgtttga

SEQ ID NO: 242674 - DNA, 959 bp, Homo Sapiens
ttggatcgcttgccccagcacagctgtcattcttctctacagaagagcttctcctcatcaactggggatgattacagttcttcctaaaaaaggatggctgctctttttctaaagaggttaacactacaaactgtaaagtctgaaaatagttgcattagatgttttggtaaacacatcctgcaaaagacagcaccagcacagttgtcccctattgcttctgccccaagactctccttcctaattcatgcaaaagcctttagtaccgctgaagacacccagaatgaaggaaaaaagacaaaaaagaataaaacagcttttagtaacgttggaagaaaaattagtcagcgagttattcacttatttgatgagaagggcaatgatttgggaaacatgcaccgagcaaatgtgattagacttatggatgagcgagacctgcgactggttcaaaggaacaccagcacagaacctgcagagtatcagctcatgacaggattgcagatcctccaggagcggcagaggctgagggagatggagaaggcgaaccccaaaactggaccaaccctgagaaaggaactgattttgtcttcaaatattggacaacatgatttggacacaaagactaaacagattcagcagtggattaagaaaaaacacctagtccagattaccataaagaaaggaaaaaatgtagacgtgtcagaaaatgaaatggaggagatatttcatcaaatactccagactatgcctggaatagctacattctcatctaggccacaagctgttcaaggaggaaaagctttaatgtgtgttcttcgtgctttgagcaaaaatgaggagaaggcatataaagaaactcaagagactcaggaaagagacactttgaacaaagaccatggaaatgataacgaatcaaatgttctgcatcagtaattttaataaagaaaagcatgctctgagag

SEQ ID NO: 242675 - DNA, 1677 bp, Homo Sapiens
  misc_feature (1167)..(1193): n is a, c, g, or t
tccccaccctataaaatatagcaaagaatgtggctgaacatccatctgaatattcagggagagccttcttactcacgtaagaagttggaaggcagatgtcattccacagcactgcctcactactgtgcagaccttcaatgtggcatgatccttggttgggcttgtatgggggactttggctggctacccctaagcaggatgtccccaaccccccacccagcgtgctgttcccgtaggctaatcttacagcctaatccaattctcatccccattagggaacaaggtttatcacgtaggccttaagaaaaaattttttgagagtagtctcaaaaatacctacctccagtggatgtgctgaaggttgaaaggtggcctcataacctgctgcaagtgtatttgtttacagccattagctcacagccttcatttttgtatgaccgccttcctggaagcagaggttcagagagcccaaagaatgctcttgggctgtatggatctatgattgttttggaagagtctcttggtggcaaggataagataagagaccacatggcatccagcttattagttttggtccctatgtagcttgaggtaacttctctaaaagctggctttgttttttcgagttgataaagccacatctttccctccaaaccacaagctcagctaacaatttactgagactagtaaaaactatttaacctatcctgcaataatacaagggtttttagcacccctaccaccacaaacatataaccttcacacccctcaatgctgaggtgagcgagcatgaacctatctagccccccacacacatattcatatcagtgctttggagagaataagaatcctacccccagccccgaatgtttggtctagttttttcagacaacagtaaagagccaaccagaatctctatggaaattacccagaagcctccctaatggtcaaggcaacatacattgttccataatccaaagcaaaccctaaaaatctactattctagcaagatctggaaaaacaagtaaggctacctcttacctacctcaggtgtttcagaaagaacccacatcattgacacagacatatgtatacacatacaggttctacataccaccactttatcagacacccaatatggatcggatcaggctttgaaataattcnnnnnnnnnnnnnnnnnnnnnnnnnnnaatgagcaagcacgtgagggcatttttttgtcagatggaggaaatatgcagataaatggatgagaaattaccattctatacagcaagggcagagatagaggtaattaaagtggactgtggaaacacaagcaagaggcatccaggccataatggggaaggtgaggagacaaggggaggtgagaaggcagaaggttgcttgagatagagctgacctctcctgaaggacaaaggagactgtcacaagaaaaagattaaagggaaaaggaacctcatggtattctgggtagagagacagcatgtacagggatacagaggtaagaaacacaaagtatgcctttctctcaaaggcatgaagttaaatatcagtgtctcctttcccagcttcctgaccctcttcccagaatttatcagaagaaaatgaattaaagatcttcccaccactttggcattaggtgccagctcatagatttgggggagatgccaa

SEQ ID NO: 242676 - DNA, 758 bp, Homo Sapiens
ttggcgaaaacagatttcttgatggaaattagtgagacagacatccccttaggattgaaagagagctctgggctgctccagggaaagccacttggcagaaatagcctctgtaagtgaattctggattcccctgaagacattacagcaaatctctgggtatgtctctggtaaagaccctcacttgagcttctagaagggagcgaaaattcaggaatttgcttgctgcaaaagagaacatgattaacaggtaaaagagaaaagacaatataggccacagaggaatagtgttaggatcaaccctgctcagcaggggcctctggagccctccctgctgtacccaagccagagctgagacatggctccccagatggactggctgtggtcaggaaaggcctgtagagggagctgagggctcagaaaatacctgctccgggtgcctgggctcaagttctcattccatttctttgatgccactggccactgtatctgcttttgtaaaaacctccaaaaagttatacatcgggtatctctagtcagcttcctccgctgcccacctcttgccacagatgaatgatcactgtgaatggtggtgaccaggtgggcagggcaggggcttgtctaagtgccttagcccaggcctctggcccatcgacctcgaaaacagcaatatcgcctccttcttagatccagttaccaagtcagtctagctgggtgggtagtgctcagacagaaaggctggatgggaaggaagtcacatc

SEQ ID NO: 242677 - DNA, 756 bp, Homo Sapiens
tcccccgcatcccccttccaaacaacaatccccctctacctaaaactcacagccctcgctgtcactttcctaggacttctaacagccctagacctcaactacctaaccaacaaacttaaaataaaacccccaatatacacattttatttctccaacatactcggattctaccctagcatcacacaccgcacaatcccctatctaggccttcttacgagccaaaacctgcccctactcctcctagacctaacctgactagaaaagctattacctaaaacaatttcacagcaccaaatctccacctccatcatcacctcaacccaaaaaggcataattaaactttacttcctctctttcttcttcccactcatcctaaccctactcctaatcacataacctattcccccgagcaatctcaattacaatatatacaccaacaaacaatgttcaaccagtaactactactaatcaacgcccataatcatacaaagcccccgcaccaataggatcctcccgaatcaaccctgacccctctccttcataaattattcagcttcctacactattaaagtttaccacaaccaccaccccatcatactctttcacccacagcaccaatcctacctccatcgctaaccccactaaaacactcaccaagacctcaacccctgacccccatgcctcaggatactcctcaatagccatcgctgtagtatatccaaagacaaccatcatccaactttttggtacaaagtg

SEQ ID NO: 242678 - DNA, 1076 bp, Homo Sapiens
ttaatagttggggccagggtgacaggaccaagatggggctagcctgtgtcagtcaggaagcctccctctcctgctgggatagggccttgcggcagctcctcctccccgctgaggtcctaggcctgccacaggctagcatgccagtgaggtcggtggcaggagccacccagaagccccgcagatgacagagctgagaacagggacttcacttccacgtgttgccatttcctcactggaaagtccttgggaggtggctgggctcagcctgagctcagggttcttcggtgggtgttgggacggggcagggcgggcacttgcaggtggcacaggcttcatcaaggcaggacatgggcttcatcaaggcaggagccagagcacccgagccctggcaggggaggtatggcccaggatggggcagggccgtgtgctcctggaacggacatccttctctgccagagacctgctccccaagccctgtccctcccaatccccaggcagcccactctgccctccatagatgaatctaatcccatatattacaataaactgcatttgcctctccccattcccccaccctcccctaccctgggccagcggcccccacttccttgtcctctggcggtggcaggtgcccctcctcaagcagtgccacatcctgtcagcagccagctgtcctggcactggcctgagggctgggggacgcagagggcggggctgcacagctactccaggtagatatcttctgtggggcaggtgtactccacaaactgcttgtagaactgctggaatgctctccccacggactctgccagggctttggtggagtcttcagacacaaagacgtggcaggcaaaccggtggtcggcggggtgcttggtgatgaacccaaagtacttgttgttctttggatgatatccgcagaaagagatgttttttaactggaaaaagtggctacatttattccccttggcctcctgggagtcatcggccttgacgcctatcttcacaccccgcacgctgatctccaggacacagctggagggcgggttaaagtgcacggggagccggcgggccaa

SEQ ID NO: 242679 - DNA, 2432 bp, Homo Sapiens
  misc_feature (1859)..(2233): n is a, c, g, or t
tggggattcaggctccggaatcatggagggaggcgaggagttctccaagcaaaggaggaggcttggtgactcagaccctgcatcaattcattcattccacaaacattacccaggtgcattgtgtgcccggcactggagatgcagccgtgagtgaaagaaacaaattatctgggccacaacagagtcagagctgagcagaaatacacaaaacccacaaaagccatgaaaagaccagcacactacgcaaccggtcagaaggataaaggactctggacagaagcagcagtgcgagaactgagagcgggagggtgtgcgtgtgcggacggcgccgtggtggcagcagggtggtcagtgtgcacctcggggtggggggaagataggggagaaggtgacgtttcaacacagacctgagggagggagagagcccccaagaggaacacagcacaggctctggagtggcggcaggaaccagaccccagggggtacatggtctcactcaggatcacacggacaggcttggaacccacatctgccacccacccctgaggggcccaggccctggggactcacaggacagagggctccggcagcttcggggagggggtcggggtaattctggcaagacggagctccttggcctgtgtggagaggagaaggggaggaaggggcagttccctcgactgggcaggggcctgggcctggacccggcccaaccctcactcacctgagtggaggtcccttccagccaggaggaggaagccgagcgctgcagcccagccccaggggctccctccgctgtccgcctttcagggggacccagggcaccagaactccctgtcttcaggaggccaaagcgcctggagaagggggcctcttcaagctgcacgggactcttagggctggggtgcggcggggaggagacgccattgagggttctgggttctgcagggggtggttcggtgggaccttcttccccctcatcctcgtcctggatggggggccccccagccccaccaggccggcgctccttggacaagtcctggagggaaatcttctcgcgactgctcagacgacacacagagctccttctgtgtttgctgctagagggcgcttggggctcctggccccggctctgggaagcttctttttggttccgaaggtcctcctgtttccgggccagtcctccaacaggctcagtacttcctcatcggccaggtcacagggacgctgccccgcatgggtcagtgagtccatgcccccgccatgctcggccagcaggcggcaggcatcctccacgccccagtgtgccgctgcgtgcaggggagtccagccgtccccgtcccggagctctgggtcgtagccagcctgaaggagcaacctcatcacctcaatgtagcccttggcagcagccacgtgcagggcagaggcgcctgtgcgggggtgccgggcctctggcatggcgcccccattcagccagcacctcgtgtcatgaaggagcaattcctcttctgcccgcttggctgcttccacatccacacctaggaggataagaggcacgaggtaggactcacaccccatgacctgaaatacccagggtcatacactgggctggccagggttcagcccagtgacttgcccagagctcttccccctgctcccctctgagactcaggaggcccagactagcccagttgtttcccaactgtactccatgcagtcgtgtgtcccactcagggtctctgagtcagcgctaagcactgggaaaacggagatcacaggcctttccccatttcaaccagaaattcaccgtatttttattatttttaatataaaaccatggccgggtgcagtggctcatnnnnnnnnnnnnnnnnnnnnnnnnnnnnnnnnnnnnnnnnnnnnnnnnnnnnnnnnnnnnnnnnnnnnnnnnnnnnnnnnnnnnnnnnnnnnnnnnnnnnnnnnnnnnnnnnnnnnnnnnnnnnnnnnnnnnnnnnnnnnnnnnnnnnnnnnnnnnnnnnnnnnnnnnnnnnnnnnnnnnnnnnnnnnnnnnnnnnnnnnnnnnnnnnnnnnnnnnnnnnnnnnnnnnnnnnnnnnnnnnnnnnnnnnnnnnnnnnnnnnnnnnnnnnnnnnnnnnnnnnnnnnnnnnnnnnnnnnnnnnnnnnnnnnnnnnnnnnnnnnnnnnnnnnnnnnnnnnnnnnnnnnnnnnnnnnnnnnnnnnnnnnnnnnnnnnnnnaggcagcgtgagatcctgtctcggcgggcgatctccgccttcagcagcccctccatggcgtccgactcggccaggtccaggggcaggtccccgtcactgttgacggcggcgatgttggccccgtggctcaggaggtacctggcgatatctaggtagccacaggaggcggccacgtgcagtggcgtccagccctcgccaa

SEQ ID NO: 242680 - DNA, 1693 bp, Homo Sapiens
  misc_feature (1228)..(1236): n is a, c, g, or t
ccaccacttggcaactatgtaaaaccacatgatctagtcatgatactgagaatccaaccaaatgattaccatttgttttgaaacaaccaaattatttggagaaccagctgtgaatgtgacaggaggcctcataacttctttatatccaaaatgaaataattcttaggagtacccatacagtattagaaggccctattaacttccacttgttattacatacatgatctggcatcaagctgcaatgactgcttatacttcaatacttatacactgaattggtttttgtggaatgtgtatcagtttaaatctgtgccaacctaattggaataagctgaatttacagtaacaaaagatataaattcaaacaaatttatactaagtggtagtaggttttataaagagacttcctcagagtactacgtaaaatacatcatgcacactttggagcataagcagaatcaacatctgtaaacaatcagaatttatagcaccaacattttcgctgtaacacaaaggctgactccagggtcatactataccagcctttcaaaagcgctgttttcatttactttcaaagcattttcatttggtgtattgttttctttgctcttaagatatttacccaaatcaaaaagcaaacagtatggtaaaaggtactaccaaaatagttcaaaagagttctgtattatccttaacatagtgcttttttttccttccccttctcttggggaagctacaagacataatccttcagtgcttaactggaaagaacagtcaatcctaaatattaaagaatcttatgctgttgaaagtaaatgaaaaatttcgagttatttgtggcatatttgagcaaccaatatttattgcatttaatcaactgactttaaaaaattacaatcttgttactttcattaatttagcatgtgaaatttaattagaaatactgggtacatacactcaaccatttatatcataaaggataagttttatatttctaaataaagtttgacattcaaaggtactacggcaattcacaataagcacaaaaacatcagctttaccagagtaaagaagtgcagtttatgaaatttaggatcaactattgaaaatgcaagtttcctttaaaaacatacaaacatacgcacaacattaaccatgaaatctgaaactgtgatatttcagtgcaaaaacctcagtatgaggtaattttaatgtaataaccacttgnnnnnnnnntccacacagtggcactcttaaaaatgatagcttccatgacaattgctggctgacaagacaatgtggactaaatgttcttaactgtttaaactaatcttgtcttgtttggacatatatttttccctaatcatttgcttctgattcagaaacacagaaaggcatttattaatgtggaaagggaaaattcccacagccaactaattgatatattcaaagaaaattttctgataaagtttagatagaaattaagataccaaaaggtcaaaaccattttatgagatcaccaacagagggttaattttaggtttttccatataatttgaaacttgtagtgcggcacctccttaacggaaaggtgaggaccctatcaaagttggtttcaacagaacataaactctcttccaagtgcaaaccctttcaaaaaggtgttttaggtcgattattgagccaacttttt

SEQ ID NO: 242681 - DNA, 792 bp, Homo Sapiens
  misc_feature (155)..(234): n is a, c, g, or t
  misc_feature (507)..(516): n is a, c, g, or t
ttggggatgaggcctgcaatgtcgtgtcgggaatggaatgtgtaagtgtaacattcagaaccgggtaacattcggcgaccgaacgcggcggtcggcagcgttcgcgcgggggcctgcgaagcgctgctcggggccggcactgcccgcggggaggnnnnnnnnnnnnnnnnnnnnnnnnnnnnnnnnnnnnnnnnnnnnnnnnnnnnnnnnnnnnnnnnnnnnnnnnnnnnnnnngagcgcaggagtaaacaccgccggagtcttggagccgctgcagaagggaataaagagagatgcagggatttgtgaggttacggcgccccagctgcaagatgcactagccggctgaacccgggatcggctgacttgttggaaccggagtgctctgcacggagagtggtggatgagttgaagttgccttcccggggctcattttccacgctgccgagaggaatccgagaggcaaggcaatcacttcgtcttgccattgattgggtatcgggagcnnnnnnnnnnctcccctctctctttcttttcctccgtcttgttgcatgcaaaaaaattacagtccgctgctcgcccgccctgggtgcgagatattcaaccccgctctctcccgtgcattgtgcaacccaaaaatgaaagaccgaaggggagaaagttaaagaaatcgcccacatgcgctggatcagtccacggcttggggaaaggcatccagagaaggtgggagctgagagtttgaagtctttacaggcgggaagatggcggactggagctgaaagtgttgattgg

SEQ ID NO: 242682 - DNA, 744 bp, Homo Sapiens
atgagccaccgtgcccggccaaaatttttaaaacttaattttggtttatctgttatatattagctgtttccattcatttaattttgctttatgcatctattataaataacacaggttcttgtcttgtgatcacaatagataactttaatataatttctgatatattttgtacttacttctactatcttgatttattatttctattccatcattttattctcctttgttgccttttgttaaattggtcaagtttagtttattccctaacctatcccaaagttagtattttgaaagctacgtcttctatgttctggatgtttaaaataaatgtccctcttttcacttctcatcttttccaaataatgtttcatacagttcctcactattttattcaagggccatcacaatctggtcccactgtacctttacctgtctagccttatctctcaaccatacctgtctatatagcctaaactctagttaaactacactaacgagcagtaaactacattgacgggcagtgtctaaataaaatacaaagttcttggcaatcctttctggttcatgatgtgttctcattaataaacaaatattttattgaaaacctactgggttcctggccctgagcaattccagtaagcacaatggatacagtctctgactttatggagcacagtgtggaaacattaagcaaacgagcacaaatataaatatagtcaagtaaaacttcctaaatacatccaa

SEQ ID NO: 242683 - DNA, 1397 bp, Homo Sapiens
ttggggcttcaagatcagaggcagaactctcctgcagggaataaagaaaatattaaacccaatgaaacatcacctagcttctcaaaagctgaaaacaaaggtatatcaccagttgtttctgaacatagaaaacagattgatgatttaaagaaatttaagaatgattttaggttacagccaagttctacttctgaatctatggatcaactactaaacaaaaatagagagggagaaaaatcaagagatttgatcaaagacaaaattgaaccaagtgctaaggattctttcattgaaaatagcagcagcaactgtaccagtggcagcagcaagccgaatagccccagcatttccccttcaatacttagtaacacggagcacaagaggggacctgaggtcacttcccaaggggttcagacttccagcccagcatgtaaacaagagaaagacgataaggaagagaagaaagacgcagctgagcaagttaggaaatcaacattgaatcccaatgcaaaggagttcaacccacgttccttctctcagccaaagccttctactaccccaacttcacctcggcctcaagcacaacctagcccatctatggtgggtcatcaacagccaactccagtttatactcagcctgtttgttttgcaccaaatatgatgtatccagtcccagtgagcccaggcgtgcaacctttatacccaatacctatgacgcccatgccagtgaatcaagccaagacatatagagcaggtaaagtaccaaatatgccccaacagcggcaagaccagcatcatcagagtgccatgatgcacccagcgtcagcagcgggcccaccgattgcagccaccccaccagcttactccacgcaatatgttgcctacagtcctcagcagttcccaaatcagccccttgttcagcatgtgccacattatcagtctcagcatcctcatgtctatagtcctgtaatacagggtaatgctagaatgatggcaccaccaacacacgcccagcctggtttagtatcttcttcagcaactcagtacggggctcatgagcagacgcatgcgatgtatgcatgtcccaaattaccatacaacaaggagacaagcccttctttctactttgccatttccacgggctgcccttgctcagcagtatgcgcaccctaacgctaccctgcacccacatactccacaccctcagccttcagctacccccactggacagcagcaaagccaacatggtggaagtcatcctgcacccagtcctgttcagcaccatcagcaccaggccgcccaggctctccatctggccagtccacagcagcagtcagccatttaccacgcggggcttgcgccaactccaccctccatgacactgcctccaacacgca

SEQ ID NO: 242684 - DNA, 1443 bp, Homo Sapiens
ggaggtggggtggggaagggttttgtgttggaggaagtgtccagaccttgggtctttccctccctgcccacgctgttcctcagctcaggtctgccgctttcccatgaaatgtgagtacaaatatatgtgcaaatgcccttagaacttgagaaaagaaaaaggatttttaaaaaacagtcaaaaggttttcttcatttcatgcaaagattgtagttgaagggtttctggtagagtatagaaaacacccgggctttggtttgtgtacatttttgcattgcaggagtcttgggtgggtgtacaggccagtggcggggtagccgccagtcctaaggaacagagttggagcgcagcacagggccctggtggggcttgagagagagcttctcggccaagaccccatcctgcagcaggctggcatcgcctttgggctgtttggtcgcaaactcagtgatgctgaagacaaactgcaggcagcccagcttgatgtagctgccatggtgcagtaaggctgtgccctcccagccggccccactgcccccaatcaagctcgagctgctggctttgcaattgcagggtctccgctgcggcccctgggcctgggaactcatcatggctgcctcctcacttggctcttcgtcctgtttctggtgccggcggcgcctgatgacactctgcactttggcaacaatactgcttgggggggttggcggggtcttctccgagaagtcacatgaatacagcacattgtccaccgttgtcccatgctcactgtagtttaacagctcataatgtttggtattctgaggaggaggaggggagataagatgtgtggtctgctgtgtggggcctggggctaaggggagagaggacatatggagaaggccgtgctactctacctagagagtccttacttgcctccccagtcatggcccctgtcctttcagaagagggctagagacacctcctcagggaagctttccttctggtgtcccacactccctactctcccactccttcactctgccctctcagcaccgctcctcttggtatgatactcactggcccgtgatgataatgaaattcacagggacacacccacaaggcttggcttccttctatgctggtcccctcccttgctttagggtaggctccctctgttgtgcctgtgactaacctcaggaaaaatggtagccctgctcctgggaagcaggtagcttcccaggtaggatgctatttcacatcaagactctcctcctccaggaatgacagggagggaagaaaaagagaggacccccaatccctcttccctcccctcagggcactgaacaaaaacctactgcctgggagaggcctcaggttgggaaagctccctcccaccgcatctccggccctcacctcatcgtagaatatgcaggcatgtttcccggacacgtagttacccaa

SEQ ID NO: 242685 - DNA, 913 bp, Homo Sapiens
acaaaaaagttggctaaacgtggccgggtctgcaagctaggtgccagcggggaaagtttccctgcttcttatcgtctgctttaacgccttaaatagcccgctgaaggctgcagcaggtgctaggtagcagcctcccggccctcgggaaaggcggggtggggaggcgagagcagcttagcctcctcgacctcccttcctggtgacggacgaacagttcccgtagaatttcgcttcaccgagtgaccttgagcccagggcgacggtcagcttgttaattcctggctgcaggaactttgtgagaattttaatgcatggaaaagctgtccatgttccaactgctgtacatccaaaagtctcagtgtaatagcaggaccaaaatattctgtcaatcagctgaccatatacttaatgactcctaaaatctcgtggacttctaagaaagcgccatggcctgtgctgctgttatgattcctgggttgttgcggtgctctgttggagccatccgtattgaggctgcgtcactgagattgacactcagcactttgcgccatcttactctaaccagcataatgaaatccaaaaggaaaactgatcacatggagagaactgcaagtgtccttcgacgggagattgtgtcagcagctaaggtgtgtggagctgccagtgagtcaccgtcagtgaagagcctccgcttgcttgttgctgatcaagacttttcctttaaagctggccagtgggttgatttctttattccaggagtctctgtggttggtgggttttcaatatgctccagtcccagactgctagaacaagagagagtgataaaaattggcagtgaaatatacgaaccaccctcctgccctctgggttcacatacgtgtacacttgactgtgaagtggctgtgagagtggg

SEQ ID NO: 242686 - DNA, 1509 bp, Homo Sapiens
ttgggggattctttcctagcaaggtgacagggtggcagctacctctgtgtggctactatggttgtcctggttttatttctctgtgacaaagcctgcagctccccaagaatctgtggtcagtctgaactggccacccttgtctccccagactctgtccttggaagcacctgccagaattaagaacaaggctccctcccctgactggccccaggagggagaggtgacctttgagaacgcagagatgaggtaccgagaaaacctccctctcgtcctaaagaaagtatccttcacgatcaaacctaaagagaagattggcattgtggggcggacaggatcagggaagtcctcgctggggatggccctcttccgtctggtggagttatctggaggctgcatcaagattgatggagtgagaatcagtgatattggccttgccgacctccgaagcaaactctctatcattcctcaagagccggtgctgttcagtggcactgtcagatcaaatttggaccccttcaaccagtacactgaagaccagatttgggatgccctggagaggacacacatgaaagaatgtattgctcagctacctctgaaacttgaatctgaagtgatggagaatggggataacttctcagtgggggaacggcagctcttgtgcatagctagagccctgctccgccactgtaagattctgattttagatgaagccacagctgccatggacacagagacagacttattgattcaagagaccatccgagaagcatttgcagactgtaccatgctgaccattgcccatcgcctgcacacggttctaggctccgataggattatggtgctggcccagggacaggtggtggagtttgacaccccatcggtccttctgtccaacgacagttcccgattctatgccatgtttgctgctgcagagaacaaggtcgctgtcaagggctgactcctccctgttgacgaagtctcttttctttagagcattgccattccctgcctggggcgggcccctcatcgcgtcctcctaccgaaaccttgcctttctcgattttatctttcgcacagcagttccggattggcttgtgtgtttcacttttagggagagtcatattttgattattgtatttattccatattcatgtaaacaaaatttagtttttgttcttaattgcactctaaaaggttcagggaaccgttattataattgtatcagaggcctataatgaagctttatacgtgtagctatatctatatataattctgtacatagcctatatttacagtgaaaatgtaagctgtttattttatattaaaataagcactgtgctaataacagtgcatattcctttctatcatttttgtacagtttgctgtactagagatctggttttgctattagactgtaggaagagtagcatttcattcttctctagctggtggtttcacggtgccaggttttctgggtgtccaaagaagacgtgtggcaatagtgggccc

SEQ ID NO: 242687 - DNA, 1372 bp, Homo Sapiens
  misc_feature (948)..(1039): n is a, c, g, or t
aaacatggacaactaaataaatgacaataagacaactgtttaactattaggaaaaaaacaggttaactacctgcctcagcccaacactaaagaagcatcaaatgaattaaataaaaactttaaaaattttcagacaattcagataaaactgtatttcatttcaggatagcaaaagtcctaaagagcataaaattaaaagaagatatgtagaaatgtaaaagtctgagattttatcttccttgcaagcttactagttagtctactgcaatttcatggatgctaacagaaggtacaagattcctaggtcagagacaggggacttattactcacagcaataagagtagcaagactgtcagcatttgtatcagtttgctgagccccagttcccacagagcaacccagaggccagatggcaactgtatatgcagtcaaatgcattacagaagaacaaacctgagtttagggaacccaaatttcttatagcaggcagtgagcatgcctacccatactcctaagggagacacggttaccatattccaaggatatctactatacaaacatccttcaaaagacagtctacatggacaatatctttgattacaagatgtgcagagctgtgagagcactctcaagagaagccatttaaaaaaatgtgtgtgcgtgtatctctctccaaaatttcacagctttccaatacagtttaaatggcaaacaaaatatgaaaaagtattagcaaatgacaaatttgatgtcttgtcaaataacatttgtcattagaaaaataaaacaaatataagattaatatccttaatatagttattatatattaattaggacaaaggacaaatataaaaaataatgagtaggtaattcaaaaaggcagaaatgtgaatgattgatgaatacatgagccaatatgttcactagttactttttaaaatgctgcnnnnnnnnnnnnnnnnnnnnnnnnnnnnnnnnnnnnnnnnnnnnnnnnnnnnnnnnnnnnnnnnnnnnnnnnnnnnnnnnnnnnnnnnnnnngaacaagcagttaaatacatcaaacacaaaagcagctaggaatgacatgtgggcgaaggcctcctgagaaagagacttttgagtaaaactgataggaagtgtgtctgtttaagggaaaaagacaacagcgggaggcggcctagcaagttaggggaaaacaacaagaaagccagtgaggtagaaatagagaaaaaaggggaagagtggaaggagatgagagtggaagaagaagagaggtaatagaaaatgagatggtataatgccttgtaggtatttacgaaccaagatatctctggggggttctgagcagggcagtgacacgatctgactaaa

SEQ ID NO: 242688 - DNA, 952 bp, Homo Sapiens
  misc_feature (278)..(287): n is a, c, g, or t
  misc_feature (528)..(551): n is a, c, g, or t
aacatttcaaaacagatttgtaacatatgcttcccttttcaaccggcagcacttggaaaagacaattcaataagacaatacaacttgaattaacattaattcaaaatccttatatttttggccacataacttatgttccccacatgataaaacaagtgacagttaaatcaatgtcaacagataaactccatgaaatgaaagtttgtgctgtttgatgaatcacagtatgttatggttaaatatatccactcttttttatattcctggcaccaggatgnnnnnnnnnntctttaaatatacctcttatgtaggtaatagcttctttgcatatctctcttcaaaaaatactttatagcagtatataaataggttacctacacatttcattttataattttgtcccaaaactatagatctgtttcattttcatgacatatcaatttttgcccaacattaataaagctgacaaactcgttgaaatggaaatgcttttgtcttccacaacaaaagtagcaatttgatagaagnnnnnnnnnnnnnnnnnnnnnnnncaccctacagtaacactcgtcagttgtttaacctgagcgtttggcctactaggagtagcagctttttttccttcatgcacgctcacatccacaccacctctgcacacatacagatcgagcacacacttccagatgctggtaggccacagtatgcttcccattgctctaatcaagtgggaagcagtgtagctaatgattaaccacactatgtacacaactagcaaacaccttaaggcaaccattgcaatggggggttaacttgcagggcggatttaatgttctagatcaagtcagcctgtatatacatatgtgtatgtgaatctatacacatacacctttctattttttaaccctccaagacaatgtttatggttttaattttgccaacttttttgtacaaa

SEQ ID NO: 242689 - DNA, 1477 bp, Homo Sapiens
  misc_feature (868)..(868): n is a, c, g, or t
  misc_feature (1118)..(1141): n is a, c, g, or t
ttttgcttttgagaaacttgctcatagcaaatagcagcacacagtctttgattaaaaggccaagatgtccaagaaataacaccaatgagttcattacctatagacgaaccactcaggagactctatcataataatatgatgcgtgaatttatccccaattaagtttccctttccttttttcaattaaaaagtttgaaataaattaacgtttaataatgattgtaccaattctgaggtaaaaaaagagcaccagggatctcaatgctaaaagaaacagaattccttaggaggtccatgctacatagaaccaaaatttctgcggtaatgttatagagttgtagtgcaaaagggacttgtttcagtctttgtatagtctgtatacttctgtatacatttagtatattatctaatctttccagttaatgttttagaactccaaagagaaaagttaatctacatgctctctcaagttttctagataaccaacatttttctggtttacagtgatacacaacaaagttattcatttatttttctggatgctggagacaaacatctttattaaagacactaccaaaattttggcaaacatttcaaaacagatttgtaaacataatgcttcccttttcaactggcagcactttgaaaagacaatacaataagacaatacaacttgaatcaacattaattcaaaatccttatatttttgaccacataacttatgttcccacatgataaaacaagtgacagtttaaatcaatgtcaacagataaactccatgaaatgaaagtttgtgctgtttgatgaatcacagtatgttatggttaaatatatccactcttttttatattcctggcaccaggatgantaaaaaaaatctttaaatatacctcttatgtaggtaatagcttctttgcatatctctcttcaaaaaatactttatagcagtatataaataggttacctacacatttcattttataattttgtcccaaaactatagatctgtttcattttcatgacatatcaatttttgcccaacattaataaagctgacaaactcgttgaaatggaaatgcttttgtcttccacaacaaaagtagcaatttgatagaagnnnnnnnnnnnnnnnnnnnnnnnncaccctacagtaacactcgtcagttgtttaacctgagcgtttggcctactaggagtagcagctttttttccttcatgcacgctcacatccacaccacctctgcacacatacagatcgagcacacacttccagatgctggtaggccacagtatgcttcccattgctctaatcaagtgggaagcagtgtagctaatgattaaccacactatgtacacaactagcaaacaccttaaggcaaccattgcaatggggggttaacttgcagggcggatttaatgttttagatcaagtcagcctgtatatacatatgtgtatgtgaatctatacacatacacc

SEQ ID NO: 242690 - DNA, 1670 bp, Homo Sapiens
cataaaaaccaactttgtacaaaaaagttggctgggagtcaccgcagccaagtttttctgccccaacttgtcggccatttctaccacactgaagctctcccacaacgtggcaggcgtcaccttcctggcatttgggaatggtgcacctgacatcttcagtgccctggtggccttctctgacccgcacacagccggcctggcccttggggcactgtttggcgctggcgtgctggttaccacagtggtggccggaggcattaccatcctacaccccttcatggctgcctccaggcccttcttggcagggacatcgttttctacatggtggctgtgttcctgaccttcctcatgctcttccgtggcagggtcaccctggcatgggctctgggttacctgggcttgtatgtgttctatgtggtcactgtgattctctgcacctggatctaccaacggcaacggagaggatctctgttctgccccatgccagttactccagagatcctctcagactccgaggaggaccgggtatcttctaataccaacagctatgactacggtgatgagtaccggccgctgttcttctaccaggagaccacggctcagatcctggtccgggccctcaatcccctggattacatgaagtggagaaggaaatcagcatactggaaagccctcaaggtgttcaagctgcctgtggagttcctgctgctcctcacagtccccgtcgtggacccggacaaggatgaccagaactggaaacggcccctcaactgtctgcatctggttatcagccccctggttgtggtcctgaccctgcagtcggggacctatggtgtctatgagataggcggcctcgttcccgtctgggtcgtggtggtgatcgcaggcacagccttggcttcagtgaccttttttgccacatctgacagccagccccccaggcttcactggctctttgctttcctgggctttctgaccagcgccctgtggatcaacgcggccgccacagaggtggtgaacatcttgcggtccctgggtgtggtcttccggctgagcaacactgtgctggggctcacgctgctggcctgggggaacagcattggagatgccttctcggatttcacactggctcgccagggctacccacggatggcgttctccgcctgctttggcggcatcatcttcaacatcctcgtgggtgtggggctgggctgcctgctccagatctcccgaagccacacagaagtgaagctggagccagacggactgctggtgtgggtcctggcaggcgccctggggctcagcctcgtcttctccctggtctcagtcccattgcagtgcttccagctcagcagagtctatggcttctgcctgctcctcttctacctgaacttccttgtcgtggccctcctcactgaatttggagtgattcacctgaaaagcatgtgactgaagccgcttagtgctgtggcctcactgcaggcaggagccccgcccctcctgccgggggaggcccagggaccggagcatttctgcaaggcccttgtgggcacgagagtgcggcccttgctgctggagatctgaggtcactgctgtgagctgggaaaaactgctgtgtacttctgctgccacacccaacagcccttgccgtggggacctggaaacctggc

SEQ ID NO: 242691 - DNA, 917 bp, Homo Sapiens
ttggcttgggaccgctggcctcgctcggtgcgcgcctccctccccgcatgcagcccgccgagcgctcgcgggtccccaggatcgacccgtacggattcgagcggcctgaggacttcgacgacgccgcctacgagaagtttttctccagctacctggtcacgctcacccgcagggcgatcaaatggtcccggctgctgcagggcgggggcgtccccaggagccggacagtgaagcgctatgtccggaaaggggtcccgctggagcaccgtgcccgcgtctggatggtgctgagtggggcccaggcgcagatggaccagaatcccggctactaccaccagcttctccagggagagagaaaccccaggctggaggacgccatcaggacagacctgaaccggaccttccccgacaacgtgaagttccggaagaccacggacccctgcttacagaggaccctgtacaatgtgctgctggcatatgggcaccataaccagggagtgggctactgccagggaatgaattttatagcaggatatctgattcttataacaaataatgaagaagaatctttttggctgttagatgctcttgttggaagaatactaccagattactacagcccggccatgctgggcctgaagaccgaccaggaggtcctcggggagctggtgcgggcgaagctgccggctgtgggggccctgatggagcgtctcggtgtgctgtggacgctgctggtgtcccgctggttcatctgcctgtttgtggacatcttgcccgtggagacagtgcttcggatctgggactgtttgtttaacgaagctcgaagattatcttccgggtggccctgaccttattaagcagcaccaggagttgattttggaagccaccagcgttccagacatttgcgataagtttaa

SEQ ID NO: 242692 - DNA, 2207 bp, Homo Sapiens
  misc_feature (1331)..(1369): n is a, c, g, or t
tcacagcacatcaataagcagtatgtacatagactgacttttatagtacatgtcatgtcccaaattcccaatccttaggtaagatatcaagttacaaaatacaagtgccgataattaaactataggtagtatattaaccaaaaatgagtttttagcaattatgtgaaataaggctttaaccaaagcaagacttaatgccacaaggtgtcttttttccccaagagtaattaattcaatcaagcccatgattccaagctcaagtaacaagttttatattcttgaagcaaacaagaaaaggcaatcaatgcttaagtggtatattttagtatatattacatttctggacaatctctcattgcattcaatttttagaacttgtcttgggtctaataaaacagaagaattagagaagaaagcccatgccactttgaggaatgtaacataattgttttgtctgggtacaaaggtacgttacaacactgggggtctttagtcaagttcccatactaattgactcaccaaagcatacttccttcagctacaactgtaattggaacacacagattttacctgaagaaaatcctgtacttccagttttaaaaagcagacaattctatgaagaagcaaccatttaaatatctaactatacacattcaagtttttacaacttcatgccttatgaggaattttgatttcagaagtatcattccacagactcagcatcatatatttatacatatttcatacagtatagtattagaaactgtaaatggcacagaataatcataattatcacaaaattttatcaatttccagtgatcttaaaaagacaaattataaccgcctttgctcagctaagatatccagttatggttacaactttcgaaaatcctaaagttatgtgaaaaaaattagtcaaagaaaatctgtaaatctgatactttccaatattttaaatatgcacagctaaagagaaaataaaggggttgatctggcacatgaataattaagtcaatgaattttacaaccctgagccactttggcaactactttaggtttcacataattttcacagtcttagtaccaccattttcattcagataaaagaaatgaccttttgaaatcatgggcatcaaatttggtgcttatggacaagaatcacaactagaagctagagacaaaatggatcacagcaagcacagtttccctcaaagaataaggaacgctatagaatatacaacagcgatagtttagaaaccttgggaagctcacatttctttagttattttgttttactaaacaatttgaagtaagcattatattcatgtttnnnnnnnnnnnnnnnnnnnnnnnnnnnnnnnnnnnnnnngcagcatggaacattttaggagtcacagaaggttctcttcttccctttgttttgggcacattgtctcacctgttttcactttgttacaaaaggaaacaaaaccaaatctctgctcagagtggtcatagtgagaacactgagatttgcatatgtttttctactttcccatccatctagaccctgaaatctaaataaatatttcagttaaaactttttttccatttgcatgaagtctgggtcactatatctcctaccctgaatgggggaagatgggacagctatatctcatactgaagcggtggcagctaaaacctggcaactgctgccagtgtccccaatgtgtcttgcttattattttttaaaatgtgacaaagacaaaagctacagctggaaactcacacaatttagaaatatgttgaaaacttttattatagtccttaggatttccaagtaaatgctcccaaatcaagtattacaaagctgctaattaattagcaactgaaaattagccattcaaattatattggaaatatttgctgaattgtttttatgaaagcttcctcttggattctgtaaggatcagagtatctgaatccacaaaccagctagtttcaagaaagaattcttttgactaaaacttaccttaaaaccaattttcccaactcttttccttttcccaaatagtccaacgttttgaggagaaatatatgaggcaggttgttttacacggcactgtaccctttaggaaacctaacatttcagtgaactgggaaacttcacaacataaactctatgtatttatagatattatgactgctgtataatatatactgtgggg

SEQ ID NO: 242693 - DNA, 870 bp, Homo Sapiens
ttggattagactgttaaaaatatatatgtatttcttaacattgatttcatcctgtagatattagagatagaacatgaccccagtgctcctgattacttggaatatgatattgaatggctcactattctcagggctacggatgatcttattaatgtgactgggcgcctgtggaatatgccagaaaataatggcctgcatgcaaggtgggattatagtgcaacagaagaaggtatgaaagaagtattggaaaaattgaatcatgatctcaaggttccatgtaactttagtgtaacagctgcttgttatgatcctagcaagccacagacacaaatgcagctgattcataggatcaatcctcagactactgaattttgtgcccaacttggcatcatagacatcaatgttaggcttcagaagtccaaggaagaacatcatgtgtgtggtgaatatgaagaacaggatgatgtggagagtaatgactctggagaagaccagagtgaatataatacagacacatctgctctgtcttctattaatccagatgaaataatgttagatgaagaagaagatgaagatagtattgtaagtgcacatagtggcatgaatacaccatcggtagaaccttctgatcaagcttctgagttttctgcaagtttctctgatgtcaggatcttgccaggctctatgattgtatcttctgatgatacggtggattccacaattgatagagaggggaaacctggtgggactgtggagtcagggaatggagaggacttaaccaaggtgccattgaagaggctgagtgatgaacatgaacctgaacaaagaaagaaaattaagaggaggaatcaagccatttacgctgcagtg

SEQ ID NO: 242694 - DNA, 873 bp, Homo Sapiens
aaaagtgctactccagggaacacacaaacaataataaagcaaaacagcttgttgctgacatggagaaagttcagcagtctggatagatcaaaccagccacaaccttcccttaagccaaagttaatccagagaaaggccctaactctcttcaattctatgaaggctgagaaaggtgaggaagatgcagaagaaaacttggaagctagcagaggttggtttatgaagtttaaggaaagaagccgtctccgtaacataaaagtaaaaggtgaagcaccaagtgctgatggagaagctgcagcaagttctctagaagctctagctgagatcagtaatgaaggtggatacactaaacagattttcaatgtgcacaaaacagctttatgttggaagatgccatctaggactttcatggctacaaaggaaaaggcaaggcctggtttcaaggcttcaaacgacaggccactctcgataggaagtaatgcagctggtgactttaagttgaagccagtggtcatttcccatccccaaattcttagggcccttaagaattacgctaaatctattctgcctgtgctctataaacagaacagcaaagctggatgacagcacatctgtttacaatgtggcttactgaatattttaagcccactgtagagacctactgctcagactaaaaagattcctttcaatggtatgctgattcatgatgcccctggtcacccatgagctctgatggagatgttcaaggagatgaatgttgttttcatgcctgctaacacaacatccattctgtaccccatggatcaaggagtcacttcactttcaagtcttattatttaagaaatacatttgatggccggacacagtggctca

SEQ ID NO: 242695 - DNA, 644 bp, Homo Sapiens
tggatccacttttaaatttgtcaagaggttatgaccaagaaaatttagaatgatttatcattctaaatatataaaaatattatgtattctcatgcaatgtatcgactctacaaaagagatgccctcccccacagacacacacacactcacagtcaatcttatctttacttccactaaaacacactcctgtctcaattttaactgtagttggtatctccagtagaaagaagttattttaaaaaataaagaaaactacacctcagggttagacgaattgtgataataaagtggaatcacacttcctacacatgaaggggatatgactaccatagttattacaagatttctcatgtgattaatttaatgcagtactgaaaagacagtttgctaaaatactgggtgagaattcatctcaaagccacaggagagccagagcaatagcatatggatgatttctggaacattagcacaatttattttgtcaaggaagaaatatatcagtatgttataattttcggctcagctaaatattaacacttcaaaaagaatcaatttaacttatccacaaaaaacttttgacttaataaatgctgaaattttctaagtgccattagttggccaagatatatcattatttttgccaa

SEQ ID NO: 242696 - DNA, 948 bp, Homo Sapiens
  misc_feature (476)..(804): n is a, c, g, or t
gtaaaaatactgattaaaataacttttgtgaaaatatttccaaagaaatcagatgcaagttttatacatcagaaacttgttcagtaaaaagcacagtaaaagcttagaataaacaaactgaaggaaaccttaatgtgcctttaatcctagagctatttgccagcataaagagaattcacaagaactctctttgagggttaacttttcctgtttatagtcaggtagtttgggttgtttgcttttatattttaattatttaaagagctatctgaatgaagctacacacttcaaaaacactaaattgcaagtgggaccaaataatggcttccaaggttttacgaattactaactatggtactacataatacttcttcttgctggcctatcatattctttaaatatttcacttagtcgatgagcttcagatttaagaataagagtggaaaggagagacaagaactaagtttaatgcaacnnnnnnnnnnnnnnnnnnnnnnnnnnnnnnnnnnnnnnnnnnnnnnnnnnnnnnnnnnnnnnnnnnnnnnnnnnnnnnnnnnnnnnnnnnnnnnnnnnnnnnnnnnnnnnnnnnnnnnnnnnnnnnnnnnnnnnnnnnnnnnnnnnnnnnnnnnnnnnnnnnnnnnnnnnnnnnnnnnnnnnnnnnnnnnnnnnnnnnnnnnnnnnnnnnnnnnnnnnnnnnnnnnnnnnnnnnnnnnnnnnnnnnnnnnnnnnnnnnnnnnnnnnnnnnnnnnnnnnnnnnnnnnnnnnnnnnnnnnnnnnnnnnnnnnnnnnnnnnnnnnnnnnnnnaagattccaaagacggcagcatttgctttttaaagaacatgttatactagaaaatgtttttactgagcaagtttctaagattaactcttgatatcacttttacccaacttttttgtacaaagttgcctttatagaaaagcattg

SEQ ID NO: 242697 - DNA, 945 bp, Homo Sapiens
ttggcaactgtgcaaggggctggtgcaggcactgcagaccaaggtgacccagcaggggctgaagatggtggtgcccggactggatggggcccagatcccccgggacccctcacagcaggaactgccccggctgttgtcggctgcctgcaggcttcagctcaacgggaacctgcagctggagctggcgcaggtgctggcccaggagaggcccaagctgccagaggaccctctgctcagcggtctcctggactccccggcactcaaggcctgcctggacactgccgtggagaacatgcccagcctgaagatgaaggtggtggaggtgctggctggccacggtcacctgtattcccgcatcccaggcctgctcagcccccatcccctgctgcagctgagctacacggccaccgaccgccacccccaggccctggaggctgcccaggccgagctgcagcagcacgacgttgcccagggccagtgggatcccgcagaccctgcccccagcgccctgggcagcgccgacctcctggtgtgcaactgtgctgtggctgccctcggggacccggcctcagctctcagcaacatggtggctgccctgagagaagggggctttctgctcctgcacacactgctccgggggcaccccctcggggacatcgtggccttcctcacctccactgagccgcagtatggccagggcatcctgagccaggacgcgtgggagagcctcttctccagggtgtcgctgcgcctggtgggcctgaaagaagtccttctacggctccacgctcttcctgtgccgccggcccaccccgcggacagccccatcttcctgccggtggacgataccagcttccgctgggtggagtctctgaagggcatcctggctgacgaagactcttctcggcctgtgtgggctgaaggccatcaactgtgccacctcgg

SEQ ID NO: 242698 - DNA, 904 bp, Homo Sapiens
ttgggattttgcacgtggatcgccgttcgggtgggcgagatggagacagcccccaagccgggcaaggatgtcccgcccaagaaagacaaacttcagaccaagagaaagaaaccgcggcgatactgggaggaagagaccgttccgaccacagccggagcctctccagggcctcctcgtaacaagaagaatcgggagctccgtcctcagagaccaaaaaatgcttacatcttaaagaagtctcggatctctaagaagcctcaggtcccgaagaaaccccgagaatggaagaacccggagtcccagcgcggcttgtccggggcccaagatccattcccaggccccgcccccgtccctgtggaagtggtccagaagttctgtcgcattgacaaatcccgaaagctaccacattctaaagccaaaactcgaagccgacttgaggtggctgaagctgaggaagaggaaacaagtatcaaagctgctcgttctgagctgctgcttgctgaagaacctgggtttctggaaggggaggatggggaagacacagcaaagatatgccaggctgacattgtggaggctgtggacattgcaagtgcagccaagcactttgacttgaatctgcggcagtttggaccctacagactaaactactctcgaactggaagacacctggcttttggagggcgccgaggtcatgtggctgcccttgattgggtaacaaagaagcttatgtgcgagatcaacgtcatggaggcggtgcgggacatccggtttctccattctgaggcactgcttgctgttgctcagaaccgctggctccacatctatgacaatcagggcattgagctccactgtatccgccgctgtgaccgagtaacacggcttgagttcctgcccttccacttcc

SEQ ID NO: 242699 - DNA, 565 bp, Homo Sapiens
tcaaacattttctcctttaggagctgccatttttcctggctggtgccataggaatcatctgggtgcctgggcacacccgctgctgctttaaggcttccgccctgatgctgacactgctgctccacgggcccagttctgcatctccaggaaagacaaacagtctccagttttgggcccagctttcctagtctcttcttttccttaccctcagccctgatcttgtgtttgtacggacagtgagctcaccctaggcctggacccaggcccagtttccaaagcaagcagcacacagcgcatgttcacataagcatgggggctggggggacactggggcttactgatctttttctaggggcctccagcccctggcaccacctagaggggaaagtgagtcacccaaaccattgcccctgggcttacgtcgctgtaagctcacactggccctgctgtgccctctttagtcacagacagcgtgtgagctgactctgtccctttaatgcccaggctgagcccagtgcctccttgagtatctgctccatcactggcgacgccacaggtaggccaa

SEQ ID NO: 242700 - DNA, 1196 bp, Homo Sapiens
agttcacacttccaagcagaaatgtcacaaaatcaaagacgatggcaattaaattccagtcttccagccaaatgcccccctcccccagggctggtaaggcacaggacagagccgctgccccacagcctctcactcggcagggctctgctgcccttggccctagtggggcttgtcttcttcctcccaaaggggcacacggtccagctgaagggagggagacatgggattggggtgtacaaggggctggcggtaaaacagagtttggtaaaagaataccccagccagccccaccaggctgcaggatcaggcttggcaaactttactggcctccccttgcctcgatacagggtagctagaggctgggggaggagccgaggggtcctgagcatggctgactggcctggtccctgctggcctcctgtacccatgagatctactcgaacccccaactgcttaaaacagatctgtctctactgacttagaaaccaatgagaaaggtagtgtttgagttggcacctggcagggtcagggaggaaagcgaaacaggctcttgtcctgccttgtcacgggagcctgagtttctattaaccaccttcgtttaagaatcagggagaaatgaagagtttttctttgaccacttttcctcttaatttaggaaaagggaagctgagggtgggtgaacagcatctttttccctggcctctgcccccattacacagcccccatcaggagctgaagaaccgatcccactgaggaatagttcactgaatccctttccctcctcgttttcttggttcaagctgcatccaaagcccaagggtcctcactgaaaaatcctagagactatcccccctgatgaaaaagagcagaaactgcggcctcaccagcatccttgactgctcacctccatgccagtgccaaagcagcagctaactggcttccccaaaacccagggccccaggaaacgcagccacttattcaaccaaccatgtaggcgctgcagaggaagggaccctgggttgagggttctaatcccagctttgccaacagccagctgtgtgacctcaagcaagttactcccctcacctgggctaagatttctcatctggacgatgacatggttggatgagatgctaaaaagagccagcaggcttgtgttgagatgatgctgacaaagctgaaccactgaatcccaa

SEQ ID NO: 242701 - DNA, 868 bp, Homo Sapiens
gacccaaatgtacatatttatgtgtaaataaacacacataaatttttcaaataggagcccctacatttctcttccctttgatgaactgttgaaccctaataaaatgaagagtatcacacaaccattactggaacctgttaaagccactaacagagaaagtcatatttcaagtatcagttgcatactaaacgaaggctctaccaatgacagcacatgcctcattttaaagctatctgagaaaattttcctcaagtcttttcaaccagcactcaccatgtaacttttgaaaacataggtcagtttatatgtgtgtaacacacaggcacattaattctataaacattcttttcaaggaagctgcctggacaagtgctaggttgtaacggcccactggactaaccaccctgcacgtgctgcccagtttcaacacacttcctcagccgagacttgagatgcaaattgagggtaaactcagcttccaggcatagacttgaacatttaatgccaacaaagtcccattgtcagacccctcctgcaactcctaatccacatatgtctatccggcatccactaggacaactacctgcgtccacaacattaacatgatgtggacaccccagaagtccactaaaacccagtggggcaaggaatgactgtactagaaatgtgtgaaaacaatgagatttgagggtctttactgatcaatgatagaggatgaggaaaaagaagaaaggaaaaagatcagtgaatgtctcaagaagacaaaaataaaggagattaggagagacaatcagggagagaaaagaaatgttgagggttaagaggagaaataattgacaacagaaaatgaaggtcagtcatctgccaa

SEQ ID NO: 242702 - DNA, 1018 bp, Homo Sapiens
ttggctttctatttttatcccttttcactctttttatcccttgttttctctgcctgtctctttctgttgaattttctctgtgtctgtctctcctttgcatgctctctttttccaggtacaacatctgtgcctccacagtcggaagtcataataaagacaccaggcttggaactgacatttccatcctctggcgtcacttgactagagtgatcaaaagtcgaaatcacgaattgcctgaaagtggcaagggccttctcagctgttgttgaaatgatttgcacctctttgaaaactaagattgaattcagtccatgaaagcagaaatgaaagatgtcttcaccagtctacctttgggatttctccttctttccgtgtttacagttgctttgggaattccaggactgtctcaccccaccaggccttttttcttgcaccatccctcccttctcccccacccctgaccgtttaaaacaaaatgtctcaaccagtcagtgatactcacttggagaaggaaatgtttctttaggatgttaggttgacccatgagaacatggacaatttttggtcacttaagcaagttgccacaattaagggatggactggtttcccagttctctgtttgcatgattttgttggactggtggaagaaatggcctcgtgtctcctcgtatgttgtctggagagttcagagatggaaaatcttgagacagcaagaaaagcatgattgtagaatcagcatccctgattacattagacctggcaaatggacgcctggatcccagggagtcaggctatgtcattagatggaagatgcccttgagatgcaagctgagggccctgatgattgcactgcggggctaatgcacatagagatctgggtcatgaggagtggcactcactgcggcatccgctttgtgacactacatgttctcagttcctctgtctctgaccatgccaggctcacttgtcagttcctcttctttcctctaataagccctttgttacatttatttcttta

SEQ ID NO: 242703 - DNA, 1279 bp, Homo Sapiens
  misc_feature (360)..(372): n is a, c, g, or t
aagaaatgacagaagtattataataaaacattttaaaagaaaaagttacacaattaggccaatagctataaaatggctttagggctgggcttatacaccaagagttctgatcagactgtagtgagacactgaacatttcattaacaaaaatactggcaccagccacaacatatttttggttgtcacttacaaggaatattgtatttaaacaactatgcactgcaattctaacacactaggtgttcatacactgaagttaacccctgaagctttaagctaccaagaattcccatacttttaatgcacaatttactttgcgtgttatcagaattacatttccagttttctgatcttccctgnnnnnnnnnnnnnacacacatgcagtacattatgtgacagagagcactccagcttctatttgactaacagcatggtcctgattacctcaagagttagttttatgccaatcttggagcttctgctttaaatctcatctcctagaaaccaaataaaacattctgagaacctattccaggaatattttttttaacgcataggaaaataaagcatttcatataagcatgttggaaaattcaagaggcattctgatcagtccctgaattccagctattactttaaatcaaaattctaaagataccatttataaatttttatgtggaatttgtattcttcatatggaaactcatgatctgcaggcttcccttctgaatgaggatagcaaaaaactgacgctggcaacacatgaatatagctttgattgaaattatgacacacttagatgaatttaattattttcaagaatacacttgtactacaaaggtgagaaattagaatggcaaaattatcagatgggaaaaagtactgacatttaaacgaagctgtgaatataccatggtaaaatgtgccatgtaaaagcctgtgctagaatcagaagttctacaagatttcaaaatacttagtgaataaggaaggaactgaaacttgaatttgacttctcttgctgccacgcttcagcagacaactattcctgtggaattaagtccactgaataaccaaatagaccaattctagttttttccttcttttatatgaatagattaaaatcaagccctgctctaccaccatcttagcataggacataccctttcaaagtgtacacacaacctcatggcaggtttgggcaagctacaacagataccatctcaagaagctactttgaaagagaatagaacaccagactaacattgagaatacccaa

SEQ ID NO: 242704 - DNA, 1557 bp, Homo Sapiens
ttttcaaagtaaaagaagcaaatactgaagttataaaagcttgtttttctttattagaatacttttttcaattctgatttgtcacaatttagattctttttctaagaataagcagaaatttacaaaatttaatttttatttatacattcatccgttcaatacacatttcaagaaagctgtattgcaccctttcagtggtagttacaggacaaagaaacaaaataatccaagagagagaccaacaaatgtatatttataacacagagtaataaacacaaataaatgtggagttatttaagcatgtaagatggtacatgctctaccaggtatgggggcttctctaagacacaagatcagattaaagtcttgaaagataatctggggttagtcaagcaggtagaagtgtgaagagcactttctgagcggaatctccatgtgccaagtctagttcaagagactggatagagattagcaatttggagaatgcaatattaagaaatggcaaaggtgagcctacagagattccaaagttgcatagtgaggtttgtgtttgagaaagtggactcaggcagccacgcaaaagagggattaatagaaaaggagactgaggtaggaaaatcaaggcattagtgttgcagcaggtgtgggcagagttggggaggcaatgggatggattcatgagctattaaaaaggtcaaaggagcagggattcatgacccataagtattaattaatacagaagaagaaaatatcagaatgagttctaaattagggcctgagcagctagatgttgggataataacaaaaagactgcaaaaggagaagatttacactttggcaaaaaatgtatatgaaagtatctgggaattttatgccatcattaaatctacttattatgctgaaaatccttgttagctggaaagactaagagaattccccaaggtgcctaatatataaacttggagtagttttcctacttcaacttttatgcggcttattatttgcagtcaatttatatttggtcaatattagttaattcatttatcatctctgtaagattggttaatggaagcagattaaaatccaacagtggtaattttctggaagtcctccagagagactacaaaaagccaaaagtcaactttaatttttgagtacttttcctatttaaggttactgagataaattgtctttgctagaaaaaaataaacagtattgccaattaaaaactccatttactatagaaatattcctgattattttacctttgggaagcaatgcttgttgcttgaaaattgtatgagcctcaatggttagtggtggtaaaatggaagaatgcatactgcagatgggttacacatttgtttgtgttctatattccaagtcacaaatacactgctttgaattgtatttagtcaaacagcagatttgactaatatttccctgaattcaaatagtttagattaattaagctaactgattggttatctaccattatatagatattacccaagtaatgttgtcaaaataataattaatccaacttttttgtacaaa

SEQ ID NO: 242705 - DNA, 1213 bp, Homo Sapiens
gaagagccacacttcacaccttgtaaaaagaatagccctgttcaacaacgctgcgctgacagccacatcaggaggggccacggtgaacataggaaatggctttggcaaatacttgtaccaactggaacgagtgaagtttcaaaagtaatgtgaggtacaactgcattccgctgtgaaaggccgtcacaggacacaggctcgtctgttagaaaggatgatctagttctaccattaattcttgcagaatcagatctgctgagtggtgaaccaacaggtgaacacaacgtaagaacaggcatcaaacttcactggaaataatattgttcagtgtgtggcggcaaaatatgcattttagagaaaacttatttctcaaatcatgtgttaatagtattaacatgagcagcgtgagagacatcctgaccccaacgtttttgccatgcctccctttagaagcttaggagtttgtacattccctaagtggtcagcactacaagtgtctgctaaaatgggcacttcatcaagataacaggaaagcaaacttaaagtaacgagatttcttcccaaaggcacatggaagaagctgatagagcccttgacccagacagaatgggacccatccctacccgtcctgaactgtcgcacactgcatggccaaagacaaactctccacccccacagaggaagcagtggctgactctggggacaaagcactccaggaagtcacctgctccctgggtttcaggagtattcagttgaccgtctggacaccagtgagggagacacaggtaatgaaatcaaatgctcaaacttttggcaaccgaaagttgttttttaaagctctttataatctgctcaagtagaatttctaacacaaaacccttttttgcttaaaaagcagatgacaaaggaaatgtcaaataatgcacatgaatcttcagctattttcctacccccaaatgagatatggggctgcacagcattcactacagatccctagtttttacaactgtcaactgtacattctcatgtttaggatactccagttcactgcgtggatatttggaaaactggacaaaatcaggcagcccacccctcccttgtcccgagcttcctcgatctccattcaccatgaccaattttttcccccacaaaagcactatcacctctaatagtagctggaaacacctatcagccaacttttttgtacaaagtt

SEQ ID NO: 242706 - DNA, 1424 bp, Homo Sapiens
gggagggtagagccctgggcctgcccagcactctttagtttcctaggccctctgggaagcagctgtgggaagggactgtgccccgatcaggcagacccacatatgagggtccaagttctacgaagccaggtttttacccagcagctcttagagccagctccaaatggcctggaagaaaaaaccgtgggcatgctgcttctcctttgcctgccctttagctggtggaatagcccagcctgattcctctgggcaagtcacattctgcctggacaagagctggttgggtgggatggtttcagaggtccctgctgacactgacgcccggagcactgtactagaaagatcccccgtgcatgagaattcccaggaggggcaggcgagccctggctttcaggagcaactgtaaaggtgggtcttccttcaggctttttcttgtccaacacaaactccagcagtggcaagaatgcccctcttgatcagagttctgagcctgatagggaatctgttctcaacagggcttggtgagagtaagatcagcttactccccacgttggaaataccaaaggcttctggagccgcgcctttagccaacagtgccagaggctgtaacagactcaacgcccaacacacatagcctgactccccagtggcttcttcagaataggtgtctgtcgtgtggtggccttgagaaaatattgatttcttgcctcacgaaaatttccatctggaggtaatggagtttatttgcaatctgtgacactggggacgggacagacggtgtggactttgtttttagccaagcaaaacgactttcagaggtggccactgcccctctaccccaacctgacctcctgctgcagggcaaagttcctgacatggggccctggatatgtttggggggtcagtcctaaaccctccgacactgtgtgcaaatgggggtatgtatctggacgtccgcatttttccacagagagaccacagctttctccagattcaccaaggggcctgagacccagaaaagattaagtatcacagctgtggaggttgaagatgattgtgaaagagcactccatgtccctagagaacaaagctcatggcagaagaactaaggatcacttggctcaagctttgaggggacccctacacctcaacagcactgccacgttccaaagcacagaaatccccactgcaaggagaagaccgaggaacacagcgacaaaggactcgtcccaaatctagactggccccagcacagagctgggactcacatgtgggcctgcccaactcagtccatggttcttcccacctcagcagagtgctgggaagaaggtaccgacctgagctgagcagtgttgacctggtgacaggtggtttccaacggtggcctcactgaatactcccccaccctatggggcagaacccaa

SEQ ID NO: 242707 - DNA, 1300 bp, Homo Sapiens
  misc_feature (192)..(214): n is a, c, g, or t
  misc_feature (295)..(309): n is a, c, g, or t
taaaaaacaaatatatgtttaatggcatagtgataaaatgaaattgtgttaatttaatccaaatagtatgtcaaattatagattttatattaaacaaatcagggctcatgatttctatatgaaatatttatcaatgaatcatatggactacaccaacacaaactttatttcatatatttggaaaatagacannnnnnnnnnnnnnnnnnnnnnnatttctatgtatgtgtctttattgatatgaatctgggcagatgaataaatgagtttttcaaaaagcaggtaggaatagatnnnnnnnnnnnnnnngaagtgattgaatggtatagcactgagaaccaccctactttaacttctgatgctagtaaataaaatatatttgaaatatctgggaaacctgccagatgagaaatattgaatatattttcaagtttttttaaaggttagattgaggcatataacaaaacatcctcaaagaatgggaaaaatcagtcaatcatatgtatgtggatacaggatgcaaagcatctagctatgattgaatgactaattttcacacttcctctcatcctaggcattttacccaatatttagaatcatgcagatagagttgaactaataagctttgtaggatttaaacataaataggtgaaagaagagataatgtctgtgaaaacattttgagaattgaaaatgaccacataaaatattgtttttaattaatgactctgttaacaccattaactattaagtcataggatagaagacaaatggcagttttcttgggaactttctaatagattagattcctttgttctgttcttacgtgctgggaccatgcaagtagggatgagaaaggatgctgaaaacaagattctgaagccatttctttctttgtggatctccgcatttcaattgtatttttggctaaaatatttcctttgtgataagtttattgaatagatttgaacataatgattaagagcgtaaatcaagagaacaaaatttgttttttatcagaagtgagatcttgggcaagctgtgtaatccctctaagccttatttcctcacctgtaaaatgtgggataacagtaattgttattatttattttctgtagggtatatgctagtgctttcttacattaatgcttactcttcaggatttattttaagcagtgttctataacagccttagcatctcgtcagcacatagaatccctttatccacataatattgattgcattaaaaattagaatcaataattttattcagtatatttgccaacttttttgtacaaag

SEQ ID NO: 242708 - DNA, 1604 bp, Homo Sapiens
  misc_feature (1483)..(1492): n is a, c, g, or t
ttggcaacagttgtctgctgcaacctcacgaattgctgaacttgaaagcaaaaccaatacactccgtttatcacagactgtggctccaaactgcttcaactcatcaataaataatattcatgaaatggaaatacagctgaaagatgctctggagaaaaatcagcagtggctcgtgtatgatcagcagcgggaagtctatgtaaaaggacttttagcaaagatctttgagttggaaaagaaaacggaaacagctgctcattcactcccacagcagacaaaaaagcctgaatcagaaggttatcttcaagaagagaagcagaaatgttacaacgatctcttggcaagtgcaaaaaaagatcttgaggttgaacgacaaaccataactcagctgagttttgaactgagtgaatttcgaagaaaatatgaagaaacccaaaaagaagttcacaatttaaatcagctgttgtattcacaaagaagggcagatgtgcaacatctggaagatgataggcataaaacagagaagatacaaaaactcagggaagagaatgatattgctaggggaaaacttgaagaagagaagaagagatccgaagagctcttatctcaggtccagtttctttacacatctctgctaaagcagcaagaagaacaaacaagggtagctctgttggaacaacagatgcaggcatgtactttagactttgaaaatgaaaaactcgaccgtcaacatgtgcagcatcaattgcttgtaattcttaaggagctccgaaaagcaagaaatcaaataacacagttggaatccttgaaacagcttcatgagtttggcatcacagagccattagtcactttccaaggagagactgaaaacagagaaaaagttgccgcctcaccaaaaagtcccactgctgcactcaatgaaagcctggtggaatgtcccaagtgcaatatacagtatccagccactgagcatcgcgatctgcttgtccatgtggaatactgttcaaagtagcaaaataagtatttgttttgatattaaaagattcaatactgtattttctgttagcttgtgggcattttgaattatatatttcacattttgcataaaactgcctatctacctttgacactccagcatgctattgaatcatgtatcttttaggctgctgtgcatttctcttggcagtgatacctccctgacatggttcatcatcaggctgcaatgacagaatgtggtgagcagcgtctactgagactactaacattttgcactgtcaaaatacttggtgaggaaaagatagctcaggttattgctaatgggttaatgcaccagcaagcaaaatattttatgttttgggggtttgaaaaatcaaagataattaaccaaggatcttaactgtgttcgcattttttatccaagcacttagaaaacctacaatcctaattttgatgtccattgttaagaggtggtgatagatactannnnnnnnnncatattgtatagcggttattagaaaagttggggattttcttgatctttattgctgcttaccattgaaacttaacccagctgtgttccccaactctgttctgcgcacgaaaca

SEQ ID NO: 242709 - DNA, 894 bp, Homo Sapiens
  misc_feature (290)..(324): n is a, c, g, or t
  misc_feature (351)..(385): n is a, c, g, or t
gcataaaggaatgaggaagtagacgatatccatatcagataaagtagaaagtcttatgtccttctgaaaagcaacacagtaggcccaagaacaactacaaaccattttccttttagctaggaggtatatggcaagaccaatgatattctcttccccatcctttttgtcacagggtatgaagtctatcctattcaagttagttacaagtcttcagcccatttagtcatctaagaagttgagaaagtctaaacctaagtaatcacagcaaatactgcaaatactgatatacnnnnnnnnnnnnnnnnnnnnnnnnnnnnnnnnnnncattagataattctaagcctaaaatannnnnnnnnnnnnnnnnnnnnnnnnnnnnnnnnnnaaagaaacttggattgttttaattggtttaaatgcagggtatatgtaaacaactccccagaaatgagaggcacttctcggaaatacaataacccatgtcactagactagcaaaacactcagtgcttttgacttgatgaattgaatgagttcatgattcaactttctaatgttgtctacttgaaaaatagcaagattcttatctgcagcatttaatgcattaagatgtattagataggcatatcagatatcataaaattaaaattgtgcttatgttaattctgtaatagacctaactttaaaacacctcatgttattcactaggagctatgatctagtcgtgacaatattggttaaaatagtcaatctgaggcagaaagtaaacaagcaaagtcacttttgcaggctttttaaactgtataacacatgaaattatgactattccccagattatgcaaccagcttcaatttaaaaagctgggaacaaatattatgaggcgttacttctcaa

SEQ ID NO: 242710 - DNA, 741 bp, Homo Sapiens
cattgtttaaaactctttactgatgtacatgttttaataaaacaaataaccaaaaaaaatacacaaatccatagttatttaaaaacttaggatttttaaaaaacatgtctataaaaatacaacgtttaaggcagtttggaaatgcatttgtacatttctacaacgtccataaattctcttgaaaataagaatgttaacttcaattctataaaatacactgtacattttaagactgttctaaatatagcacacttcacaatggactgtgggttttgattcctgatgacaaatggattctatacatttcaggggggaaaggtgtaatatggatgtgagtttaaaacttttaatttctttttaaaaataaattatttctgaagcatacaatttataaaaattctatatacaaagtacagcaactggtaacaaaccccagttttaatacattttatatacgatgtaccagggtttagcaaccctgataggagcagaggcaatatacattctccgcatatttaaacataaaatttcttgatgtaaagaacaaaaatgacaaaaaaacaaacatcataaagagactttcatacatggcagtgcagagcttttttaaataaaaagttgcattgttcaacaccatggcaaccccttagatcagcatttttggacccttaatcctaagaaatgtgctaagagatcagagtggtagcaatgaaattaaggtcccaacttttttgtacaaag

SEQ ID NO: 242711 - DNA, 1438 bp, Homo Sapiens
ttggcttccttgtgagtcaggtgggtcctgggcccaggaaccggcccggagccgtggacgccctacagctgagaaggggacccaaggggtcggccgcggccaaggcccctaggaccgccgccccagctcacgctgccgacggcagctatagacattctgcgtcaggtccgggctcctggacttcgcctttcccgagccctggaggtggggagaaaaggttcaccaatttttaaaatccaaatatatctcatggtacagtggaagaactggccagagagtctggaagtttgggttctggtcctggctgtgccactgactcactgtgaccttgggatcttgtgctgtgaagacatttcccaagtgcttcatgttagccagcaaatctgacccacaaggcctggaaagaggtgattgttaggttgcgcagaggtggtcttatccagctcagcttcccctgggacccaccgtgggacctgaggcagaactggggtggacttggcctcctccatggcacaccggctgcagatacgactgctgacgtgggatgtgaaggacacgctgctcaggctccgccaccccttaggggaggcctatgccaccaaggcccgggcccatgggctggaggtggagccctcagccctggaacaaggcttcaggcaggcatacagggctcagagccacagcttccccaactacggcctgagccacggcctaacctcccgccagtggtggctggatgtggtcctgcagaccttccacctggcgggtgtccaggatgctcaggctgtagcccccatcgctgaacagctttataaagacttcagccacccctgcacctggcaggtgttggatggggctgaggacaccctgagggagtgccgcacacggggtctgagactggcagtgatctccaactttgaccgacggctagagggcatcctggagggccttggcctgcgtgaacacttcgactttgtgctgacctccgaggctgctggctggcccaagccggacccccgcattttccaggaggccttgcggcttgctcatatggaaccagtagtggcagcccatgttggggataattacctctgcgattaccaggggcctcgggctgtgggcatgcacagcttcctggtggttggcccacaggcactggaccccgtggtcagggattctgtacctaaagaacacatcctcccctctctggcccatctcctgcctgcccttgactgcctagagggctcaactccagggctttgaggccagtgagggaagtggctgggccctaggccatggagaaaaccttaaacaaaccctggagacagggagccccttctttctccacagctctggacctttccccctctccctgcggcctttgtcacctactgtgataataaagcagtgagtgctgagctctcacccttcccccact

SEQ ID NO: 242712 - DNA, 1134 bp, Homo Sapiens
aaagatctgcttagctggtcactgccatgctttgattttggaaggtattcaggtgatctctttctcactgcagagctcttatgcattctttggagactctgcttcaccagggatttctcatctgaagttctcttaatgctggccttaatgcaagatctcttctccagcaggtatcaaatacaatctttacctcacaccatcttgttcccaacagaatacctccaacatctctctgctatggtcacctcagtcctggcagatagttctacagatttctttaagctgactctcttgcccttgtagtctacatcccatcctcagggcaagactcatatcctctatcctgacaaactgagagtgaaggttgttccccacaggtgcacctctcacctcttggccattagaaccagccagccccagtacctgagttttaaggcatgggtcccaaagcagcccaccctgttccctacctacctccctcttccaagatgcacagatcaagctctctgtgtggaacagcacctgcccttcacccccagatatctcataggggattaggagtgagactcacagaaaatgaatttctccgaagaaatcacttccagactcttctgttcttttatatctcagaaaggattgggttttcaggttgcaaaatcttttccagctctgcataggtaggtagcatctcactgaggaatggagtatttaccacctattgttctgttccagtctagtagagctttagcaaaaactacaggcaacaaattctatttttaacatcctgttacacaaacaaatatgctgagtatgcacacaaataaatggtgaaagaggcacaaagaagtgaaaacaatcgtgcatggtaggaatatttgaattgtattacatgtcctttaatattgttttaacagtaatatttttacattttcaattggaatgaaagcatgtatgtgtttgaataatttttcatcgtgcactcatttttttgattccacaactaatgagagaaacagtgatgattgtaaaatgtatcccacccttaaggaattcacagtagaattccttgtagttcctgtagaactacaataatataatgtaatataataggtaatagtattataatactcccaa

SEQ ID NO: 242713 - DNA, 979 bp, Homo Sapiens
ttttctggctgggaaataaaaaatactatgatgttgcgttcaaacaaatgatggactgaggttatagtaacacgattggggcatttgtgcatgagatgttcagttcacatttacctgtctaccatgtttgttctgggggatggacttgggagagttatctctggactcactgctgtgcctggtcaatggtctgatgtcccctgtcttttgtacaaagatacagcagtttgaacggtggctccagaaccatttcctcacccccagaactgtgaatgtgaccttatttggaaaagggcctttgaagctataattaagtgaaggattttgagttcatcatgaattacctgggtgggtctaaatatagtaacatgtatccttagacaaaagagatgacacaaaggaggccatataaagagggaagaagaagttggaatgatacagtctgatacagtcacaagccaaggaatgccaccagtggctggaagagataaggaagtatcctcccctagaggcttcagagaatgtatggtcttgccaacactttgattttggacttctggcctccagaactaagagagaatacatttctgttgttttaagccaccaagtttgtggttatttgttaaaacagccacaggaaactaatatacttgtgctgtggtttgattatgtccctcaaaagttcacatgttggaaacttagatcccactgtggtggtgttgatgaggcctttgcagggagcaaacgggtcatgaggattctgccctcataaatggattaatgccataatcatgtgagtgggttattggtgaagtgcctttgttataaaagcaagctctcttgcacatgctttcttgtgccccttgctttctgccttgggttaatgcagcaaggaccccaccagatgccagcaccatgctcttggacttccctgcctccagaaccatatgaaataaatttcttttgttttctttcccaa

SEQ ID NO: 242714 - DNA, 2703 bp, Homo Sapiens
ttaaaaatattttaatggtgcaaaattcaccataatgtactctagcacaatgctaaaatgttatctaagatggagtggcttttattagttttacaggatgtatatttggcaatagttcttaaaaataattactcaaaaggaactctaactctattattttagaaacaatattttaaaatacagcagtaagcaacaaaaactattgctctttatacatttttggcataacactgccatacggttacagaattataaaataagtattttatagtaccatacagatccagaaactggttacaacttctaccacatacacatggtattggtactaacgaacatgcacagcattctgtaattcatactgcagttgaatacagagcacagagaaggcccagtggccactggagaatcagagcttatgttataagtaaaacacacatctttgtaacaatcgtaggcattttcctgaaatatttaaaatacaagggacacaatagtttccaaaatgacataatctaccatccttcttagataatactaaaaaagaaagattaccttacataggaaacaacttaaagccctttttaaaaacaggaggaaaatgcttgtcaaaggacctaacattttgctctcatttgtttctcacaattataatgccacacaattaatatgctgtcaactcttgacagtgtggaagttacttcactcacaaaccacctatcactgagtctttctcttatctgcagccagaccatcaacttaacttgtaaaactaccaactgttgctacacacaggcaaaggaattaaacttggtagctgatcatttgattacatctatcagtctactggagggcttcaacgcagagtaggtggaattcatggttcaaatcagagtattaatgggatctgtttgcacaccaatacctgatctccttggcacaaatacagagctgattcttaaagcatgtccccacaataaagcttttcttaatcattcgtcacctgcttccaataattctggcacttacacaaacttatcaagggttatgtctttatttctgtggtgagtttcctgttgctgtttctagacttttatttcatttgtattttatttttcttcacatgaaacaaaatctgttagcactgggaaagaaaagttcatttgactaatgagtgtagaatgtaaatgtttcttagtaccaaaacttattatatatctaatttttctagttaacgtaaattgttacacaaagtataatttaaaaagtaaaactatgacaaaccctaaagcttaaatatttttagagaaaaaggtattttagcacagtaagtgaccactactgccttttctctgaatcattttataaagagattttatattaatatacagctgtgaatgaacaacttccctaattttttaattaaataaataggagtgagggaaaaaaactcatatttcaatgattcccaagatcgttaagatataactacaatttactaatgcccaactgctcacagttttctaaacaactacaaaataaataaattgtagcaggtattttatgagaactgatacccatcaaaattgtgtatggagtccatgatggcctatcctccccagaagtcagagctcacagtgcccaacaccctcattatccagaggagaatctgaggacccatcatgccagtggagaaggctggagcccagcactggcgccactttcctgagatgcccacactgattcttgtcccttctccctctctgaactctacttccagccagtttgggtcataacacaaaacatttaattgtattctctacatgaaaactttagttcaggaaaataaacatattaagaggttatttccctcaaataactgaaacaataaacttcacaacagaataggaaaaaaaatgacaaagaacactctctgtagtctaggaaaaatgcaagaacagtgcttttaaaatgattctaatgagactacagcataaaagtttttcaaattagtttcagatttctccaactgcctactggaattaaacttttaataatttctctaacataattctatttctgcatccgcctacatctaagaagaagcaaaacataaatattatttgtagtaactaaggaacgtttaaaatgaaaattatagtatgtagctaaactacaaaaagcataaataaatataacagacagtatagttagtctttcttactctaaacacgttttgtcaaatgtaacacattgttgaatatcatggtgagtacacttcttgataaactgatgctattgtcccaaacagcaacttctccaaaatgataaagcaccacctaaatttcattaaaagaactgatattcatggtttagaaagttcccaatgatgagattttataatgtaataaaaatgtaaacttctgaatgaaaaccatttacatttgttaaggcacatctggatacctccagacattcatatttatagctatattattattcatttcaataataagggatttctaaaaacacattctgtccctgaacacaatctgctgggtgtgttggataactagaatgcagaaggagcagggtagtactcactgtcaccctagagattagccacacaaatatgttcctgtaataaacagtacaaaactcaaaaagaagccagcaaatgtacactcctaattttctagccaa

SEQ ID NO: 242715 - DNA, 480 bp, Homo Sapiens
gtgcaaaatcaccataatgtactttagcacaatgctaaaatgttatctaagatggagtggcttttattagttttacaggatgtatatttggcaatagttcttaaaaataattactcaaaaggaactctaactctattattttagaaacaatattttaaaatacagcagtaagcaacaaaaactattgctctttatacatttttggcataacactgccatacggttacagaattataaaataagtattttatagtaccatacagatccagaaactggttacaacttctaccacatacacatggtattggtactaacgaacatgcacagcattctgtaattcatactgcagttgaatacagagcacagagaaggcccagtggccactggagaatcagagcttatgttataagtaaaacacacatctttgccaacttttttgtacaaagttgttctatatataaaaaagcattgctcatcaat

SEQ ID NO: 242716 - DNA, 1586 bp, Homo Sapiens
  misc_feature (298)..(308): n is a, c, g, or t
ttggattctgagcactcacaaagccagtgattaagtaattcagcttgataattagttttaacttttcagtggttttaaagccccactcatataattttttgttggatatagtataaaattatttagtcagtggagaatcctttcaggagttttcagggaatacaagattgttgacatctaaatctgcagctgcattctaataaattgccactttatttacttgaattatattttctcaggaaacccaaacttgcaaatttagtcttttaaatttaagtgtaccagcttaataaacttnnnnnnnnnnncattttaaagtgtaggggggttacacatagatatttctacctgaatatttgagtaaaaacaatacattaaaagtaaagttttttctctcatataatttctcaaacagtaggtgaccaactaaacatgtgtttgcacttcttgttacttgatgctcatggttctttgcatgtgtcttttaaactagagctttaacttcctcttgtgcatggtttgtgcaaattgcagtttattaacttgtctttgtctttgatgcttgcaacctaatccatcacagctacactgcctcgaaaagaaagtgctgtcaaacaggaaacagagagtgagtatgcttagtgtattagtaggtattctcaatgcatgtttgtttaatgtctagaaattagttgtcttgaaaaaaggtaacaccaaaaattttgattgctctgaattgccaggtattggtgaaagaaagccaacatgatggtagtgatatggctgtatccaagaaatatatgatatagttaaaattacttgacgagtagtagaacattgtgtcagaaatttgtgaaaagacttaaccattatacttctattttcaggctgtttagaaactataaaaaatcttatatagatatggtcggattttacataatgaagccaaagtttatctttaattgtacctgttctgtcttcatttgtcttttctgaccattagcaaatagtacaagttaactgagagatattcaggaaggatgtttttaaaatatattagttattgtttatgtttaattctgaataaaaatatcacattttcttctaaaaatcaaatcctttaattccttggtgtatgtgagctattgccagctatatgttctcatttttcctcatggctatgacggataccaaaattttacctaaacacagatgtcccatattaatatgattagtgatgtatgtattacatttcggctgtattttaaatataacgagttttcagggtgttttttctgttcattttatttagtttttaaaggactataatcagttcacttactggaaaagcagtttcagagtttggaacatactaagttgaatcatatgtaattgactttttttggtagggcaaaatgatcaagtatgggcagtttcatgtggttcaacctaatatattgatttattgtggaggtaacattgagatgcagcagttttcttctgaagtataacaaagtcatgctggctaatatgctaacgtggtcctcattgaccttcatccatattcctgtcctttgaatggaaaa

SEQ ID NO: 242717 - DNA, 2069 bp, Homo Sapiens
  misc_feature (256)..(266): n is a, c, g, or t
  misc_feature (847)..(855): n is a, c, g, or t
  misc_feature (1090)..(1099): n is a, c, g, or t
aaaatttttacttagcagtacagcataacacataaaaagcataccatattgccccataaaaagcaacatctatattcattatttactaggatgtaatttttttacaacgaaagtctgcttcactgaaaacttttatctctaccatgaaacacacctgcagctacttgcaatgaaacctctccattgactggaatcctgtcagcattaaataccagatacataagaaaattattaaaatatgtacaaccctgcattnnnnnnnnnnnggattgaatgaatttgagtatattctgaactcaccttgaacctgggttcaaaatttactcatgaaagaaacctttatgacatagtccatgaacaaaactggaaaaggtcagagggaaactggcaaaccaacagtgtcaaagatggtccaatgttaccaccaccacctcttagtctccaagcagagtatttagttgactatttccatatctctcaatcaaattcaagttaatagactagtaggatcagaaatacaaagataataatttgaaaagactaaattttactcagagtgaagaccctgactaaatttattaagagcaagcttagttcttaataagtaaatcaagtatctttaacgcattaactcatggtagcatctaaatactgacctgaaaccaactcataaaaaattctgaatgtcatacaagttctcctatcctctacataaaacttaaattttcactataaggttttgaagaaatagatggattcagctttatactgaaaatgcctattcattttaacactgcgagaaaaaagaaaagtgccttttcatcctggcacctgaaatctgaactgnnnnnnnnnaactgggcctggaagtaatctgatccttaattattgcttaggggagggaataaccctacaggctgaagatttcattagcagcccaccagtctcttgaacataatgtggcaatgcttctatcatgtgtgtgtgtgtatatatatagtctcccttccgtccctccaaaataataaataactttaggtgaaggacatcagaaatagcaaaaaaatggaaatatggaaattatgtgagnnnnnnnnnnaatacataggacatctagccttttatggagtaagtctgccaactccagtctaggttgtagaatgcagaatgatacagggaaatactgaactgatccagctccctccactgaatggctgtatgtgctttgacaagtcacaatctctttcaaaactagttgcctcatttataaaatgcaaacgcctgagtcccacacccaatcaaatgaaattcaaaatctctgggaatggggccccacacatagcctcccccaggtgattctaaagcatagtgaggaccgaaatcccgagattaaatgatgactaaatctcttcagctctgctattctttctataaataacatagtttgtaacactgatttttttaaaagaactgcatcctaaaaataaccttcctcctgatataatccaaacttaagttctatgtattttatacaattaaaaacaagtagctacaagttaagtcactctacagcaaatacaatctaaataaaattgtgtcaaaatatttcaaattttaattaatgacagaatgttatggtctaggtcaggagtcagcaaacttttctgtaaagagccagatagtaaatagtttaggctttgtgggccacatggtcttctgttgcaactactcaactctgccattctagtgcccaagtagcagtagagaatataaaagtagaagtgtgttccaataaaactttattcaaaaaaacaggcaatagtccagatttggcctgtgggctatactttactgactcctgctctagctgataccacaaaactctataaaatagaatttagactagattcaacctgcataaattatttctaattacagttgaaattctgatacttcaatctttggctgtaaaacaagagttggacacaaactctctgacataactgtaaaaaatactggaattatagccaaagttacattaataatatttatcatacttaaatacccaa

SEQ ID NO: 242718 - DNA, 1132 bp, Homo Sapiens
tcattctgtggtgttctcagtacaaatggtacacacctgatttgaaacatacagaaaaagtgtaaactaccgcaatctgaattgcaagtattaatttcatggcactccaacgactatgaaatttctttcacccaacatgtaaatacttgttacaaaattctataagaatttttcataatctctggatgtagagtttggatcacttttcagaaacagcaactacacacttcgccatgttatgactgattaataaaaagaatgtttataaaaacccttctttacaggattaaaaaagtattaaaagaaaccatatttgtgattgctagtgtaccaacacttttagaattttaaagttatttacggaactggctattgttccttattagagttttcaagaaaactgtctattgctggtagtgtgatttcattttgaaattaagacttcgcatttaatgaaaagcaattaagatttaaatgaaaatgtattattccgattcattcataaagcagtatctctcatatacaatgtgaaatgtaattaaaactggcatttctgaaagcattgttacaaagatattttagacttgtagcactagcagagacattgcattaacctatgttagattttataacttttatcctgtttcagtaatactggctcaagaattacaacgcatactttgggttttgtttcctttatgccaatgatttagccttttggaactgttttcttcaacagcaagatggttggttgccccgtgtagctggtttccttaaaaactatttttaggtctatgatcatttcctgtgacatattttgaccttctaaattttcagattattgcaccaagtagaaagagttttccttagacagaaagagaattagatatttttcaagtactttctacagccttcttcttatttataaaaatgcataatagtgttatagtaagcctaaaaatagcttctggcctccatcatatttcgtgatgaaatatttaatagaaaacaattctgattcatctattatggcaaatggatacagctttcctgttttctttttcttgctttgagctcagatttttagaagcacgtatttaaaaagcacccaacttttttgtacaaagttggc

SEQ ID NO: 242719 - DNA, 1277 bp, Homo Sapiens
ttggctgtgtcaggatcgcagaaagtatgtcccttctctcaccatgagctggctctccagttcccagggagtggtactaacagcctaccaccccagcggcaaggaccaggccgtcgggaacagccatgcaaaggcaggggaggaagccacctcgagtcgcagatatggccagtacactatgaaccaggaaagcaccaccatcaaagttatggagaagcctccatttgatcgatcaatttcccaggattctttggatgaactatctatggaagactattggatagaactagaaaacatcaagaaatctagtgaaaacagccaagaagatcaagaggtggttgttgtcaaagagcctgatgagggagaattggaagaagagtggcttaaagaggccggtttatccaatctcttcggagagtctgctggagatccacaggaaagcattgtgtttttatcaacattgacgcggacccaggcagcagcagttcagaagcgagtagagacggtctcccagaccttgaggaaaaaaaacaaacagtaccagattcctgacgtcagagacatatttgctcaacagagagaatcaaaagaaacagctccaggtggcactgaatcgcagtcacttagaacaaatgaaaacaaataccaaggaagagatgacgaggcatctaaccttgttggtgaagagaagctgatcccacctgaggagacgcctgcccctgaaacagacatcaacctggaggtatcatttgccgagcaagcactcaatcagaaagagagctccaaggagaaaatccagaagagcaaaggcgatgatgccacattacctagtttcagattgccaaaagacaaaacgggtaccacaaggattggtgacctcgcaccccaggacatgaagaaagtttgccatttagccctaattgagctgactgccctctatgatgtattgggtattgagctgaaacaacaaaaagctgtgaaaatcaaaacaaaagattctggtcttttttgcgttccattgacagcgctattagaacaagatcagaggaaagtaccaggaatgcgaatacccttgatctttcaaaaactgatttctcgaattgaagagagaggtttggaaacagaaacctcttacggatccctggagctgccattagaatcaagaatctttgccaagaactagaagcaaagttttatgaagggacttttaattgggaaagtgtcaaacagcatgatgccgccagcctgctgaagctcttcattcggggagttgcccc

SEQ ID NO: 242720 - DNA, 908 bp, Homo Sapiens
ttggcgtcgtttaatccggaaacggcggcggcggcgacaggaccgaggggccttagttggtgggcaagtcggggatcccagaaagagaagcgtgacccggaagcggaaacgggtgtccgtcccagctccggcctgccagtgagcttctaccatcatggacctattgttcgggcgccggaagacgccagaggagctactgcggcagaaccagagggccctgaaccgtgccatgcgggagctggaccgcgagcgacagaaactagagacccaggagaagaaaatcattgcagacattaagaagatggccaagcaaggccagatggatgctgttcgcatcatggcaaaagacttggtgcgcacccggcgctatgtgcgcaagtttgtattgatgcgggccaacatccaggctgtgtccctcaagatccagacactcaagtccaacaactcgatggcacaagccatgaagggtgtcaccaaggccatgggcaccatgaacagacagctgaagttgccccagatccagaagatcatgatggagtttgagcggcaggcagagatcatggatatgaaggaggagatgatgaatgatgccattgatgatgccatgggtgatgaggaagatgaagaggagagtgatgctgtggtgtcccaggttctggatgagctgggacttagcctaacagatgagctgtcgaacctcccctcaactgggggctcgcttagtgtggctgctggtgggaaaaaagcagaggccgcagcctcagccctagctgatgctgatgcagacctggaggaacggcttaagaacctgcggagggactgagtgcccctgccactccgagataaccagtggatgcgcaggatcttttaccacaacccctctgtgataaaagagatattgacactct

SEQ ID NO: 242721 - DNA, 997 bp, Homo Sapiens
tggatcttgatgtccaccgaagaagtctgtggcatggtgccaaggcaggcccaacactgggaaaggactaattttttttgtatattgagagaaaagtttcacatagactggccagagttccgaagcacaactacagacagcgtcatgacagggggacttggcaggacaccttgatccaaggcgacagcatttggcaaggacacggaagttgggtcgttgcatccatcatcaggagttgacttgttctgagcaactgaacagaacacaccgcgatgctctcgacacttccgctcctggacttcagtcacgagtgagttgatggtgacttgacctgagagatttcacagaagctctgtgacttggttgtggaagaaatctgaactgttcaagttaaccaacttggttcattttaaatcaggcaaaagccacagtgggttcccctgagaaggttagtcaaagacttctggtcaaggttatgaccgttctgaacactgaatatttctccgcaaggatgtccacaaacagctacttgaatgtatgatggtgtatgcttggtcctggggaatccaccggcaaggaaaaaaaacctttactctttcctgtgctgcagtcggctttcagaaatgaaagaggtggcccggactgtattcacctacgtcctggggttgaagaccaaattcccccaaaggctctcggaatccagactcatgagaaggaacagacattgtccagtttgcctttgttggcagatgtttcttgtgtgaatgcagaccataaatagtaattgaactacagtgcaatacggcgctggttcctaaatacaagtctgtgtgaagatggtgagattctacaactatctccagtagttgtcctgaatatctgtgtttgggagtacccacgcttgtgaacagctgttttccgttacgaacctgaatcaaattaaacatcgttcccagttgaagattcaaggctgaattctaaactgcccgtccccacc

SEQ ID NO: 242722 - DNA, 982 bp, Homo Sapiens
aaatttattaatatcaaaagctacattttactaaaacaatctgcctttaaaaatgttgaatcatacaatatgtacaatacatgccgctttccgtttggacttcactatccattggagtccttcagctagcatcaagcacttggcttctgctgcctctgacttggagtaatcacaggctctgaaatctcaaaggtcttcacaatctcctggcagacaataatgaacatttaggcactgggcttactgcaagtgaaggcagagtcagaactatgcaggggcaacaggcagagctttacctcccagtcacggtaactcaaagctataattccttgatttctaacttgtgtgttatgttcaaatccctcattttcttcattaatactaacaggctctgtttgaaagacaaatttttcaaatttatcaaaggttattaaatcggaacaggtaatctaaacggaaactgatgaataatagcaatgaaacctgtattgaaaagatacttataatattacatactttttaggatttcatgcattatggagctgctgtagtattattacagtagccagtcattccatctgtttccatttcaaaaaacatgtagtagagtaacacattccagacatttgaaaatctgcatatctatgtgtcaaccacagagctaagccctagtgagtccaataggacattgagaacattgaaagtagcaagtaagtgcgatggaaatattcactctccacaggagaccttaggaggacatgagtaatggagagtgtgaaattattcaggtaagaatgaaagattcatagaacctcaaagagaaaagaaggtgccggcatctgacaaaacgtgattagaaagagggatactacaaaaatgactgcaatcaccaactttctaaattaagatctgagggaaattatatcatttctttgttaatatttacagcagatccaacttttttgtacaaagttggctttta

SEQ ID NO: 242723 - DNA, 413 bp, Homo Sapiens
ggttcccgcgccgcggagcccggcccgagagccgcgtccacgttcctgcctcctgctcccgccgccctggggcgccgccatgacgcccgatctgctcaacttcaagaagggatggatgtcgatcttggacgagcctggagagcctccctccccctcgctcaccaccacctctacttcgcagtggaagaaacattggtttgtgctgacagattcaagtctcaaatattacagagactcccctgctgaggaggcagatgagctggatggtgagatcgacctgcgttcctgcacggatgtcactgagtacgcggtgcaacgcaactatggcttccagatccacaccaaggatgctgtctattccttgtcggacatgacctcaggcatccggcggaactggatcgaggctctgaaaa

SEQ ID NO: 242724 - DNA, 1158 bp, Homo Sapiens
ttggctcaggttatcactctccctgggatcctgggcatctttcactacccccaaatttcagacattggagtcaggacagagaggtgttaggaaccccaatctgatttgaacaggctttctagaggcataattgtggccatttaccacagtctctgtcccttgcatctgtagagctggttgtagtagaggcagggattcccaggagctatcagcgtcttcaaagcagtgatctgtctgagacctgaagatgctcagtaaaagttacccttaccacttggggtcctcatgtgaggcaagggtggctcccctccacccacgcctgctgggtttgaagcaagccagctgccatggatgaataggcagataacagctggcgccatgttggacttctcaggcaggagccccaaccatctcttctgtccattttggtaggtggcacctctgagcatgagaagctgtgccgggcccgggaccagtgccgggagattctcaagtatgtgaatgaagcggtaaaacaaacagagaaccgccaccgtttagagggctaccagaaacgcctggatgccaccgccctggagagggccagcaaccccctggcagcagagttcaagagcctggatcttacaaccagaaaaatgatccatgagggacccctgacctggaggatcagcaaggataagaccttggacctccacgtgctgctgctggaggacctcctagtgctgctacagaaacaggatgagaagctattgctgaagtgccacagcaagactgctgtgggctcctcagacagcaagcagaccttcagccccgtgctcaagctcaatgctgtgctcatccgctctgtggccacagataaacgggccttcttcatcatctgcacctccaagctgggcccaccccagatctatgagctggttgcattgacgtcatcagacaagaacacatggatggagctcttagaagaggccgtgcggaatgccaccaggcaccccggagctgccccaatgcccgtccatcctccacccccaggtccccgggagccagcccagcagggccccacacccagcagggtagaactggatgactcagacgtgttccatggtgaacctgaacctgaggagctgcctggaggcactgggtcccagcagagggtcc

SEQ ID NO: 242725 - DNA, 860 bp, Homo Sapiens
cctatctgttgggctcctccctccaccagggcgtttctgaggggcttggggctgcatgtgattggacaagagggtttggctgcacagtgccttccagactcagttgtggtgagcaaatgctttgacccctgggccttcatctgagccgatctgagcaactctagccactgccacctccttgcttcaatcctcccaagacgtagctcactctgggagggaagctcctggttaaaggagcttggggaggtgggcaagagagaacacgccacaccccagaggtatcgaaccctgcccctttcctaccgcaagacgcctgaccctacgaactgtgcgctcacatcatccatcccgtacaagagccaagccccttagccctcacccatccctacaacatgtgagcatcctactaaatatgctacaccctagtccgaaacaggcctgcgccggccttcagtcacactgcctgcctccccccagactggcctctgagccccaaaagctgctccccaggcctcttctgggaacagattccttaggcctgtttttgagagcatctgcttctggctttgcgagaggtttgtctttacaacttcagtttctgctaccatcttggggagggggacatctccttagacttggcagacttctcattcttacagggcacccccttcgttggcgttctgttaggaagagacccacaggcagcacccccctcagtagtgcttcccttcctggcacttggataggctggggcgttatgcagatggcaacatggttctccgcacaatcctgaggcctgccttctccctctccccagcaggcctggcgttttcctcccacaatgtttgagattttgccaa

SEQ ID NO: 242726 - DNA, 1708 bp, Homo Sapiens
  misc_feature (1204)..(1217): n is a, c, g, or t
  misc_feature (1630)..(1650): n is a, c, g, or t
gaaaattttcccaaagctttctttttctttatagttatcatttatttctctgaggtaagttactttttaaaaacaaacttaaaggacacactacacttcagcaaaagcttgtccacgcatattatatttcagccgtagatgagttgttgtggctgttttaagatcaaagcgtccactgtaatataaaagtcactgtaaacatatccatgatattcctgtcaacataccaataaaaagtaataaagcaataataaaacttatcgtgaactttcacccataatgcatatcatacagcaaaatctcttacatatagttgtatacatatacataaatgtatgcacttcttaaaagaatttgtaacgtgaacattcacaattttcttcataaatcctttgtagtttattttgatcccagcaattggcatatagaaaagtagattccttttccttttctcttcttcagataagtttttaattacttctatttatatataggagtgccagttgtctggcttcttaaggaagaattgtatgtcatggatggagagaaatctctacaggaacctcactgagcagctaaaactccactattcaattttgggagcctgaggcaaaggcagaagaaaactggagacaaactggcttttgaccagatttctcctgttgccatattgaacattgtatggtgcttttaggaccctttagctgaatactagtctgttctagcacttttacattctcttttggaagaaatggccctaatttgcctagcgaatcagtactacaaagaagggtgacagtacgttttatgtagctcctgagtcatctccagttctcatctgatggcatgcatgcaaaggaatatgttagaatgattcagaactatttgccaattttatatctagttttatattttataacttttagcttgcatgtatttttattgactaattttatatattttatcgtttgtaaagcttttatttgaagaggaaaactttaatataagacatattttatagtgcaaagataaaaatattctccaaattctggtgagtggtcaaaattatttataattcagttcatagttgtggaccgaatttttagcacttaaaatatctataaatatctaatcatgtggatgcataaatgagatagagttgtaggcccaaatagttaagtatttgtaaaatattaagtaaaannnnnnnnnnnnnngtaaatgatttgacaaaatacttatttgggaaactattttcattggtttggactggaaatgggtttaaactatactttacatatttcttctcctttttctggcaaagaggccttctttctgggtacataagtcacgctggacaaagaatgctttctaaatgtagacagccttttcctaaagttacccccagaaaagaaatataggagagggtcaaagcaacaattggatgcagccagagacaaggttatgaccacggacttctgcattctaaggacagaatcacagggtttagtttcattgtgtaaaaaatgaaggtgaatggtacgttgaatatgatatggcatgaaactgactaaaaaggcagcggtcacgaccatgatcattcctatagcctttttatgacttgacagannnnnnnnnnnnnnnnnnnnnagtaaggtcaaaatgatcattgtgtaacagacaattataataacaaaagggatgccaa

SEQ ID NO: 242727 - DNA, 922 bp, Homo Sapiens
  misc_feature (642)..(653): n is a, c, g, or t
  misc_feature (691)..(733): n is a, c, g, or t
ttcacagagattttcaaatacaaacaaaatagcacttttaaattttttacaaaatgaatatagaaataaatgtggtacagcacagtacaataatggacaaaagaaaacacgatccaatgactggaaaatgtctctcattactctcatatcttcggctgaattctctcctatagtggacagaaagttgccccttttcttcataagaatatcatagcagaagctactcagagaaatattgcatattgtggaataacatggaaatacaaaggcttaactctaaaggtctgcataaacactgaaaatatgttgaggaactaaattagagtttatgcaggatatacaaaatactgatagtttggcttattggtccatttattaggcttaatgtatgttttataaagtgataatactgtattttaaatgtatattaaaaagaaaacagaggagaaatgcaccactaaacctcccagtctgtgcgataatccacgtttgtgcataggcgtgtgtggggatgcatatgtctgtatgtgcttgtgtgcttttgggagtgccgtgacctacagggaacatctttgggggtaccctgcttcccaacataacactgtttctactagccctttgattttctgagtcctcaccttnnnnnnnnnnnnctaaaacccaaacccttgtttgtatatgtagatttgtnnnnnnnnnnnnnnnnnnnnnnnnnnnnnnnnnnnnnnnnnnntgtacattaacaatactctgtggaatagaaacacccgatgccctgcaatatttttagcctttggtccatttttctccatcattctatactctccttttttttcccccacaaatctcctacaatccttccttcctatatcatgttcctgattttatcgggaggtcattttattccaacttttttgtacaa

SEQ ID NO: 242728 - DNA, 947 bp, Homo Sapiens
  misc_feature (814)..(822): n is a, c, g, or t
aactttagagtagggctgggaacacagattcactaaggagggacaaagaaaagctttcagggtaaaggggaactttgggaccatctggtactacttctttacctcgtatagtcatttcagaagacctcctggttaggtggccagaggctctgctggcatgtctccagtgatgggggccccctacctcctgggggactcttctgttaactagggctgaaatctgcccacatcatcctgcaggaggcaggctgtgtacctgagggccttggtggtggcagtcagcagtcatgggcacagttctgaagtctgtgtccctccataagggacagcatctatccatatcaggctgattctggttggaaaggttggttttgaccacctgcctgtgttgtagaattgggttgaatgcctctgaccccttgccagtgtccgttagtttctgtagcaaacccagatcaccccacaggtagttttctcttaggtcaaggtttcaggtggcagatcctgcagagagcagcttgttccagggtacccctggttcagatgaagaaactgagaccagagagggcaggacttgcaagaggtcactgagtaagctggggcacagctgaggccagaagcaacagatttctactctttgggctgagaactgcatcagacccaaaagagcaaaaagacagacccagaaaagcaggatctcagcccagccctgccatgaaacaaatatcacttgcctctctctaggccttagtttccccagctgtaaaatgaggaacttgggtcaaatcactagctttcaaacttctaaaaaaannnnnnnnncctagcagaattgtttttcatactagcccaacatataaaatagaagggagctgtctggttggaatacagtgtggggaagggagacacagccttcctgcttagtcttcccctattctctctctctc

SEQ ID NO: 242729 - DNA, 924 bp, Homo Sapiens
ttgggtagattttataaacatccatttacctgttttgccaagaatacacatggtatagatgcagcatatatccagttaatatatccagtcactaatttccagaagcacatgattggtatatgtgtcacgttgacagtcataattgtgtgttctgttttcatctataaaatcttcaagattgacattgtgctttggtacagggattcctgctatgattttctcccaataaaagcttcagatggaaagacctatgacgcatatatactgtatccaaagactgttggggaagggtctacctctgactgtgatatttttgtgtttaaagtcttgcctgaggtcttggaaaaacagtgtggatataagctgttcatttatggaagggatgactacgttggggaagacattgttgaggtcattaatgaaaacgtaaagaaaagcagaagactgattatcattttagtcagagaaacatcaggcttcagctggctgggtggttcatctgaagagcaaatagccatgtataatgctcttgttcaggatggaattaaagttgtcctgcttgagctggagaaaatccaagactatgagaaaatgccagaatcgattaaattcattaagcagaaacatggggctatccgctggtcaggggactttacacagggaccacagtctgcaaagacaaggttctggaagaatgtcaggtaccacatgccagtccagcgacggtcaccttcatctaaacaccagttactgtcaccagccactaaggagaaactgcaaagagaggctcacgtgcctctcgggtagcatggagaagttgccaagagttctttagtgcctcctgtcttatggcgttgcagccaggttatgcctcatgctgacttgcagagttcatggaatgtaactatatcatcctttatccct

SEQ ID NO: 242730 - DNA, 1546 bp, Homo Sapiens
  misc_feature (595)..(603): n is a, c, g, or t
  misc_feature (1261)..(1323): n is a, c, g, or t
catacatgtaaaagatacatatacacataaaaatataaatgtttaacagaaattactttgtacacaatatttgattaaactatgatctgtcttctttcattttcgttttattgtagtaaaatttacataaaatgcataaatcttaaaatctatacatttttacattacatagaaatgtgtaattatatactccatgctccctcccaatcagtgctgcctcaaaacgaactgctcttctaattttagagcttaactcttctcgtctctatcaccacagattagttgtatttttaagcttcatgtaaaattttccatgtcaactttgaaaacatgacagttaaaagttctaaggaatctccagttctccaactggtgtgggaatcagataacttgactccagtgtgaattgtggttactgatggtatcactgagtctgttatgggccacccagtcttaagggccaagaatttatggccctgcagggattgcagaaagaaaccaaaccgaagttcataactcagcctaaaaggagaaagttctattactcagtatctcaagactaagtggatcataaatggtgtcacaagtttgcagnnnnnnnnncctgtggaagataataatcttttgtatgtttaattcgttatcattgccttataaattatcacaagcagcacagataactactggagtcatcagtgcaacttaaaacaacaaaactagcatttctcacttgctgtttttcagacacctcccatcatctgcacctggtccccaaaccagctgtccatgagcaatgacaaagaactaaagcggggatgggggagagggggtgtagggcccaagagctggggagcattatggcttgctgtcagctggcagtctaagatgtacttgggaagatgtttcatacccattttccctgtgaaattaaaaatgtgatgctaccaaacctttgcttgtccaccacccttaaaagaatactcattcagtacaaagccctgcaaaaaggagtgagccaatttgaataaaagcggaaacttcgtaggaattaggagcctgaaaggctgcgtgagagatcgcaaacatattgaggcgttcttgaaacacctgctctctgattacaggtgggaaaaggccattcctatgccttctcccatgggcacggcgaatcaaaggcactttccatatttaatacgactaatacgtcattgggcaaagagatactcaatacatccccatagcttttccttacttttacttnnnnnnnnnnnnnnnnnnnnnnnnnnnnnnnnnnnnnnnnnnnnnnnnnnnnnnnnnnnnnnncaacctaatatttaataagaggctcggatagattaacttttaaaatctggatacagctggttaaggtggcagaagagttggaattcaaataaaagccagtcctatagcagggccattattgctcctgcctcccctagcttgatcacgaaaaatgagtagttctttcctctgggcacacaggacaatgaacaggcgggctgctgccagaatttaccgaagccaa

SEQ ID NO: 242731 - DNA, 1128 bp, Homo Sapiens
actttgtacaaaaaagttggcagggcagacctgtatggttcgtttattcctggggttgtcatatcatggcttataatgacacagacagaaaccagactgagaagctcctaaaaagagtacgagaactggagcaagaggtgcaaagacttaaaaaggaacaggccaaaaataaggaggactcaaacattagagaaaattcatcaggagctggaaaaactaagcgtgcatttgatttcagtgctcatggccgaagacacgtagccctaagaatagcctatatgggctggggataccagggctttgctagtcaggaaaacacaaataataccattgaagagaaactgtttgaagctctaaccaagactcgactagtagaaagcagacagacatccaactatcaccgatgtgggagaacagataaaggagttagtgcctttggacaggtgatctcacttgaccttcgctctcagtttccaaggggcagggattccgaggactttaatgtaaaagaggaggctaatgctgctgctgaagagatccgttatacccacattctcaatcgggtactccctccagacatccgtatattggcctgggcccctgtagaaccaagcttcagtgctaggttcagctgccttgagcggacttaccgctattttttccctcgtgctgatttagatattgtaaccatggattatgcagctcagaagtatgttggcacccatgatttcaggaacttgtgtaaaatggatgtagccaacggtgtgattaattttcagaggactattctatctgctcaagtacagctagtgggccagagcccaggtgaggggagatggcaagaacctttccagttatgtcagtttgaagtgactggccaggcattcctttatcatcaagtccgatgtatgatggctatcctctttctgattggccaaggaatggagaagccagagattattgatgagctgctgaatatagagaaaaatccccaaaagcctcaatatagtatggctgtagaatttcctctagtcttatatgactgtaagtttgaaaatgtcaagtggatctatgaccaggagctcacgagttcaatattacccacctacacaactgtgggctatcatg

SEQ ID NO: 242732 - DNA, 1406 bp, Homo Sapiens
ttggcaccatcttcctgagcaagaaaccccgagaaaaggaggtggattctaagagccaggtcattgaaggcatcagccgcctcatctgctcagccaagcagcagcagactatgctgagagtgtccatcgatggggtcgagtggagtgacatcaagttcttccagctggcagcccagtggcccacccatgtcaagcactttccagtgggactcttcagtggcagcaaggccacctgaggccctgtctcccagccactttccctcctggcactgccaccagcctcaccgcctgcgggcagggggaggccagcaggcccgggcccagcaccccttccctggcaccagggtctgcctctcactcgcccaggtcccgaaggacactgccacagggacgccttccctcccctcccctccagcccacccctgcacagcccctcctccttcccgcttttccccttctccctcctgctccaggcccaaggcgtgttggttttgccttctggtgcccatagtcccctggactgagtcccccaggccttccttcacccgacttccaaactcttccttgtggatcagtttccttctcggaaatgagaaagctggaatcctggtccccagcaggagagcctagtcctcccccagcccctccagccaccagggtgtcctctaggatgcagctgccagatccactcactctgctgcctccagcaggacccaaggccactttcaactcttatggggttctccacctgccccagagcttcccaagggagggtaagggggcaccctgagcccacaggacccctacttcacagctcacaggggcaggaggcagctcccctgcctccaggaccctgttgctatggtgacacagcgtttctaggacagaggggcctcccagtctccccccaccacccgtgcacgacttcctcaccacccccaggttccctgcagatgtcgtgtgtgtcctgagtgtttctttggttctttgcacgccaagtctcttggttgtaccatgtgacacaccctgtgcactggtcgctgtcttcgtggcttccacccttgttaatgatgctcctgcctctgcctcccagcccctcacccagcacagctctgcctggacttggagagatgggaggcagacccccaccaccatacatgctgtctgtggcccctcagacattctgtttcatctcccattcatctccctcctcccaccgtgtcagtttttctgcctttccctgctctgttcttccccctccttaggccccagcctgggcccagacccatcctcccagccaggtttccctccagcaggctccttccctccctgtcacctccctctcaccaacccggggtctgagcccctcattcctgaccgtccgtgttctcagagtggttgaggac

SEQ ID NO: 242733 - DNA, 1576 bp, Homo Sapiens
  misc_feature (71)..(83): n is a, c, g, or t
aaaaaaaatgtgctgaaagaacgaccctaaaagtcatctgtatatctcttaattttaaaattttatccctnnnnnnnnnnnnngattttgaatagaagatattatgaagatttctcaagaagttcctaaatcttaaactttccatgctgtctttaaaaaaaagatcttattccctctggttctgtcttcactagagatggagaacactatggcatagtatttcttactttgaacccttcaataaaagactcaataaagctttattagcaaacttagcaaactatctcaacagctttctcctctccagagtcaaacaatctttattccttgaactttttctcagaagtcttattttctaatctacattttcttcctttttatttctgctctacctcttcctgagttctcacatgattctgatacaacatcctagcaggaactgaatccgtaaaagggatactttttctcacctcctaaaccttggcctcattttagtgatcacaataaaggaaaatggtaggtgcatactcatcataacaacaaataaacacaagtaaacaggtgggacacagtttattccctactgttatggtgttacatttgcccttcacgagaagcatttcccgtgtctctttatattgtttgcttatttctactgtttatttccaatgtatgctttgatcttgccctactaattctctccttttctccaaagctttagaaaattccagttttgactttcatgctcaatgagaatgcaatcattttcacaatattgttcaaaaagaaaaagataaacattgtagtgcccgaggctgagacctcctagccagcacttctgtctctcctgaccagcttgggctatcactgaatttatcctgttaggcaaatgtgcacctactacatcaagttcatgttaagtatcatgctcagacagactcatgacaggctagaataaaataattccctcaatcgatacacttcaggaacatttgtaaaattttgttaacttgagagaagaacacttcaataacttttcaccttaagatgacttaaatgttgcattatattaaagcactcaaataaaactgttttcttcataatagaatgacagtcatgacatggctttagtaactatgaatgagccgttgattcattttagcttcatttttgtttatcagtcactgaaacacagaactaaaccaaatatacctgtttttcatatatacaacattataccactttgcagaatatatgccatttcctaaattacaatctacattcttaaaagcatataaaacaaaagatgttttacacattttaaaaataaaacaaaaattctacacatatcttctccagtgcaaagcctttgaaaacaaactcattgagaaaaatggtgctctacatttagctagctgtctattatctacagtcatacagtcatataagatccaacaataagaaagtaaggaaggaacaaattaacaatagtggcaatacaatagttggacaattaggtttggattatatgagctcaaccaaatgttagctgacagctgcaacaaacgaaacccaa

SEQ ID NO: 242734 - DNA, 1110 bp, Homo Sapiens
  misc_feature (1040)..(1054): n is a, c, g, or t
caaggtatgtaaaatcccaactaaagcccaaaagtgtctaatgtattcattcattagctaactaaaagcccaaaaaagacaagacacccaatataataaagtactgcaaaacaattggcaattttcagttatcaaaattgtggattttgcattttgtatccttttctcaatcaagaaaaaaattctttttgaatgttatataacatacatataaaacaagatagaaaaatacattataaacttgtaacaatggctgtaaatacattatcttacatgtttctcataggcaataggttggttatggtacatacatagcatgaaactaagataataaagaatagacaaaaatacatgtcagctgtacgataacatacaagcgacactcccatctacccacgctaaaaaattacataatactgtcagaaaaaaagtcttaaaaactacatattttaataagaaataaattcaataaagaatgataatactgagaaccaaggcattcagagatttcaaaagtcatgcttttttcagttgatccaaaattttgtcaaccaagttttcaaaagtttgttcagagccaacattccctataaatgtcacacatttattatttcatacatttactttcttccccataaaagacctttgataaacatctaaaatgtccaggtataacatagttgagatgaaactggatcaaatactggtattgtttttaacaactatcacctcaagtgtttgagtgtcgcaaatttattcaaccaaccaaacaatataaaaatcaaaatggcacagcatatattgtaaataaatcaaaactgtatgtgtaacagaaagacaaagcagtggcatattaaaccaaagctagctggatacaaaacaatgaatgtctattgcatagtaaataaactgacaacggtttccaagtgagacaagatggtgggggaggtcaccaagaaggtaatgactcagcttcctgctgacctctgactgtgatgctgggaaggtgtggaagaggggacgagttgataagctgggcnnnnnnnnnnnnnnntccactgtcacttgagatttgccacgtctggtactgagcagttaatgattatccaa

SEQ ID NO: 242735 - DNA, 1069 bp, Homo Sapiens
accgtttattcatcttaatttaaaatacagtggtttttgaacaattcaagtagcattagactattaaaaacatcatgagccacacaagtgtcaactgcattttcagaattatgagaacttagaaaaagtaaaccaaacacctgaagtttagttaaaaacatactaaactactttgtatttgcccttgtgatgagaatcatctttattcattttggaacaaacaggaaatgctgtggtggtaacttgcgggtggtgactgtgatgatatttactgtcttagggatgatgggattcagtggaccagaatcgtcaggaccttactatggtcactgctgtttaattctcttctgtcattcattttccagactccttcatcaatttcatttctatcattgaatgaatgattttgcactgctttagcatctgcctttgatttctgctaattttctttgttcatttttcttgtccatctctggtggctgctttgctattcaactttgaggagtttgtgctgcttcaccctcagctgctccaacagtccatccatttgcctcaagctctctggcagggtctccaggttcttctgtgtctggtgtctgagatttatcagcaggagcttgttttcaatgaccacagctaccgccgtctcctgccagtggggtggtttctacaagagccaaagtgcccatgcccggagacaccttggttataaaccttggtcatggcccagtttggtgcgcaaaaacccaatgtcaaccagagcatttcgcacagatgggtgagctttccttggcacatggggcagttcccccatcatctctatgctgccacctccccttacacaaaggatggtgtaggggcctgaagacaccgtggaagagtccagggagttaggaggggctgggccaggcagcctcaggcccagaggatggcagcaccccctcacacctgagcagacatcagccactgccacctcggggaggacagaggagcccaggctcccccagccagcctcactctaaaccagcagaggaaaaaattattgttattattttttaaagtgagccaa

SEQ ID NO: 242736 - DNA, 944 bp, Homo Sapiens
ttggatcccgagtccgagccgccgccgccatgagctgccccggcccgcctgctgcgcgctgctgctagtcctggggctctgccgggcgcgtccccggaacgcactgctgctcctcgcggatgacggaggctttgagagtggcgcgtacaacaacagcgccatcgccaccccgcacctggacgccttggcccgccgcagcctcctctttcgcaatgccttcacctcggtcagcagctgctctcccagccgcgccagcctcctcactggcctgccccagcatcagaatgggatgtacgggctgcaccaggacgtgcaccacttcaactccttcgacaaggtgcggagcctgccgctgctgctcagccaagctggtgtgcgcacaggcatcatcgggaagaagcacgtggggccggagaccgtgtacccgtttgactttgcgtacacggaggagaatggctccgtcctccaggtggggcggaacatcactagaattaagctgctcgtccggaaattcctgcagactcaggatgaccggcctttcttcctctacgtcgccttccacgacccccaccgctgtgggcactcccagccccagtacggaaccttctgtgagaagtttggcaacggagagagcggcatgggtcgtatcccagactggaccccccaggcctacgacccactggacgtgctggtgccttacttcgtccccaacaccccggcagcccgagccgacctggccgctcagtacaccaccgtcggccgcatggaccaaggagttggactggtgctccaggagctgcgtgacgccggtgtcctgaacgacacactggtgatcttcacgtccgacaacgggatccccttccccagcggcaggaccaacctgtactgaccgggcactgctgaacccttactggtgtcatccccggagcacccaaacgctgggg

SEQ ID NO: 242737 - DNA, 2332 bp, Homo Sapiens
ttgggtgttggctcacttctctctcttgtcccctcctttctcaggctgaggccccagcttgtggccaccacaacgtatcaagctatctccagggttgggctcaggactcagagctgacgcagctggggtgccccttggttctggaggatgaggctcctccgcagacgccacatgcccctgcgcctggccatggtgggctgcgcctttgtgctcttcctcttcctcctgcatagggatgtgagcagcagagaggaggccacagagaagccgtggctgaagtccctggtgagccggaaggatcacgtcctggacctcatgctggaggccatgaacaaccttagagattcaatgcccaagctccaaatcagggctccagaagcccagcagactctgttctccataaaccagtcctgcctccctgggttctataccccagctgaactgaagcccttctgggaacggccaccacaggaccccaatgcccctggggcagatggaaaagcatttcagaagagcaagtggacccccctggagacccaggaaaaggaagaaggctataagaagcactgtttcaatgcctttgccagcgaccggatctccctgcagaggtccctggggccagacacccgaccacctgagtgtgtggaccagaagttccggcgctgccccccactggccaccaccagcgtgatcattgtgttccacaacgaagcctggtccacactgctgcgaacagtgtacagcgtcctacacaccacccctgccatcttgctcaaggagatcatactggtggatgatgccagcacagaggagcacctaaaggagaagctggagcagtacgtgaagcagctgcaggtggtgagggtggtgcggcaggaggagcggaaggggctgatcaccgcccggctgctgggggccagcgtggcacaggcggaggtgctcacgttcctggatgcccactgtgagtgcttccacggctggctggagcccctcctggctcgaatcgctgaggacaagacagtggtggtgagcccagacatcgtcaccatcgaccttaatacttttgagttcgccaagcccgtccagaggggcagagtccatagccgaggcaactttgactggagcctgaccttcggctgggaaacacttcctccacatgagaagcagaggcgcaaggatgaaacctaccccatcaaatccccgacgtttgctggtggcctcttctccatctccaagtcctactttgagcacatcggtacctatgataatcagatggagatctggggaggggagaacgtggaaatgtccttccgggtgtggcagtgtgggggccagctggagatcatcccctgctctgtcgtaggccatgtgttccggaccaagagcccccacaccttccccaagggcactagtgtcattgctcgcaatcaagtgcgcctggcagaggtctggatggacagctacaagaagattttctataggagaaatctgcaggcagcaaagatggcccaagagaaatccttcggtgacatttcggaacgactgcagctgagggaacaactgcactgtcacaacttttcctggtacctgcacaatgtctacccagagatgtttgttcctgacctgacgcccaccttctatggtgccatcaagaacctcggcaccaaccaatgcctggatgtgggtgagaacaaccgcggggggaagcccctcatcatgtactcctgccacggccttggcggcaaccagtactttgagtacacaactcagagggaccttcgccacaacatcgcaaagcagctgtgtctacatgtcagcaagggtgctctgggccttgggagctgtcacttcactggcaagaatagccaggtccccaaggacgaggaatgggaattggcccaggatcagctcatcaggaactcaggatctggtacctgcctgacatcccaggacaaaaagccagccatggccccctgcaatcccagtgacccccatcagttgtggctctttgtctaggacccagatcatccccagagagagcccccacaagctcctcaggaaacaggattgctgatgtctgggaacctgatcaccagcttctctggaggccgtaaagatggatttctaaacccactgggtggcaaggcaggaccttcctaatccttgcaacaacattgggcccattttctttccttcacaccgatggaagagaccattaggacatatatttagcctagcgttttcctgttctagaaatagaggctcccaaagtagggaaggcagctgggggagggttcagggcagcaatgctgagttcaagaaaagtacttca

SEQ ID NO: 242738 - DNA, 527 bp, Homo Sapiens
acttggcacatttaaaaaccatcttttctcttataagaacatctaaaacatatatgcatatgtatgtctgaaaagacaacaaagctttttaaattttatttttaaagagacagtatagtctgttaacttctggtcaagagagtaggaaggaaggagacaccctggatatacctcctgatgtcattcaggagggtgagggaagatgggctaggggtgaagagaaatatactgtctctttaagaaagggacattgaaaactgtacaattaagaaaacaagagtagtgttttcaattgataatctatactcacaacaaatactctgataggtgaatactgctgaacagtttatgtagtgacttttgttgcaggggtgggtttagagttctttttatgtaggtttttaaatgattttattttgaactgaatctccatttgcacagcacagcagacacacaagaactacagcgcattaaaaacagcatgtgtgctggcgggggcctggctttctcattagaaaaaaatccaa

SEQ ID NO: 242739 - DNA, 1512 bp, Homo Sapiens
ttggattcaatgggctgttgggaccagtacaggtcactgcattgtatgtgacacgccttgacaacgtcacagtggcacacatgggcacaatggatgggcgtatcctgcaggtggagctggtcaggtcactaaactacttgctgtatgtgtccaacttctcactgggtgacagtgggcagcccgtgcagcgggatgtcagtcgtcttggggaccacctactctttgcctctggggaccaggttttccaggtacctatccgaggccctggctgccgccacttcctgacctgtgggcgttgcctaagggcatggcatttcatgggctgtggctggtgtgggaacatgtgcggccagcagaaggagtgtcctggctcctggcaacaggaccactgcccacctaagcttactgagttccacccccacagtggacctctaaggggcagtacaaggctgaccctgtgtggctccaacttctaccttcacccttctggtctggtgcctgagggaacccatcaggtcactgtgggccaaagtccctgccggccactgcccaaggacagctcaaaactcaggtacaatctggtccctcccctccctttccctgaagggggaaaccaagcagccccttccccatgagaccctgttctctgcttatcagaggcaaggggggatgggggaagctgcagtggttctgactgctttttgagagtcaaaaaggtctctgtccctttttgagctttcatgtgcccttcctgtctgttcactcatggaccagccaaggttaatctctgccccaccagaaccttccttccatggagggaggcatgggtggagaaatgccattctctggctcagaggagccctgtggcttgtggcaggcatgcatctaggcctgtgtaattcctggctgacctcaggggttcccctggtgccccagaccagtgccccggaaagactttgtagaggagtttgagtgtgaactggagcccttgggcacccaggcagtggggcctaccaacgtcagcctcaccgtgactaacatgccaccgggcaagcacttccgggtagacggcacctccgtgctgagaggcttctctttcatggtgaggctaccttgccctgtctgtgcccttggccagtgcatggtacgggaagggaggggcttggagtggaggacctgcctaagccacctctatgtcctcttaggagccagtgctgatagcagtgcaacccctctttggcccacgggcaggaggcacctgtctcactcttgaaggccagagtctgtctgtaggcaccagccgggctgtgctggtcaatgggactgagtgtctgctagcacgggtcagtgaggggcagcttttatgtgccacaccccctggggccacggtggccagtgtcccccttagcctgcaggtggggggtgcccaggtacctggttcctggaccttccagtacagagaagaccctgtcgtgctaagcatcagccccaactgtggctacatcaactccc

SEQ ID NO: 242740 - DNA, 1255 bp, Homo Sapiens
aaaaggtgctgcatcttccttctgggatctgggggactcaaaggcccagcccatcctctgctcagaatgcttgggggtggtgtcgggagggatgagaggcagcaggcctgggcactgctgcctcatcttcctcttccaagaagagaccagtctgagctggaaggagggcgcccgctcggcctgccagagggcagcctggagtcacctgggcgaggtgctctgtctgggcctggtgtccacagtagaagcccggggtctggggcctgggccggagcaggccgccgtggcaaggggcggaggaggccagccgccaccgagacctcggggcgggtccctacctctgccggacgtccttatctgggccacggggtcagctttgtctggagagcccaggggccgggcgccggcgaggctgaggaaggtccagcaagagcaagagtctgaggcggaggaggcaagcgccagtgcgggagccctgagggcagacagacccgaccaaggggcgtgaagggctcagccgcagacaggcccggcctgacagggccggcgggcagggcagaaggcaggcccgaggctgccacagcccacaggtgctgccatctctcctgggcacggcggtggcctcttggcagctagctggggcggcacaggcgccttggaccttgagtctctgatgagctggccccctccctcaggggcatcaggcccccagtgcaccttggggttcgtgcgccgagtgacctagcgccagagcttctgagcaacggtgccgagcggtgtcaggtctcggcccacagacgccagcggtcgccaggcggccgcagaggggcaggggatgagtcaggccttgggagctgggcctggcgggaagcagggtccatgcacggccgagcaggtggcggctcccaagggaggccagagggcggcgagctggcagagctatggccctgctctcctggcggcagccccacagcgaggcagaggcagaggggtggagggaagctggttacctttccaccatgcggtctcgctgccgctttttctgcttgtcctgactcttcttgcctgcctgcaacttgcgcttggtctggccattttcatcctgggtggttagggcccctgtgggagcagatgggcactgtcaccaatttggctctgccaggacagggcaggccctgcggcctctggctgaatcacccactgtccactccagagggtccatcgagaatagctgtccaagcaaggcctctgccaa

SEQ ID NO: 242741 - DNA, 931 bp, Homo Sapiens
ttgggttgggtggaagagctgcggtccctccagctacaaggtgggcaccatggcggagaagtttgactgccactactgcagggatcccttgcaggggaagaagtatgtgcaaaaggatggccaccactgctgcctgaaatgctttgacaagttctgtgccaacacctgtgtggaatgccgcaagcccatcggtgcggactccaaggaggtgcactataagaaccgcttctggcatgacacctgcttccgctgtgccaagtgccttcaccccttggccaatgagacctttgtggccaaggacaacaagatcctgtgcaacaagtgcaccactcgggaggactcccccaagtgcaaggggtgcttcaaggccattgtggcaggagatcaaaacgtggagtacaaggggaccgtctggcacaaagactgcttcacctgtagtaactgcaagcaagtcatcgggactggaagcttcttccctaaaggggaggacttctactgcgtgacttgccatgagaccaagtttgccaagcattgcgtgaagtgcaacaaggccatcacatctggaggaatcacttaccaggatcagccctggcatgccgattgctttgtgtgtgttacctgctctaagaagctggctgggcagcgtttcaccgctgtggaggaccagtattactgcgtggattgctacaagaactttgtggccaagaagtgtgctggatgcaagaaccccatcactgggtttggtaaaggctccagtgtggtggcctatgaaggacaatcctggcacgactactgcttccactgcaaaaaatgctccgtgaatctggccaacaagcgctttgttttccaccaggagcaagtgtattgtcccgactgtgccaaaaagctgtaaactgacagggctcctgtcctgtaaaatggcatttgaatc

SEQ ID NO: 242742 - DNA, 957 bp, Homo Sapiens
  misc_feature (532)..(567): n is a, c, g, or t
aatgtaaggcttaaaactcagaaattactataaaaatatagattgaaagcccataacattgatctaggctgtgacttttattatttaacctcaaaatccaaggaaatcaaaagaaaaatagatacgttacattacttgaaattaaaaagctgcttcatggaatctgatacaatcaacaaaatgagacaactgaaaaaaatgggagaaaatatttgcaaatcatacgtgggacaaagggttaataacagaaacatataaacaacttaaatgactatacaacagaagacaaataactattaaaaatgagcaaaaggcttaaatatttttcaagaaaagacaaatggtcaagatatataaaaaatgctcaatatcaactataatcaggaaagcaaaaagaaaaaccaggagattatcaactcactcctgttagaattactcttattaaaaagaaaagaaagtgttagtcaaagtatgaagaaaaggaatgcttgcacactgttggtttgaatgtgaatgaggagagtcactatgnnnnnnnnnnnnnnnnnnnnnnnnnnnnnnnnnnnncacaatacagcaattttactgttatatatccaaaacaagtgaaatcagaatgaagaaacatttatgcttctatgttgtttgcaacactcttcacaattaccaaaatatacaatcaacagttcaacatttatgagtaaataaagacaatgtggtacatatacacaatggaatactcttcgtctttaaaaaagaaatttctattattttcaatcacatgaattaacctggaggacatcatatttgtctacatgagccagacacaaagattatttttcatgattttacttacacagggattctaagaaacttaatcccattaaagtagagagtaaagtggtgaccaccagacaccaaggtatttagcaaaaaggggggttttggaagatccaa

SEQ ID NO: 242743 - DNA, 1837 bp, Homo Sapiens
  misc_feature (1355)..(1419): n is a, c, g, or t
tggcttcaagagctagaaataagtgttagggagtggttcttacctacctgcctgacactctccattccttggaggaagcagtatcaaatatttgagtttattcaaaaagtccatcccgtggattgctccatcttggtagtcatatataaatatgtaaaccatggaagtttagaaaattcacctagagtgttttagccgaaaagaacagataagtgattttgctgcaatctgaatttcactgcatctaaagatacacatagaattgtataataaaaacacatccagatgcagttactcttacttacaagtagccagaacctcaatgtggcattaaaatttctttcatactctcaaaacaggttttactttatttttgattatttttgtgctttcttcaataagacaatataaaaagtggaaacaagcataaattgcagacataaaataatcttctggtagaaacagttgtggagaacaggttgagtagagcaacaacaacaaaagcttatgcagtcaccttctttgaaaatgttaaatacaagtcctattctctttgtccagctgggtttagctagaggtagccaattacttctcttaaggtccatggcattgccaggattctataaaagccaagttaactgaagtaaatatctggggcccatcgcacccccactaagtactttgtcaccatgttgtatcttagaagtcatttttcactgtttgactcagaatttgggacttcagagtcaaacttcattgcttactccaaacccagtttaattccccacttttttaagtaggcttagctttgagtgatttttggctataaccgaaatgtaaatccaccttcaaacaacaaagtttgacaagactgaaatgttactgaaaacaatggtgccatatgctccaaagacatttccccaagataactgccaaagagtttttgaggaggacaatgatcatttattatgtaggagccttgatatctctgcaaaatagaattaatacagctcaaatggagtagtaaccaagcttttctgcccaggaagtaacaaacatcactacgaacatgagagtacaagaggaaactttcataatgcattttttcattcatacattcattcaataaacattagccaagctaatgttccaagcactgtgccaggtattaacaatataacaacaataaaagacacagtccttcctctcaaggtgttcagtctagtagggaagatgattattcattaaaatttttggtgcatcagaatcatgaggagcttgtcaaaaatgtaaattcctgcctatgttctcagatattctggttaggtcaggagtgggaacccaaaatcaattcnnnnnnnnnnnnnnnnnnnnnnnnnnnnnnnnnnnnnnnnnnnnnnnnnnnnnnnnnnnnnnnnnctatacaatgtgattattgctgagagagggggatgcttggggtgtctttggatctctaaagagggatgcatcatcaagtctaaggaataaagagttagtctggttgagagagatagaggtgaggaaaggtagtccaggatagagtcaaaagtagggtggggaaattagatctttgtcccagggcactaaaatctaaaagacaccacaataaatgaacagttttggagagccaaggacaaggcaaaggaaattgttctactggaatggaggttgcattttctgtacttacagcattttcacactattcctttaatttaagaaaaatttctgttgtttactctgggcattaaaattgttaatcatgtttctgctgcaggcccagagaataacttgtgtgaatagttgtgtaaatagccaa

SEQ ID NO: 242744 - DNA, 1599 bp, Homo Sapiens
tttcttttctaatataatgactaagtgtacatggacaactgaaaacaggaaaaacccccaaattatgttttcacaaattacaagcccattactaaagaccatatgcctggattaaaaaaaatagtccaatagatgaagtctctcattcaacgtagcagttcaacccaatttctcttttaataaaagctgcacattacagtggtataaatttatcttttaaacactccacataaaaacatgtgcaccctctccttctacatttaatcattagtagtctctaaaatggtaaaataaaactgaatttatattagcaaatgaaagtgcaagtttgtacagctaggctcagcagcaaaagtgaagaataagaatgaaaggtgaaaagctgacagatgccacgcagagcaaggacttccatgaaggtccgtgtcctgtgtgccaaacacagtcaacattccatcattttctcattgctcttaaacgagcaaaaccaaattctttttctatttaaagaaatattaaatctttattttccccaacataatttgtgatcaggtaaggcaaagataagtccaccatcactggggacagcagcaacatacagacttcagaaatagccctgaatcatcagtaacattctatcgtggtaacatcagaaggaatgcagctaacaaattaaatttgtaatgttgtcacattattctaatttatttgattagtttatctggaaaaactttataaatacattatgtaagagggcagtaaattattttcttgctttgaaaaaataatgttttttcacattttaaaacattttagtctgcttttgcaaaaggagttgcaagaaaaatgtgacagctgggtttgcagaatgtccatgtacaagctgtatttataagaacctggtaatctgcctataatttgcttctacaaatagagctctttgcaataatattttaaaaaaacaggcttaaactcttctcctattcattctacttgtagaacaaagaggtacttatttttcaagtattataaaaggtaaaaaaattttttttgccaattttacatgttaagcttttaagaccaaaaaaatcatgcctagtcagcccatttcttttataaccaaattctcttgtcttttaaagaatgcagaaaaatattgattgctaagaaggagcacactggaaaaagccattttaaagtattgaagaatgagacgtatttcttttttcctattgatgaaaattattagaaaagctatccagtctgttgtctttagctagttttaataaatcttttcaaaatgatggtcaagaactctagaaaacgggtggaggggatgctcctttatagcaggaaaggaattccattaattgtagaaattctcattaaatttcagctttggttcttcagaagaaacactcatataacttctacatgaagagacagaaaaagaacaagattaatatgacatttatctaaaatcttatttcaagaataccatagtaataccttaaatttctaaaacttactatactgttatatacacttatataagaataggcaattctgttaggattcacagtcttatatttaagccaa

SEQ ID NO: 242745 - DNA, 1726 bp, Homo Sapiens
  misc_feature (311)..(331): n is a, c, g, or t
ttggctcaaagctctgtgtattgtgccttgtggtgagataataaattatggccatgggaaacattgtatatttagtgtgtgtattttgataatgattgatcttaaatctgtatacagaatatcattgatataatactctttaggcaggagcactcttgccttcccccaaaatttacactgctaaagccctctgtcacttggcgacccttctggtcttgctggaggggtttcctgggtataacccattgggctgcccaaggccagccagcctgagctctcctgcaagacagagcctgatgtggcacggagtnnnnnnnnnnnnnnnnnnnnnactgcctgactcccagagggacttgaaactgaagcaagaaggttgcattctccaccaagggagttaacctacctgaactaagtagaaatgccagtcttccactaccccctccctgccatcttttcttctgctactttggggagttgatggccaggaaagaagccagcacagggttaaagtaactcctggcattgcccaccagggggctggtgcacctgctgacctcagggtcacagttgagtcatttgccagttgacggagcaagtttgaccttggttctgttgctgaagcaaatttggaacttttctgtctcagtgtgatccactaacccacaggatcatttggaaccttgaatagctctgcttggacaatggggttggggaatagggttgtctttcctatgaaaatgccatctgtagaccttgtgagtcagccgtccagatgtttgcaggtgaatcctctgcttgacatcctccctgtcactttggaccctatgggagtgggcatctccacgcacctgtgtatgtgaaagtcattttacatttcaaagcagtgtgtgtttcttatttttatatttttaactctttattcttggatgtataaagtgaactttttggcttctgtaagtatgctctatgcacctctaatgttttatcatgtatttatatgttgtacacagtactggctgattctgtaaatggatgtattgtacagagaacatgaacgtctcttcctaattttacatcttcagcatcattgcattaaagtggtgtaatctccttctctacatctgttgtcagagccactgagtgctgtgctgctcgacgtgagggtgaaatgattgacttgtgacctgccaggttgcccgatgccctgttgggtcaccggctggacctgctgcagcctgcagagccacagtcagcctgcccacatgccaccgagcaaacgcatcttgcttttcacatctctcctcctacagccttaatggctgcttgctgccatatgtgacaaatcaccaccaccagtgttaagtgcttctggattcatgggtgagttccctgggcagcccccaggaaggccttccagatctggctccagggtcaccacctgtcacagcaatacctgggaccatgctctcctgggactgtgaggctccttttgacgtacttttgacatcaggcagtttgggaagaaacaaagccatgcctgctcctgcctctctcccaacatgtttccagcaagtagatgcccctgtgtgtgttttcccttgccttgtttcctgccttatatcttgtatttcgacttattacagagttgagggttcttgcttaatttagatcaagtataaaatttgtatgacttcaagtctcattttatctgaaaggtttttttctc

SEQ ID NO: 242746 - DNA, 1015 bp, Homo Sapiens
ttggggtagatatttaagaaatacttgctgaatggaatcaacatttcatttattattctttggccgtacctgatagtagataatttagtatgtaagggaaataaatcaagcaaaggcacttttgagaggaatagaaaataaaagctttctcaacccaaatattttgggagtgtggaatcgtctctcaaagaaacatgcttttctacccccagccttcagagccaggcccaaacagtggcatttaaggaatgggcttaaatggggagtgctgaactagttcatgtttcctcattgggatttttgtcaactaaatcagtttgctcatttgcgttaggacgattgcctcaggttttgaattttgaggtttctatcctctttctttacattggacttaaagtcagtagaggcagctgacttcttaatggtgagcttcttaatgtttctaagattcctgagtatgctattcatgcaaaaacattttaagctacatcaaaattgccttttactatccctgttctttgattgtttttattaaaactcctattatctgtaatttctctggttttgtgcctccagtttctggattcttaagtcattgaatgtgaatggaagtgcatgtgagttgacttatactgaaaaccagattaaaattacctagaataaaagtttattaaagtatgtaattcctaaaatgcttattgaagaccttaaatctgattgttatttaaatttgtggttcagcgatattgtgttaaccactgatttcagagtagaaaaaatgcttattatttttaactttttaaagaaatggggaatgttttgtaacagtactcaaatagcacagaatatttttcaacattaaaaacatttgattgaatcctaatttagacaagccataacttgggaggatggtaaaccatcctctgaaagatttaactctttattggtttggaagtagtaaagtataccttaaatgcctaggattagagaaataattttattcattgactcttta

SEQ ID NO: 242747 - DNA, 837 bp, Homo Sapiens
ttggcctacatctgctccaaccagataatgggctggggtgagaaagccattgagatccgctctgtggagacgggccacctcgacggggtcttcatgcacaaacgagctcagaggctcaagttcctgtgtgagcggaatgacaaggtgttttttgcctcagtccgctctgggggcagcagccaagtttacttcatgactctgaaccgtaactgcatcatgaactggtgacggggccctgggctggggctgtcccacactggacccagctctccccctgcagccaggcttcccgggccgcccctctttcccctccctgggcttttgcttttactggtttgatttcactggagcctgctgggaacgtgacctctgacccctgatgctttcgtgatcacgtgaccatcctcttccccaacatgtcctcttcccaaaactgtgcctgtccccagcttctggggagggacacagcttccccttcccaggaattgagtgggcctagcccctccccccttttctccatttgagaggagagtgcttggggcttgaaccccttaccccactgctgctgactgggcagggccctggacccctttatttgcacgtcaggggagccggctccccccttgaatgtaccagaccctggggggggtcactgggccctagatttttggggggtcaccagccactccaggggcagggaccatttcttcattttctgaaagcactttaatgattccccttcccccaaactccagggaatggaggggggaccccgccagccaaaacattccccccattcccgacccccatctcctcttctaacccatgaccttcccc

SEQ ID NO: 242748 - DNA, 1075 bp, Homo Sapiens
ttggaaaagatccaaaattagagctcatcagaattgtcattgaaagtgttaacaaaagtaatatcaaatgacatttgaaaaatatccttgtaaaatgactatattaataggtataaggatttttcttattaatctaataaaattccttaataggaatttccatagcttaagagtggtttattttatctgcatcttctttggtgattgcaaatcccttgtgatacttcatgattacttctgtctgtgaataaagaagtgtgacttgtctgggtgctatatgttgctggtttgaaattaagtcatgaagctagagggtagagaaaatggaagaataaagagcaacccataaatagataaatgctatttggaaagttttttttaaatgatattttatagaaaatcttgctcatttcatatttagtcttttctaaaattttatttaattattgggtaggtgaagtcgcttccattctattttaagccttcaaaatagccaattctaagggatgtacttctgttattatcaacaaaaaccttgccaacagctgcggcactggctactctcaccttatatgtttagttcccaagatagcttgcccttttccgaacagcagtcagctcgactgtgccactaaaacagacaaatatttgctcgggaatcacaaccacggggacttgctcccccagttaggaccatggtacatatttgtgtgtatattatggtgttacatgcagattaatactttcaattaatcctcctagttgcctgtaacgttaacatttcaagatgcatttagatatttttatcctgtaggaggattttgtttatttgaggaaaaaaagggcttttaatgtattctcctcaaaaaccatttagagaaaacagataagtaaaaataaaatttaaattaccatatttctatttacagggatgagcacattaacattttatgtatttagtgatcctttttcctcatgtgtacacatatgtttttgtgtgttagtcttgcttgccctccccatagtctgaaatagttctatgaagtttatattatttttaaacttgatcatatac

SEQ ID NO: 242749 - DNA, 946 bp, Homo Sapiens
  misc_feature (669)..(752): n is a, c, g, or t
ttggattgcgttagagataaaccagttcacgccggagccccgtgagggaagcgtctccgttgggtccggccgctctgcgggactctgaggaaaagctcgcaccaggtggacgcggatctgtcaacatgggtaaaggagaccccaacaagccgcggggcaaaatgtcctcgtacgccttcttcgtgcagacctgccgggaagagcacaagaagaaacacccggactcttccgtcaatttcgcggaattctccaagaagtgttcggagagatggaagaccatgtctgcaaaggagaagtcgaagtttgaagatatggcaaaaagtgacaaagctcgctatgacagggagatgaaaaattacgttcctcccaaaggtgataagaaggggaagaaaaaggaccccaatgctcctaaaaggccaccatctgccttcttcctgttttgctctgaacatcgcccaaagatcaaaagtgaacaccctggcctatccattggggatactgcaaagaaattgggtgaaatgtggtctgagcagtcagccaaagataaacaaccatatgaacagaaagcagctaagctaaaggagaaatatgaaaaggatattgctgcatatcgtgccaagggcaaaagtgaagcaggaaagaagggccctggcaggccaacaggctcannnnnnnnnnnnnnnnnnnnnnnnnnnnnnnnnnnnnnnnnnnnnnnnnnnnnnnnnnnnnnnnnnnnnnnnnnnnnnnnnnnntaaatggctatcctttaatgatgcgtgtggaatgtgtgtgtgtgctcacgcaattattttgctaagaatgtgaattcaagtgcagctcatactagcttcagtataaaaactgtacagatttttgtatagctggataagattctctgtagagaaaatacttttaaaaaatgcaaggttgtagctttttgatgggc

SEQ ID NO: 242750 - DNA, 1404 bp, Homo Sapiens
  misc_feature (282)..(359): n is a, c, g, or t
tgtgctaccatacacaagaaattaaaaaaaccattaaatatttaggaacattcaacatcagaagcggtaaaatgtaactgtatgagtagcccatcaaaaagctacaacctgcattttttaaaagtattttctctacagagaatcttatcagctatacaaaaatctgtacagtttttatactgaagctagtattgagctgcacttgaattcacattcttagcaaaataattgcctgagcacacacacacattccacacgcatcattaaaggatagccatttannnnnnnnnnnnnnnnnnnnnnnnnnnnnnnnnnnnnnnnnnnnnnnnnnnnnnnnnnnnnnnnnnnnnnnnnnnnnncttctttgagcctgttggcctgccagggcccttctttcctgcttcacttttgcccttggcacgatatgcagcaatatccttttcatatttctcctttagcttagctgctttctgttcatatggttgtttatctttggctgactgctcagaccacatttcacccaatttctttgcagtatccccaatggataggccagggtgttcacttttgatctttgggcgatgttcagagcaaaacaggaagaaggcagatctgaaaggaagcaacagagtttaataaactgaaggaaaaatccaaggagcaatttgggttattttaaacttacggtggccttttaggagcattggggtcctttttcttccccttcttatcacctttgggaggaacgtaatttttcatctccctgtcatagcgagctttgtcactttttgccatatcttcaaacttcgacttctcctttgcagacatggtctgtggacataaaataagagccaaaaatacagcaaaattgttacctataaacatccaaagacgacaagatcatctttaaggaccacattttccttaacagcattttgctttcgaagtcttatataagtaaaaacctaaaatcgtctgcctggaactcttaagatattcaggtgagtcactggggtggcaaagttgaagctcatgagttgcctactacctgcctaaggccctcctagccgaaaaccacacctgcaccccctgagctccgtccctctcctgcctcaccttccatctctccgaacacttcttggagaattccgcgaaattgacggaagagtccgggtgtttcttcttgtgctcttcccggcaggtctgcacgaagaaggcgtacgaggacattttgccccgcggcttgttggggtctcctttacccatgttgacagatccgcgtccacctggtgcgagcttttcctcagagtcccgcagagcggccggacccaacggagacgcttccctcacggggctccggcgtgaactggtttatctctaacgcaatcctcagcctcttgccaa

SEQ ID NO: 242751 - DNA, 1494 bp, Homo Sapiens
  misc_feature (1207)..(1237): n is a, c, g, or t
ttgggcagtgtgtcccgctctggggaccaggtgctaaacctgcccctgggatctgctttgagagagtcaattctgcaggtgatccttatggcaactgtggcaaagtctcgaagagttcctttgccaaatgcgagatgagagatgctaaatgtggaaaaatccagtgtcaaggaggtgccagccggccagtcattggtaccaatgccgtttccatagaaacaaacatccccctgcagcaaggaggccggattctgtgccgggggacccacgtgtacttgggcgatgacatgccggacccagggcttgtgcttgcaggcacaaagtgtgcagatggaaaaatctgcctgaatcgtcaatgtcaaaatattagtgtctttggggttcacgagtgtgcaatgcagtgccacggcagaggggtgtgcaacaacaggaagaactgccactgcgaggcccactgggcacctcccttctgtgacaagtttggctttggaggaagcacagacagcggccccatccggcaagcagataaccaaggtttaaccataggaattctggtgaccatcctgtgtcttcttgctgccggatttgtggtttatctcaaaaggaagaccttgatacgactgctgtttacaaataagaagaccaccattgaaaaactaaggtgtgtgcgcccttcccggccaccccgtggcttccaaccctgtcaggctcacctcggccaccttggaaaaggcctgatgaggaagccgccagattcctacccaccgaaggacaatcccaggagattgctgcagtgtcagaatgttgacatcagcagacccctcaacggcctgaatgtccctcagccccagtcaactcagcgagtgcttcctcccctccaccgggctccacgtgcacctagcgtccctgccagacccctgccagccaagcctgcacttaggcaggcccaggggacctgtaagccaaacccccctcagaagcctctgcctgcagatcctctggccagaacaactcggctcactcatgccttggccaggaccccaggacaatgggagactgggctccgcctggcacccctcagacctgctccacaatatccacaccaagtgcccagatccacccacaccgcctatattaagtgagaagccgacaccttttttcaacagtgaagacagaagtttgcactatctttcagctccagttggannnnnnnnnnnnnnnnnnnnnnnnnnnnnnnaatgtttaaaacatcattactataagaactttgagctactgccgtcagtgctgtgctgtgctatggtgctctgtctacttgctcaggtacttgtaaattattaatttatgcagaatgttgattacagtgcagtgcgctgtagtaacatttttaccatcactgagttttccatggcacgaagcttgttgtgcttttagtattttagtgaacttgaaatatcctgcttgatgggattctggacaggatgtgtttgcttt

SEQ ID NO: 242752 - DNA, 905 bp, Homo Sapiens
ttggagccggacagagcagaagaaccctcttggactggacgatttgggaattcaaaacttgggacaaactgtcagccttgcccctgctgtggaggcagcctcaatgctgaaaatggagcctctgaacagcacgcaccccggcaccgccgcctccagcagccccctggagtcccgtgcggccggcggcggcagcggcaatggcaacgagtacttctacattctggttgtcatgtccttctacggcattttcttgatcggaatcatgctgggctacatgaaatccaagaggcgggagaagaagtccagcctcctgctgctgtacaaagacgaggagcggctctggggggaggccatgaagccgctgcccgtggtgtcgggcctgaggtcggtgcaggtgcccctgatgctgaacatgctgcaggagagcgtggcgcccgcgctgtcctgcaccctctgttccatggaaggggacagcgtgagctccgagtcctcctccccggacgtgcacctcaccattcaggaggagggggcagacgaggagctggaggagacctcggagacgcccctcaacgagagcagcgaagggtcctcggagaacatccatcagaattcctagcacccccgggacccctgcgggtggctccatcagccagcaaccttagagagaggaaagacagttttcaagtgtctggtttcactttcacagtgcggctgccactttgaagagacccttggtaaacccctgattcggggtggggtgggggactaggctcagcccggaaccagcacctccaaggagtccgggaggtgcctgtggtttgcacccaccactgaaaaagccgcggagatgcgcagcgcgtacactgactttggggcctgggtgttggggttctgatcagaatttg

SEQ ID NO: 242753 - DNA, 941 bp, Homo Sapiens
taaacagctaaaaaattactactatttccttttatttgtgttgtgaattttactcagaattaaagataaatgattagtaattacaggaaaactaacttgtaaaaatcttaaagacattgaatgggttaatgtactgagcagctacggaatgcaaggcactgtaggagtagggtgagtatactccccacaagggctcagggtcaggcaggggaggtgagataaaaacccacagccatacactagctggcctgtcctgagggttgtgaggcacaaaatgctaggagactagagaagtaagaaatgtcttgacatgaggagaaatcaaggaaagcatggttttagaacatgtgtgggatgttttttgtatcgagactgaagaggctttttaaagtggagggaaggcaaactgaggcatagagatgccaataccaggtcttgtcaggaagaacagagtccaatttggctgcaggatagggcatatgtaggggaggggataagactggcatgggggcagagggggacttgaatgtcaggtgacagagtcaaagcttgcactcaagtaggtgattgataggtgatcttgggggcttttgagcaggaagagtgataaatcaacattggcttaggacaatccctttggctttggcgaaattgtgactcaggtaagggacagttgggggagacaaggatgggaagatgcatgataaatgggccctgagcttggcaggcaacaggaaggcagtgcaatgttttgtagaaatagacttagcagagcaggcgcccagcattcagcgagaccacagattcttagccactgtatgacttgaaggtgatactaactcccctgaacctgtctcatctacaaaatgggcatagtagcacctatgtcatagggttgctttatggcaggtaattattcttgtaaagcatttagcacccaa

SEQ ID NO: 242754 - DNA, 1032 bp, Homo Sapiens
  misc_feature (514)..(529): n is a, c, g, or t
atgagccatgacattttgcccatttctgtttttaaaattaagtctctgattgagctcttgtgatgtatattaaataaatacattttgtttatttttgtaaaaagaaattgtaaattaaaatttatttagaatagaaaaggaaagagcattatggtatattttctaattttagtggctaaaaccaatttcaatagtagaatatactcttaagaatgtatacttagaaaagaatgtattacttagaaaatgctatgattgatcaaaacttaaaagaaaaataacttgaaatggttattttatatctgtatttaatgatgaagtaattggtatacttaaacttctaatatgaagccagagaactacaaagcaagatgaacttatggttaaatatgcaacttgctttgtctgaaattacccaagtactatacaggtgctaatgaattctccaacttgagaagacatgtagtgaaaattgcatcactctttggtcctgtgtgctgctgtaagcagtgannnnnnnnnnnnnnnngcctacctatagtttttttctttaagttactgccttgtgccaaattaagagatatgaatttgcaaatagcttcattttatgtgccagcagtaattagactcacaaggaaaagtaacctcagctacatttacaaaagttagtattttatatttcattcactggatacatgtgtcactataacttattgaaaattttctgtgacatattttagagatttccttcgtctgagagtgtcgtgatcagtgtctttaatgccagagaagtcataattggctggaaacatggctggaggtcacattttctaagtaggaacatgctattacttctggcctggaaagtagtggcaaacttttatatatctccctaccccactttccccgctcagtattagagtagtcgtattaagagtttgaatttcaaaatgagaaagacctgagttaaaatcccagttcaaccatgtactaattgtaagatcttaggtaagttattgggcttctgagtgt

SEQ ID NO: 242755 - DNA, 1154 bp, Homo Sapiens
  misc_feature (503)..(564): n is a, c, g, or t
  misc_feature (981)..(990): n is a, c, g, or t
ttggtgctggctctacctagcacacgcacagtggcactaggacctgcgtgcctggccctcagtgggtagggcggtgctgcctaggcacacagcagcgcttacgggccccaggtgcctactaggctgccttcctcttccccgctgtcagtctgtgtcctccacgtgcttatttcctgtggtgagagcagttgtggtgtttgtataccttgtgccttatgatcaaggtgggccttggaggagggcgggaaaggagcgaccaacatggcggtcctccacccctcagcgacacccaccgcccgagaaactacagacaatggccacaagtttggcgtccttcaatttaattctttaaagaagtgctgggaagaaaaagctatgtggtttctaccattttagcaggataaagaggataactccttccattagcaaattttacagttgttaacagtactctgccatatttgaaaaataatgccagagtcagtccttgaaaacaaggtagnnnnnnnnnnnnnnnnnnnnnnnnnnnnnnnnnnnnnnnnnnnnnnnnnnnnnnnnnnnnnntgattagaaattgagaactattttacgtgtttctaagttgttggctacatcaaagagatcatctgtattctgcatatgggctggctttggtgaagctgatgactggacttctaagaaccgttttcccaaatgggttcccatattcatgcacccaaagcaatggtccccaagcactgatgaaaactaatatgcatttcccaaagacccacactatgtatcaggagcctgcaccatgccatttgaatgaccctcagcaatgtgcctccctgccctcaaattcccagttgataacagtgtttgattaaatttccactcaagccaaacatggttactaagaagagaaaaacctgatgtttgcataatattttttttcccctcgagatggagcctgggcaacaagagcgaaattccatctcnnnnnnnnnnggtgggtaaagggccatgagcccaaaccactaggttgttcaccttttcatctgaaaatgctttactctgactatgtgctattgggttttatttccagaaatatagttctccttttttctgcatgaaagatacatcgtggtgccacatgctttaagcaatttaaa

SEQ ID NO: 242756 - DNA, 608 bp, Homo Sapiens
ttggcacagaagcagttcaacttctcaagttaattttgataagcagaatctactactggccagagcgacaggagtggctaggggttgccagccagtccctttctgatgatcaaggccctgcacagcaggatgccacaggatgcccctgccatctagctggaagcatcaaaagtccctctgtatgacccggtgtgggaaagagggttgtcaggatgagaaagtggggctgcagggtgacgataagaccacctaaccaactccccacctccaccaccacaataagaacaaaactgtagggctctaaagagagggggtggtttacaagtttattgagcatttactaggaagtgacatggcgatgacctctgtacatgagttaggttcactttcatgtggcctcccactacagagatgcgtatgcccagaagtcagctctctgaggagacaggctactttggccccagtttgaagcattctgtccaaatgtcctgagctctccagcagtcaagtagtgaatggataccatacttattatggttgatgaaaaaaggcagagcttatcctcaattttttttagggaagagaaggaataaaataaaagtggttca

SEQ ID NO: 242757 - DNA, 1194 bp, Homo Sapiens
taacatctttctggtgaccatggaaagaaccatagtgtggaaacccttgactcaaaggtttactttggttaagtgatggggtcctgtaacatctttctggcgaccacagaagtgactatagtgtggaaaccccagacccaaagagtaactttgggtaagtggtagggtctggtaacgtctttctggtgaatcatggaagggacgatactgaggagacccctcaacccaaaagaagtagactgcaccactggttggctgactttgaataagtggtggggtacctgggtaaaggatgggattgggttagaggcccaacgtaggggagttagagtctgtcctaagacacagtgggttagaggcccctcttaaggaaaggtaaggacgcttgctcaaccttgggttagagccaaactcaggagggttagagtcccttctcagatttagggggttagaggcccctctcagtaaggtccctctcagtaaagtcgcttctggctaagagcaggtttggcactatgggatgttaactgctattctcttgggattaatctgccttgcactctttgctgatggctgtgagtgacagaattagccacgtacaggattgtaggacttggggagttttttcctccttaaacggggaaacttgggagctgacgggactgctggaaaagatcccttcatgactgacaagcagccacctaaacttttcagtgttgctgcaatggatgggtctttctctgacctccctgagcgcctcgccttccccatcctgcctcaggcaatgcttttctctctctgtgcaaactggttgaataaattgtaaaaaataattgtttatctcctgtaaagttttgattaatggaataaaggatttgtgaggctagtcttaagctgtagccaaccaggtctggtgtgctttctgtgtctttctgtattgctctgtcataaagaggagtaccttaggatagagcacggacttaggacacctttaagcctgcttttcaagacagctcagcaaactggtcaattacaaactttgctgcaggtccctcaaaaaactggatgaggtttccttcttgtcttctatgttcttgggagcttgaccttgtaaccatgtggccatgctttctcttttcacaatggtggcccaggttcagggttcaattcctggcttggaaaataagttcccaa

SEQ ID NO: 242758 - DNA, 1532 bp, Homo Sapiens
  misc_feature (1389)..(1452): n is a, c, g, or t
tagttttatgtctggtgaattaaaaaaggaggaggaggagaggacaaataagaaaaatgaaagaggaggaggggaacagaagtaaggaagaatatggcaaaacatttactctcttaaaatttctaccataagtgaattttagcactatcattcatagttcattggtcaaaattagatatgtggccaggtctttttcacaaggacagagtagaatgatgctcaggaattggaaatgaatatagtgaacataacaaagtctacctaccacaaataaatgttcatccataggcaactttaattaattatgctaaatctgtataaagcagtatcaaaaagctatttaagaaaaagaatgaagatagactgggatattaataaagatctacaagtctaatgtcatttgaaataaattaagagcagtatgtataatatggttcattttgtgaaataaaaggatggggggagaaaaatacacattcttatactcttataaagtcataaaaaagtgtgtaagaataaatcagaaactaaaaagactagtaatgtatgtgcacagggaattgattaaatgaaggataagaagacaatgcagactgttcatgagatgatagttttgatttttgcattttgagccacataaacgtatttgctactcaaaagttctatttaaaatagtaagctacattttgaagaaaaagaacgtttgctttgcatttataactataactatctactagtgagtgtattcctgacagccacatcacagagaatgtcaattcatttagaacaccaggtgttggtgaaaagaaattgttgaatttatttctcactctaccgttttgtttgtttgtttcttcattatgatattcaggtaactctttaaggtaacaagagtttcagagcattctctatatcattgcatagtattttaagtattttaatattcaaggtcttgttcctataacactaatcacaattaatgatattaatgtagtattttgtgtactttgtttttgttttaaaaatgttcctctgaattatgtagggaataaacttcagatatatagctataactaaaaacttacactagaattcttttaaaattccagacaaaatagctccaatgttgattataacatttgcaaatttttaccttaaaatattttatataaaggaaacatttatggtcagtaacatttcttttctagtacatctttaacataccatgaaaaacataatttattataaaagtcactaataatacaaagtacgtgtcacacaataatatgagactgaatttgaaaatctagctgtatttttcagccatggtctagcaacactcccaaactgagtatattgctttactatattgttttaaattaatttcannnnnnnnnnnnnnnnnnnnnnnnnnnnnnnnnnnnnnnnnnnnnnnnnnnnnnnnnnnnnnnnatatccatattccaaattctatttctgtcatttcagccatctcaggccagtaaacaacccttgctggagaagagtggtca

SEQ ID NO: 242759 - DNA, 915 bp, Homo Sapiens
tactcccacttttaaatatatacccaaaagaatttaaacagagactcaaacagatattcacatacccatactagcagcagcattactcacaatagccaaaaggtgaaagcaacccatgtgtccactgatagatgaacagctcaacaatatgtgttacatatgtacaacggaatattattcagcctaaaaaaggaaattcacacatgcaacaacagggatgaaccttaaagatattatgctaagtgaaataagccagtcacagaaggacaaatattgtatgattccacttatttgagctgcctggagtagtcaaattcttagagacaaatagaatggaggctgcagaagagagttaatatttaatggatacagagttccagtttgggaagatgaaaaatgttctggaagtggatggtgatgatggtcatacaataacgtgactgtacttaatgccactgaactgtacactaaaaaatggttaacacagtaaattttatattatgtatattttaccacaatttaaaaaatcactacttccagcttgataaagtagagcaaatacaggaataggaattctaagatgtgggttcttcattctgccaccaggtagcctcaaaattctgagcaagttccttagcctttcaaagtgttattccgctcacagatttgtaacaaagatcaaatgagaatgtatgaaaccatgctctgaaggaaccaaagctgcatatatgaacataaggtactattatgattagccgcaaacctgtaaacaggtgccacagaactatgcggggagaagcgccaaagaacattaagtaattccctcacctcctgtacaagtggttgctggaacaacggaatgagaggattcgtccttggaatgtcaatgtgaatctgaaaaagagaaggctccaa

SEQ ID NO: 242760 - DNA, 486 bp, Homo Sapiens
ttggacaaagggaaagtcaatattagcaataattgcctgattgacagcacgccagagggaatgaaatgaggccttctctcctacctcccaggagtatgtaactcagatccttagcataaagatccccaggaataccactgctctaacccggtgaacattttttctaatgcagggttaggcttacgtctgaattccacaagacatcctccccctccagtacggaagttccaaggcacttgttttccagcatatcagcctaacctcagtgccttgaaatatggctttaagcctttgagaactgagatttcctgaaaccataggcccttgccccaggggtttctccacatccgggtgttaagacacctgatggcactgttggtttgtcccctataccccagaaaatctatcctgcaaggtagctacttcaatcttgtcattaaaatgtgtcaagtcacagctcgcaatgccaaaggaatgctgggccaa

SEQ ID NO: 242761 - DNA, 835 bp, Homo Sapiens
ttgtaaaaacaaatatcaattattataaataatcacagaaaacaaataaactggaaaataaacagcggttattaatttaaggttttaacccttaccccaaccaccccaaaaaaagtagccatttttaaaataaagattaagagttggtggaatttaagggaaatgccatccggtaatgttacctaaatactagaaaggaatcagcacaaggaaacaggaacaaagcagtgcagtacttcggtattacagcgccacccactggctagaagtcctcatagcacatatgagatgtagccataaaatagatgaattcttgaaataaggaatataacactgactattctgattcagtagaacataaaaaatgtctaacaaaacagaaccagacacattatattatttctacaagtaaacagaatatctattagatatgttcacaagggttttatcaattttgaaatccaagtgtataatccccaaatgctgtaaggacttaaattttatagccaaaacaattaacacataaaatgctatttcatctctgtagctgaatacataaatagtatctttaagtaaaagatgcatacttgcatttcattgctaagcaattcataatatatttaaatgctggtaaaacctacaatggcatctgcttcacttctacctttactagagaagtaacaaaatacactgagcaaaggatatgtccaaaaaactaaactgaaaaacagtttctaaataaagtccacagaccattcagataaactagtaaaaatagtttttctttaaagtaccacagcacctttgtagttcaaaatatatttaccataggctg

SEQ ID NO: 242762 - DNA, 1412 bp, Homo Sapiens
ttggctcgtttcgcggcggcggcggcttctttgtttcgtgaagagaagcgagacgcccattctgcccccggccccgcgcggaggggcgggggaggcgccgggaagtcgacggcgccggcggctcctgcaggaggccactgtctgcagctcccgtgaagatgtccactccagacccacccctgggcggaactcctcggccaggtccttccccgggccctggcccttcccctggagccatgctgggccctagcccgggtccctcgccgggctccgcccacagcatgatggggcccagcccagggccgccctcagcaggacaccccatccccacccaggggcctggagggtaccctcaggacaacatgcaccagatgcacaagcccatggagtccatgcatgagaagggcatgtcggacgacccgcgctacaaccagatgaaaggaatggggatgcggtcagggggccatgctgggatggggcccccgcccagccccatggaccagcactcccaaggttacccctcgcccctgggtggctctgagcatgcctctagtccagttccagccagtggcccgtcttcggggccccagatgtcttccgggccaggaggtgccccgctggatggtgctgacccccaggccttggggcagcagaaccggggcccaaccccatttaaccagaaccagctgcaccagctcagagctcagatcatggcctacaagatgctggccagggggcagcccctccccgaccacctgcagatggcggtgcagggcaagcggccgatgcccgggatgcagcagcagatgccaacgctacctccaccctcggtgtccgcaacaggacccggccctggccctggccctggccccggcccgggtcccggcccggcacctccaaattacagcaggcctcatggtatgggagggcccaacatgcctcccccaggaccctcgggcgtgccccccgggatgccaggccagcctcctggagggcctcccaagccctggcctgaaggacccatggcgaatgctgctgcccccacgagcacccctcagaagctgattcccccgcagccaacgggccgcccttcccccgcgccccctgccgtcccacccgccgcctcgcccgtgatgccaccgcagacccagtcccccgggcagccggcccagcccgcgcccatggtgccactgcaccagaagcagagccgcatcacccccatccagaagccgcggggcctcgaccctgtggagatcctgcaggagcgcgagtacaggctgcagggctcgcatcgcacaccgaattcaaaacttgaaaaccttcccgggtccctggccggggatttgcgaacccaaagcgaccattgagctcaaggccctcagctgctgaactttccagaaggcagctgcgcc

SEQ ID NO: 242763 - DNA, 1178 bp, Homo Sapiens
  misc_feature (910)..(919): n is a, c, g, or t
ttggatgcttgctgctgggctcttggaggaactaagagattttcacagacgctataatcagaagaatgtttcggaaaatagccaggactatcaacatggtatcttccaatcaattggcttcaaggaatttcacgagtacctgatcactgagggaaaatgcacactggagactagtaaccagcttctaaagaaaggtattgaggctctgaaacaagtaactaagagatatgcccggaaacaaaaccgatgggttaaaaaccgttttttgagcagacctggtcccattgtcccccctgtctatggcttagaggtatctgatgtctcgaagtgggaagagtctgttcttgaacctgctcttgaaatcgtgcaaagtttcatccagggccacaagcctacagccactccaataaagatgccatacaatgaagctgagaacaagagaagttatcacctgtgtgacctctgtgatcgaatcatcattggggatcgcgaatgggcagcgcacataaaatccaaatcccacttgaaccaactgaagaaaagaagaagattggactcagatgctgtcaacaccatagaaagtcagagtgtttccccagaccataacaaagaacctaaagagaagggatccccagggcagaatgatcaagagctgaaatgcagcgtttaagagacatgtccagtggcctttggaaaggtggtggggatccagttcaggagggaggggtatgtttgtctcccagtctgggcaaaggagtgctatgcggaattctctgcatagcagaaaagctcccaccattttcttttgatgtggttttaaagtctcacgttctctataatagaaacagcaggtcttgtcagctccttgtgtggctgatgtgtctggaaatgatgtagttcaggaaagcannnnnnnnnnctttgaaccttaaaggttctattattaaaagcagcacagattccacatttttatacatgaggatcttctttgtggtgaataccaggattgactgcatccctttaaagaagttttatgtccctgactctggctaaaattatctaatttccagatgcttttgtagatgactgaagtatttgtgagccacatattgggagttctagatttgagtgaatggcacgaaagggccatctccattgagatgattaagtgaaccaaa

SEQ ID NO: 242764 - DNA, 1409 bp, Homo Sapiens
gggttctgactccccagaacaaagaacttgggagaacagtacgggagactgagcagaaagggatgggtttgctgactcgcctttgaaatctaactctaacgtaggcagcagtaactcgtctgaacaaatctgattaaataaattcttggggcttacctgtgatgtcacacatacagatctactctccaggaagcaaactcttagcaagttactgccccacttgtaatcactgatctgaaattctcttgttatgaaagaaaagtccttctccccacgaaagacctttaaagacttctacgtatttgaaataccagatactaaggtgtttaaaatgatttctatcattggtaacatcaaacaaaaatagctgcatctggttaagttaaaaagcatcaatactccctcttctggccctacagctgtaccaataggaattctcaccactactcaataacagaaataagtgcctacagccatgatgaatttgtaacattttctcaaattaactacgatttttctaatttcaggtgaaaacccaaggtggtacttcaaacacgcacatgcacacacaaactcagaggacagcgttacaaggaaactaaggaattcctgcattaacaaaggaagacatgttagggggacatcctagccacatatgctttctttgttatatttaggttcattttcattgatactaaacagacatttaatggcactgataaaaattcaagtaaaaaaaactcaactgaatatgcaaacttaccattataaacaaaatactataaccacaaatcaacactaaaacaaattctgtaagtattttatttatcactgaagaaaaaacacagcagcaagttctgtgttggcttcaatgagaccaaatagttcatctttaacatagctactgcgctccaaaattgaagtcaacacagtcattactacaaattacttgttgaaagaatctatcttcaaaagaaagaaaattaggaaagagaatttaaacgattcctccaaaccatacatttataaatattgtcatatttaaaatgcttgaaaggcatgaattctccattaatggaaaagcagtttgctattggcaacagaaaaaaactcagcgataatttaccaaatgctttaaaatttaaaagctatactgtttggattcacacttgcgcagtaatcttgtcattacaacaactgcaaattgctttgtactcaccttctctcaagtaaaatctaaagaaaaccccaccgtatccaatgtttgtaatgtttacttcaagtgaatctaaaaaatttctaaatttagtttatggtaaatacctcaaaatacctaaaataggtacgtatcaaccacttaagggtgtgaaaattgtttcagattcactgcccaacttttttgtacaaag

SEQ ID NO: 242765 - DNA, 1333 bp, Homo Sapiens
  misc_feature (708)..(747): n is a, c, g, or t
ttggcgaagccggggctgggccggagccgggcgagggctgggagctgggccgggtccggggacagcgggcgaggggcagctgccggagccgggcagccaggccgctcagggcaggggacagctggcgccggttctgcggtctccggggcccagatgtgaggcggcggcgcccccggcccgagagcgcacgatgggggccccgctcgccgtagcgctgggcgccctccactacctggcacttttcctgcaactcggcggcgccacgcggcccgccggccacgcgccctgggacaaccacgtctccggccacgccctgttcacagagacaccccatgacatgacagcacggacgggcgaggacgtggagatggcctgctccttccgcggcagcggctccccctcctactcgctggagatccagtggtggtatgtacggagccaccgggactggaccgacaagcaggcgtgggcctcgaaccagctaaaagcatctcagcaggaagacgcatggaaggaggcaaccaaaataagtgggtcaaggtggtgggcagcaacatctcccacaagctgcgcctgtcccgggtgaagcccacggacgaaggcacctacgagtgccgcgtcatcgacttcagcgacggcaaggcccggcaccacaaggtcaaggcctacctgcgggtgcagccaggggagaactccgtcctgcatctnnnnnnnnnnnnnnnnnnnnnnnnnnnnnnnnnnnnnnnnaagccaggcaaggagctgaggaagcgctcggtggaccaggaggcctgcagcctctagactgatgcccctgcccccgcccatccgcccccacgctgtacagagtgcatgaggagccgccggaccaccggggaccgactgcctgcgtccagccgcgccccatccccgaggccgcctgtggccaccatgtcggccctctttccaccaccccttgctcagcatgtaagccccacccacccctgccctttcagacccctgcggtgacctggctcggagaaggtggccctgggcaccaaggggccaaccgccctgaacactggggcagggaccatgctggggcccggggccacccccttcctgtcaccagcttctgtggagtccagtgttttgctttgcttgcttgtcccccatcctgtcctgagccggggccccccagcctcgcctccctcctcctaccatccctcacttggacctgggggtgtggacagtgacccctccctgaatatggacttgaatcttctgagcagaactagggcctctcctctcgtgaagacaccagggaaccaaggagggccctctggggcagtgg

SEQ ID NO: 242766 - DNA, 1003 bp, Homo Sapiens
ttggacgaaaaccaccacagcgtcagaaaggagcgggtttgctgagggccccagaaggctccttccaccgtatcatagtctaataaataattttgtcaagccagagaagctaacaaaggtagagacaaggcttaaagaaaagatagtggcggaaatgacggatctgaacaagcatataaaacaagctcaaacccagcggaaacagctactggaggaatccagggagctacaccgagaaaagttacttgtccaggctgaaaacagattctttctggaatacctgactaacaaaactgaagagtacacagagcaacctgagaaggtatggaacagctatttacaaaaaagtggagagattgaacgaagaagacaagaatcagcctccagatatgcagaacaaatttcagtgcttaaaacagcgctcttgcaaaaggaaaatatccaatccagtttgaagcggaagttgcaggcaatgagggacattgctatattaaaggaaaagcaggagaaagaaatacagacattacaggaggagacaaagaaagtccaagctgagacagcttcaaagacacgggaagtacaggcccagctcctccaggagaaaagattactggagaaacaactgagcgagccagacaggaggctactgggaaagagaaaaagaagagagcttaatatgaaggcccaggccttgaagttggcagcaaagcggtttatttttgaatactcctgtggcatcaacagagagaaccagcagttcaagaaggaattactgcagctaattgagcaagcccagaaactaacggctactcaaagccacttagaaaacagaagcagcagctgcagcagaacagtggtatctggagtccttaatccaggcgaggcagagactgcaggaagtcataatcagtgcctaaatagacaggatgttccaaagatctacactctagtctttctctaaggcatcaattcaaggattaatccaaagtaacttctaaaataa

SEQ ID NO: 242767 - DNA, 960 bp, Homo Sapiens
ctataaaagccaactttgtacaaaaaagttggcacagtggtgtttgtgaaatagtccttcctgttctccaagccagtgaagagttatctgctgggaaagtgtccaagagcctgtttttgaaacacaagctgggcttctggtagtgcctcatcacaacccatgatggctgttcatgtttcaccccttttcttccttcagcagaggccaggctatggagcagggccactgaatttgctgtaatctggagatgctttttactttcaaccataagcggtaatagcagaggaaagggtgaagggagtctgggcaagcaaagcatagagatggtggggtggtggtggggttgaagaaacttgttggtataattgtcataggacttgcctaaaatattattaaaattacgggagtgtactcagctttgagcctaggagaaaatgccactgtgtgcatccattttaaagggttccctcataaaaaaatgttattccccattatcacatcagtacactgctttgaaaacaaaacttttcaacatgggcatactgggctacatggaaaatgacatcacccaggagtgatttctctttatatatattatttctgcagttaccatccttatctgagttatcacagttcatgaatctaagaggcggaactctacatcattagtaagaggttccaccaaagtctaaagttgtattcacttgtgtttgatgaactatctttaaaagaccataggtctatcattatttcttagacataatctaaagaaaaacagactagagaagccacctggttgtaacagaataagcagaagtttacagcatgatagtccaagtggtgataactttaaataaaactcaaatttttactgtttgtagacaggaatgctgtcctagagaacctcctcctcaaccagctacgtacatagttttatcctatgcattcctgttttctgtg

SEQ ID NO: 242768 - DNA, 826 bp, Homo Sapiens
tcagaaagagtcttaatttgctttcacagtacaggcattttccaaaacctggttctgggcttacaaagcacacacacacaaatcttaatgcaatgaacaatatttcaaaccttatttcccaaagcaaaacgtagggcttaagacgtcaaaatcttccaacagttctagacatccagacagaataggagctgatgcagattgcatatgagatgtactgttgatccaggtgttttaggatcacactcaaatgaatataaagtagtgaaactttttggggaaacacattaacttataaaaagctagccaagagcatatcggccaaaggaggaaagggagtaaatggcaattcaaagtagacagttctcactagagcctagggcactttattagaaaccaagtatatcataggcaaataaaaatagtttttacccccattgatacaacataagggattttacattcagcctagatatagggagtaacaaatcctcctgcccataaatctatgacttgcaagtatcttccaccacatgataactctatatagtacatatagtacatagcccttatttattggagggatccaaaatattccttgtaggctcacaaagtccaatacattagctctctcttccctttacacgtctaatagtaaaaactattttttccatgcaaaaagccattattcagttgaagagaaatcaggcaaaacagagatggcagataaggaatggagagaatattattggcacgtgcccaactagtgacaaacaaatgcagtacacaatgacttaaaaataaaagtcacccaacttttttgtacaaa

SEQ ID NO: 242769 - DNA, 927 bp, Homo Sapiens
ttggcccactgcgaagcccagctgcgcgcgccttgggattgactgtccacgctcgcccggctcgtccgacgcgccctccgccagccgacagacacagccgcacgcactgccgtgttctccctgcggctcggacacatagtatgaccattaggtgtttcgtctcccacccattttctatggaaaaccaaggggatcgggccatgatagccactggcagctttgaagaatgggacacctttagagaagcttgatcttggaggcctcaccgtgagaccttacaaagccggattccggcagagttcctctatctcgtcttgttgctgattaaaggtgcccctgtctccagtttttctccatctcctgggacgtagcaggaaatcagcatcatggttgggttcaaggccacagatgtgccccctactgccactgtgaagtttcttggggctggcacagctgcctgcatcgcagatctcatcacctttcctctggatactgctaaagtccggttacagatccaaggagaaagtcaggggccagtgcgcgctacagccagcgcccagtaccgcggtgtgatgggcaccattctgaccatggtgcgtactgagggcccccgaagcctctacaatgggctggttgccggcctgcagcgccaaatgagctttgcctctgtccgcatcggcctgtatgattctgtcaaacagttctacaccaagggctctgagcatgccagcattgggagccgcctcctagcagcagcaccacaggtgccctggctgtggctgtggcccagcccacggatgtggtaaaggtccgattccaagctcaagcccgggctggaggtggtcggagataccaaagcaccgtcaatgcctacaaaaccattgcccgaaaggaagggttccggggcctctggaaagggacctctcc

SEQ ID NO: 242770 - DNA, 1143 bp, Homo Sapiens
ttggctgtcagtggatctatctttctaggtctggaggtcagtggctgtcttctgacagctccattaggcagtgcctcagtgaagactctgtgtgggggctccaaccccacaattcccctccaccctgctccagcagaggttctccaggggctttgcccctgcagcagacttctgtgttgatgtctaggcatttccatacatcctctaaaatctaggcagatgctcccaaagctcaattcttgtcttctgtgcacctgcaggccaaacaccatgtggaaaccaccaaggcttggggcttgcaccctctaaagcacggcccaagctgtgccttggtcccttttagccacagctggagctggagtggctggaacacagggtgccatgtcccgaggctgcacaaaggagttgggccctgggcctggcccacaaaactgtttttattttcctaggcctccaggcctgtaatgggtgtggctgccttgcagatctctgaaatgcctggagacatttcctgcattgtcttggcaattaacttttggctgtttgttacttaggcaaatttctgcaggcttgaatttctccacagaaagtgggtttttcttttctaccaaatggtcaggctgcagattttccaaacttttatgctttgtttcccctttaaacataagttcaatttcaaactatctctgtgagagcacataaatacactttcaggaaaagccaggtcacctcttaatgctttgctgtttagaaatttcttctgccggataccctaaatcaactctctcaagttcaaagttgcacagatctttaggtccggggaaaaatgccaccagtgtctaaagtgacctttactccagttcccaacaagttcttcatctccatcgaagatcatctcagcttggacttcattgtccatatcactatcagcattttggtcaaaattatacaacaagtctctaggaagttccaaactttttcacatctgcctgtcttcttctgagcctccaaactgttccaacgtctgcctattacccagttcaaaagtcacttccacattttcaaattatctttgtagcagtacccccatctgccaattatctgtattagtccattttcacacttctacaaggtactacctga

SEQ ID NO: 242771 - DNA, 1222 bp, Homo Sapiens
  misc_feature (195)..(234): n is a, c, g, or t
ctttgtacaaaaaagttggctacgtcttagcccgtataaaaaaacttcgcatttctgtgcccgagcaggctccttgcaaagacagcagcgtgcggggcagagccccgggagggcgcgtctgtccacgcctaccggacgcgccgaggtcgcgctgcctgtgttctccgagggccttcatttaaagaaaataagggnnnnnnnnnnnnnnnnnnnnnnnnnnnnnnnnnnnnnnnnaaaggagtactgaagaatactttcctaagtttgtctgtaaaatcttagcggtggacctgggagatttgagaagcttccagaaacagtttaaacaagccagcgcttttggagaagaggagcaacacctgtgccgcggccggaggagttttgttgttggttttagcttccagtggcttctttctgcggggcatcaggctgctggggtagccgcccgccgagcctggaagctgctcgttctccgctggactcagaagccaagctgcttcccgcctagactcggcgcagggccccgcaccggtgaggaaggtgcttttggccccattgcgaggggccttggccaggactggccctgtggccaggaggcgagaaggtggctgttcccggattgacggctttttcccgggggcctttggaagatttggtggaaggacaagagggcctgtccctgtccccgtccccaggaggtaccgacagtccctgtgctggttagacacggagcgctgcacaccgaaagcccaaattgggagctctgcctgccggcaactttgctgatggggtgattgctgcttctggggggtaaggaaacaagttacagaaattaccgcgttctgtgtgaagggactgagggtgtggtgtcattggcagagggtcattttaggagagctgccccagcccctcgaacgcctggcttggggtgtcattctgcctggcggccaggcctccagcttcccctgccccgggcctggggctgtcactggccctgatccgaacacctccagattccggcttctacatgggacagacggggacgcacaggccaccttccttctggcagggactcttatttattcccattgctctaggggctttcggtttccccttcttccggtaggccgcgtaggggcatgcactgggtaggtttccgccggtgaccccgccgccggcctgagggacgctccctgccccatcccggctgttgggctggggc

SEQ ID NO: 242772 - DNA, 586 bp, Homo Sapiens
  misc_feature (483)..(504): n is a, c, g, or t
taataacttcaatttttaataatggaaacaattttgccattctagaaactattttaggggagaaaaatcttccctacaaaaataaacttaaacccatcaaaattataaatattataactttttacttctgccatttaaaatgctctcctgcaataccaccccttcatttaacatccttcctgtaccatcacatattgaagagaaaacagtattacagcaaagcttagatagtttaacataatgatttgtacaatgattattaaaaaatctttggccttagtggccttttttcttcacttacacattaaaaatgctgctgcagtaaccagtgtttgggaaaggacatcagttttcaagaaccataaactgacagaatttcaatacagtaggtttccaaattgcaatttgtagtgcacatgacagtaagcgaggttttgggtaaatatagatgaggatgcctattcagacaatttacttcaagtnnnnnnnnnnnnnnnnnnnnnnttcacagatacccatcagctactactttaggttctaacagtgtcttaatctgagaaacaaatccaacttttttgtacaaagt

SEQ ID NO: 242773 - DNA, 463 bp, Homo Sapiens
ttgaaatgtaatttaaataaaaatatatcattatttttcaaaagactagattctaaacaatgtaaacaagatctgaaataatttttaaattgttcttacatgttacatacattagccaattaacctttaatggttacacatactaccaattagatgctcagtaggtgtccatcaaatgagtaaataactaagataactacttaaaatgacctgtaaaataactgcagtcttaaagcaccaacttagaaaagtgtgtaggttaatttgctagtctgacttttaaaaattaacgtgaattttcaacaggaaaaaaatggatactaaataattcaagaaaatcccaaactttgttaacattataattagaaaaactattgcatgagtttgtgcttcagttcatctattatcttgattgtatttctatgaagtttcaagtttcatgattcgatataattccatccaa

SEQ ID NO: 242774 - DNA, 1506 bp, Homo Sapiens
  misc_feature (1112)..(1188): n is a, c, g, or t
ttggctctggactgagcaagagggaggagggagcctgctcaccccactccagggccttccccagcggccaccaactgacctggggcgctgctccccacagtccaaataagctgaaagtgcagctcgctgcaggccccagagcgagcttcccctcctccctgctctcccaggcccctgccacagcctctttccgtccctctctttctgatccaggcccctcagtccaagctttggaaaaccttcacctcatcttaaaccgaactcaaatatatttatttttttaccataccaacttctctcccatctctaggtggctcagtccatggccactccctgcccccagcctggctggacagcaaggaatccacagcccacacgtgagctccctcctcacccccaggcagggaagcccctcctgccagtccctgtcccctttcagcccaccagtccctctctgctgccggtgatgggaggcctttctagacctggctctttctctcccgtctcagtggcttctctgaggtgctgtacacgcgcgttaacctgttcccttctctatccttccccgtggtactgagctcacgtggactcccagtgcgaaggggcccatgggttgggctgcaggcctggccgtgagcgggggctgcctgcacgctcccctagcctactcttgtgtttaggggatggtgggaacatatcccagtgcccttgcctcataatagatgtggtgactctcccggtagaccctagcaagggtcctccatggtggtgagggactcaggagaattgtagggattgggggaccctgcctgcctggcttgagaacagccctgctgcccttttgagccgagattttgaagtggatgcccgtcttgccagaaatgctgttctcaccagaatgccccctccccttgcccttactggacttggccctgcctgatgccaagcaaagacccttccccagaggcctaccccccatatgtcctcagagaggctgagtgtcccctccaggcagtcatgggccctgaggcccctcctgcctggccctgctccccagtggggaggtgactgtgtttcccagagtgtgagccgctctcctccccctaaaaagnnnnnnnnnnnnnnnnnnnnnnnnnnnnnnnnnnnnnnnnnnnnnnnnnnnnnnnnnnnnnnnnnnnnnnnnnnnnnccacctcttgccagcagtagcagggctgcccacgcccctttctccccatgccccatccagcacttgggcgactcatgcctctgcctcagtgggcctgtgggagcctactggagcccagcacttactccccctgagcagcgagcctgcgtctgtctcagctgtccagcgctgagggccagggtcttgtgctgtggggctgggggatgccctcttttctatatttatttcatagaaagtctcctgcgggagcggaaatgcagtccgggcctagggctcccagcccttgactgtcctcctgtgagggcctgaagctgggcc

SEQ ID NO: 242775 - DNA, 1561 bp, Homo Sapiens
gtatattttgtcttatcatcagcaaatatttatcaggtggccacagagcaagtggctctgtattaagtgcaaacgtcagtggtagcacagaattagaagatctttgatcactgaaattcctgaaaaagccacgtgattatgaagcactcaaggcaggtgaagagagatgtgactgaccttagcaggttcttgtagaacaagcaggattgcaatcaaattgctcaatattaaggggccacgtctagcatctggacttgcttcattagttctgggatgataacttggtgtcaataaaaggtgtagagtggaagagtgtggctattgatctgtgggtctttaaaaattaatgttcctattacacagggtctggggttgagtgaggacaaaaggagggaaaaggaagagctaagggatgatgagaaactcatattagcttcttagaattaatttgtttttcaggcaatccagaccttctttgcaatcatgagtattttaactcatgagtatttaattccttaaaaatacaaactccccaaaacccaggtcagctctaaacctagggatgagcatttacttggggacagcatgcacattttgttaagcacagaagctttccagccctgctttgaccagctccctgatcagagatcctgccatcctcttttcttacttcctgcagggtgacactcccatcccattttaactgccaacatcaaacgtattcatccatgcaatggcatggatgaaggatctcggtggccaagagcactgcatgaagaaccatgcatccccatcttaagagggtagtctcttcgtgtctctttgtcagtcttcaggaattagtggccctcagatcacttacgatgagcaagcacttgtgctaagtagttaggaagaatgggcattccatcaggtacagtatacaagtttttccaagaaatcctaaccctgggggctcaggcgaatgaggagggtcaaatgctgagggtgggagaaagcagatctagacagcattctggaattgttgctttgccattatttgcccagaaaacatttatggcaaggaagcctgaaaacatggcaatggttgtaagatgggttgcgatacaactggtgatgtgagaagtgaaaatgaaactgactcctttagggaggacattggtttatagtaaacaggtttgcctcatcagaagtgaatatggatattgctacacaataaaaagaggaaaaacaccaacaacagtaacaatggtaatcacaataatgataatgactctgtaggtatagaacctccagttttttgtgttctgaaggttatttcagagtttcttgcaagagagaaaacaaatcagaaaaaaaggggaagagagaagatgggaaaataatttatgtatgggtatacaaagtaagatataggcagtcagagaaaaacagatacagacagaaaaggaaaagaaacttagagaagatataaaaatgctactggaaattgcctctgtggccttagtaccagaaaagactgggctctcgctccacagagggagtgactccatagcccaga

SEQ ID NO: 242776 - DNA, 980 bp, Homo Sapiens
ttgggtgttttcttaactgtgaaattcccattcatttcttgaatgaggctacatcttatggacagagcaaagttattgtcctacagattcttaaaactataattatggctattgcatgaaatttaaatagattttattatgtctgcaaatctctgggcttttatttttctggaaaatataggagctttaatcaaaacataatagttctttttgtaattccatgttaataaaaacaaatactagcaattgcttgaattttaatgaatatttaaaagttcaagagccacggaaatcacttccagagataagagttccctttctaaatagaacacatttttaaaaaataagttatgtttgctactaaaacatttacactgttagactattatgtgcatgttgccaagactcttaagtaacttggatatcaactgtgaagggcctacctctaaaaagtaacaggtcatacaaatacaaatgtaactgtaaaaattccactggattcttgcatatttgcaagattagattattcaaaagaaatttcagtgctaaaattaaccagcaacataagttctatgggctttgaaaattgttctcatctttttaaagttgatgcattttcaatcctgcttacacaggctgttcatttggataagtaaataaaatgtctaaggtgaacttggcattatgtggagatgttggaccgttatagagcaatacaaattcctatgctgtcattctgttttctgcaaatgcaaacgtgcttatatggtcaacagtgcaaaaatagggtagttggctgcatatttagggtattacctaagcatttgttctctaacgttgctctactagaatgatttttttcttgcatcttttcacattaatgatgttctttatataactttcatgcgattatttagtttttaaattaataaagtgaatttaagaaatattgaaataaacatctaagtaattgccatttt

SEQ ID NO: 242777 - DNA, 1060 bp, Homo Sapiens
  misc_feature (803)..(816): n is a, c, g, or t
  misc_feature (971)..(997): n is a, c, g, or t
aaaaaagaaaacaatgtttattaggatattctggggtgagaggatggccaaagggactatgtacattctgtagtgcttgagcaataggctaacagaaaattcgaacatcacaaaaccacttccaaagtccatattgcaaaacttgtacttctacaggagatgttcttccaagggtgttggcaataaaggctgttgcaaaacagctatgtgaggcagccatgtgggagtgaccccaggagaatgctccggtgtcctctggaaagcagatacacaggacgatggacaaatgtgtcatcttctaccagtgggaagctcagtaaacacacaatataacatggagacccgcccgaagcctaactggaggcttctcaacaaagctcagtcgacccctcacccctgttccgaggagactgggtgtctgaacccctcactcaggaatgaattctaaaaataccctaaaaatcagaagccgccttctactctaccgtgctataaacctgcatgaaacagaacgaacataagctgaaacacaccctcgggttaagagtgaaaaatgcaacaccatccaaaagagtacaagaaaaaaaccccacagcctaaatctcacacagcttctcagcaggagttggattaaactgagaaaataattttaatatcaagggataatgcacgcaagatgggaaaactttaaagcaaactctgcagtgaaaagtgtttcccccactcccttgggcgagggaagggagaagaagatagataatgaggagaactataaggccctggattcaggtttctgaaactgnnnnnnnnnnnnnncaaccctcggaggacaatcagctcttcctgaatccagaaaagcacatcagaaatgcccaatgacagaccacagccaaatatggcagggcaaactgatttggttctgcgatttccattctcctctccacatccgagaaatgccttcagctacagcnnnnnnnnnnnnnnnnnnnnnnnnnnntcccgatcaagcatgcttggcacaccaggaagctaatgctggatcatatagccctccaatcat

SEQ ID NO: 242778 - DNA, 1096 bp, Homo Sapiens
gacagatacagctatcattgcaatgatactgtggtctcatcacatgagctagttttacaggtaactgtcatttgagagaacgaatggacttttcttgtcttttgataggctccatgacaattcaaaaggtgaagggattgctgtcacgtcttctcaaagttcctgtgtcagaccttctgttgtcctatgaaagtcccaaagtaagttgcccagcaaaatacaaagtcaaagtcaagcttagtcctcgtattatgacattaaactgtctctagatagcaacagtttgattctaaatggagaccatgggtctgtttgtttgattttaagggtaagctactgcctggggacggggtgggggaagagtatgtgtagcatgctttatcggatctgtcttaatcacatccttccccaccttcgttctaattttagaagccgggcagagaaatcgagctggaaaatgacctaaagtcattacagttttattctgtggaaaatggagattgtctattagtgcgatggtgacaaccaactaataaaatttaaagaccacactgcttatcgtgtctggggttcaccggaaataaatgattcactggaacaattctactgtcaaaacaaagggggtttacaacttgtcctaagtataacaagggatgtattttttgttgggaagtgaccatttctaggcttatacataatagcaataataaaggctttgaacctactaatgattttctgatcttatttcatatttatttttacagctcatcactgcatttcatgataagatttaaatattaaatagaaagaaactagctagcctaataaaatctgaacacagttaatatctgtcataagactagttttaatggaattctctattgaaactactattttaaagggttactagaaatgatttggttggtcattttgggaaatgtcccttaaacttggggagacatcctctactatgtataacaatatgctattatctgtcttctcagttgcactatttctaagagtacttaaattaatcacatgcttttccctacaattatacctaagctgagtatatcccaacttttttgtacaaagt

SEQ ID NO: 242779 - DNA, 942 bp, Homo Sapiens
cataaaagcgaactttgtacaaaaaagttggaatgaatatatgttttgatttaacacatctttacaattaattcataatagggactcaggctcaaataactgttcctgtgtctagatttataatgaggacatcagggagcctttttaagctaaagagtgattatctttcacagtagaactagaaacaaaaccctaacttgtgaagttgctatttatttttccctgagtgaatataactgttatttggtctttaacagatatactgaggtttgagtttcactttctttaagtctcacattgctaacatgacattagctgtaagaaacaagatagctttacatttgaatgccatttactgatttctaatgattctctttttttgtaaacaactgtttcctttgattatgtcaacatgtttctgatgtggcatttttgttttaatcccaatcggttaggaaaatctagtcagtaagcgccatgagtattcttcccataactaaatgggtttctaatttaatttgaagggaataaaatttgtgtaagaaaaaagctgtttaacattaataaactatatttcttcttacacattgaactgtatcattttcatatccacttccccaccactgaaatatcttatttcacaatattttaactgatttttaatccaaaactaatttataagacagtatgtatagtaatagtagcttgagtgaatatgcaaaagtttaatttttatatatgtcatactatattttaaatagttaaaaaagacaaaagaagggagagccatctatgatatagatggtaccatttcagttcaaagttgtaataacctttggagtgttacagtttggttgtcaaatggtttcagaatgtataattgatttttttaaatgttgcattgtttgaatctaaagtacagcactataacatgctttagct

SEQ ID NO: 242780 - DNA, 615 bp, Homo Sapiens
  misc_feature (424)..(432): n is a, c, g, or t
ttggctaaacgagatgaataatctggtttagatattgtaagagcaaattcaaagtgatctctgaagaggtgactgtcagctaagtgtgtatctggaacaggacaggtatccacttgtcgactaagaaaggatcaacaagcagaagatgatgaggatgacgagttagatgttacagaagaagaaaattttcttaagtaaactacacatttccattttcatcataaatgacttgaaatccacaatgactaaattgtagaactttatactcactttgctatgttaagcctcaaagtgaagtccaactggaaacagaaaaataattaaaggaaacttatgctgaccaaaaatgaaggctttaaaaaatattgcataccagtcatttcaacatcctacctagtgttacatgatttttgtgtaagtgccnnnnnnnnnaaagatggtgtatttcaaagtatttcatattaatgtactatatctacttgaagttccaatagtacattatgacagaaaccaaaagatctaacaattctgcttagctttttggttaagactccatgctttcattaccagaaaagggtcttacgtagtcattatgattcatggaattctatccaa

SEQ ID NO: 242781 - DNA, 812 bp, Homo Sapiens
tcacataaacttaaggtaaaggggtggaaaaagatattccatgcaactggacactgaaagcaatcacaggtagctattcttataccagacaaaatgaactttaaagcaataacaatttaaaaagacaaaggaggaacattatatgataataaaaggctttgtccaaaaggaaaatatcataatcctaaatatatatgcacctaacactggagctcccaaatttatagaacaattattactagacctaggaaatgagatagacagcaacacaataatagtgggggcttccttactctactgacagcagtagacaggtcatcaagacagaaagccaacagagaaacaatggatttaaactataccttagaacaaattgtcttaacagatatttacagaacattctacccaacaactgccaaatatacagtttattcagtaacacatggcacattttccaagaaataacatataataggccactaaacaagtctcaataaatttaagaaaattgaaattatatcaagtattttttgagaccacagtagaataaaattggaaatcaactccaaaaggagtgttcaaaacaatgcaaattcatggaaattaaataatttgctcctgaatgactgttgggtcagccatgaaatcaagatgaaaatgaaaaattctttgaactcaatgataatagtgacacaacctatcaaaacctttgggatacagcaaaagcagtgttaagaggaaagatcatagccttaaatgcctgcatcaaaaagtttgagaaagcctatatagacaatttaaggctacacctc

SEQ ID NO: 242782 - DNA, 2251 bp, Homo Sapiens
gcgcatttcaacctctcctttgtttccttttaaagatagatttcgtgaagtcttttaaaagaaagtgtattacagagaaggccatttaagatgtttagatagatagccataaaataggtgtttccgcctcaatccaagttattattaccattttgtacttgaaagtgtccaaatgacacaatataaaagaactatttcttatttcaatattaattttgctaatcaaaggttccagtttccagtgatatgaccaaccaataagatataactggtgcagagagagccatatattttacataatatttataataaactttcttatcacagttcctcctcagaacacactctacagaatgtcgactgaaaagcttccaaaataattgaacacaagatatgaatcagcaacagaataagctcaagggaagagacatgggcacaggcaggcaaaacgtgatcaccacagctccgttcctgcagtgacacttaacatactcagcatcttcatgaattctgaataatttactgatcgtaaagtctaaaagtatcaatttcaggtgagcagttttaaatcagaaaatagtcaatagttaatcatgactcttcagggtatttccttcacgtcctctgaagagtttcccagaacattcttgtgaaaaggaatgcctcccaacaatggagagcaacaatagcaacaggcatctgaatcagcctggcctctgaaaacagaccaaagaggagtttatctgctttcttccagtgaagaaagaaaatcaagaacgtggtattggccgagggaaagtgaatgagggaaggtaagtaaaggacccaggccagtctgtggcaaaggaagcacttaggaaatgactgcagtgatctctagtgagcattttgtaaaattccactccaacgttaggccatggatgcaggaacctatctgccatcatatttaattaagatggagtgttacgcacctaataaagaaggtgaagttctaggtagcattttaaattcataagaagtctagaagaccaagaagaaaagagataaggtagctaggatttcaagcagcactaagcaaaacttaaaattgtatcgtgcagtaaagctgaatgtacaatcatcccagacaagacagtttaaagaaaacaagatgtccacataagtgtcttggttttagccgtgataattctcagccccaaacatcacaaatctaagaaaagctatatatttttatttattaaatagatttaattatatgtcttctgaaatacaaaagatagaataaatcatagcataaaagggaataagatatgataacatcatgatggccaattaatacacataaatcgactttttctggacagacaccaaattacttaagaggattaagagataacttcagaagcagcactacctggaagattatttggcatttaaatactgatttccaaagtgctagatgggcaagtccaagcaagcatttgtggtcacatgcacatacatctcaacagttacagatgatgagaaactgtcactagtacaatttgaaacaaattcacctactctaactgctcacctgaaatgatcttgaacaaaatctctagaagtgtggcttgcaatttttttcttcagacatattctgcctcattttatcatctaagcaggcaatcctatcaggtctgaatagggcaaggcattgtgtttcttacatgcagaacatggagtttttctatttggttccatcaactcccaagcatttcaggcccacggaggtgagagttccttcaatgctgacaggtttgctatttctaacctatcatcgacagccttcaaggggtcccgtcgaggcatcaagactgctgtctgtgtctgaggccagcgtctgctcagtggacatggatgaaatgtcattgatcgatgaagactgagaaggagtggcgttgctacttactgctgcatctgaaggctgatcttttacaacaccattcttgcttctttcttcccaatccatgacttctttgtaaattagctctttccattcttcaattgcatgttctctttcttccaactgggcatcataaatttgaggtggtggggcttctgcttcggcggggtcataccaaacagtgatgtatgggtgacgcagagcttcgtctacagagatccgcttgtcaggatcaatcactaacatttttgataacagatctctgtgtctttgagggttgtttttatccaacttttttgtacaaag

SEQ ID NO: 242783 - DNA, 1087 bp, Homo Sapiens
gaaagtgagacctggacatgggggagacagtcgtttccttcttggctggaaagtaagtcaacaaatgaaacaaacctagtctaaaattccaggataatagtaaattacctggtttataaaaaatacatgtccaaaatagttacttcctgggttgtgtacaatataaattacaaaaataaaatagaaaagatgaaacagttgagcacatttttcagttctttaaccaacatcagcatttatccatagagatcagtttgaaaccatttgcgtggcaccaagaccctggcaaatctaggctcaggagagagaaccctgaagctggggtgaggtatttctgtggagccctgtggcctgtcctaggcacgctcgcctctacctggtggaagatggcctttccaggaaaccctccacaccgtcacgggctccatctgtggcaagtggctcgctgaatgcacagaggagcgagtgagcagaagggcgtctgcgggtgcctcgtcccccgtccacgtctcccggggagggagcatcacacagtgcagggcagctcgcgcattttcaacctctcccttttgtttttccttttaaagatagatttagtgaagtcttttaaaagaaagtgtattacagagaaggccattttaagatgtttagatagatagccataaaataggtgtttccgcctcaatccaagttattattaccattttgtacttgaaagtgtccaaatgacacaatataaaagaactatttcttatttcaataataaatttgctaatcaaaggttccagtttccagtgatatgaccaaccaataagatataactggtgcagagagagccatatattttacataatatttataataaactttcttatcacagttcctcctcagaacacactctacagaatgtcgactgaaaagcttccaaaataattgaacacaagatatgaatcagcaacagaataagctcaagggaagagacatgggcacaggcaggcaaaacgtgatcaccacagctccgttcctgcagtgacacttaacatactcgagcgacctctttctctatgattctgaatccaactttttt

SEQ ID NO: 242784 - DNA, 1498 bp, Homo Sapiens
  misc_feature (1048)..(1065): n is a, c, g, or t
ttggctctccttcctcgacagtttttgagatttcagaacattagtaaacttacaggtactttaagagtatgtatggcaagcagtagtgcccaaatacgtatttgaataaatacgtatttttggtatctcctcaaaaagttcactccttggccatgtgttgcatagggacatgcctttccatcttgctttctgagtgggaaatcaagtgagaatgggccacgctgcacatggttcttctgtgcccaccacaacaccagtgcgatgggtgggtctgtgcatgacttctagtatactgcagggcacagcacaccaacatagtgaggcttgtgttttgctgcagtcactgcccattctaatctagctttcttttcttgcaggtgcacacatcttgaccaactcagcagcaaggtggattttctttgtgtttaaagaaaaaaaatgtccctgtgtctgtagagatgatttgcagttcagcccggctgaagctgaccgaatgagactatgggctgtgcctccgccaagcatgttgccactgttcaaaatgaagaggaagcccagaaagggaaaaactaccagaacggagatgtgtttggcgatgagtataggatcaaaccagtggaagaggtcaaatacatgaaaaatggggcagaagaagagcagaaaatagcagccaggaaccaagaaaacttggaaaaaagtgccagctcaaatgtaagacttaaaactaataaagaggttccgggattagttcatcaacccagagcaaacatgcacatctctgaaagccaacaagaattcttcagaatgctggatgaaaaaattgaaaagggtcgggattactgttcggaagaagaggatatcacatagcaccaattttaccactcaaaccaggagctactactgtgtaaataggttacaccccagttgaaatctttgcaaaggtcggttctattcagcgaacagcactatagcaaaagaagatcgttccatattgtacgccccattaaattacagtgtttcttaatgaacttgcaaaggaatattgctnnnnnnnnnnnnnnnnnnctgttatcgaactttctttgttgctgctagttaaaacttgttgcaacttttcacttctcttgtgtccaggtatgcagcaaaattctgcaatttcaccttaaagatactgttggttttacagatgctctccaacctattttctataagatgaggtagtggtgaactcagataacaaacttctcttctaaactggttctgcttctaagacaagcatctcctgccctctctccttcctccccatctctcgcacgcagtctagagatagactgagccttgcttctcactggcagtgttgagctttggagatgggatggttgctatgccaagccttgtttctctgctcagaagaagtagagaagctattatcaattaaaagcatgctgtgatgtgactcctgcaagtgacgtcgagtgagtggcaggttgtttgattt

SEQ ID NO: 242785 - DNA, 1288 bp, Homo Sapiens
tttttactaaaggattagttatttttgcatttccatttctcatatcccatgacattccatataaattgcattattgctttataggccacacaacattcaaaagtatgtttatatgcattgcctgtttttccttgatctgataagactttgatactgattttactacagaaatttaagtttgaaaataccacagttagtatttcttctcagaacgttaattgttcacatcactaatcactacatgcatatttagctctgattatattgctcaaaaactgcacccattatcagaacagtgcaaatgatatttaattttaaaagtaattataatggcttgaattcaaagtcattcaaatgaacactgtcaagtaatttcacttgatgtgtatatatttcatcaccactgtttacattacccttctttaagtataaccatcaattcttcaatttctttttatcagtttccctcccaagtccccaaattaagaatgccaaatagtcttgaaaacccagagctccatattttaatgttttcttaagaacacatttgtgaactcacaaaagtgttcctctttcaactttgacaatgcagttcttactttaagtaaacaaacctgtcctaaaatcccaacaagtaattctgagaacttaaacaccttgacagtgtcccttaaaaatgctatgacagtaaagtgccaataggcatggcaatgacctcttagatgggatcatttaactcctcggaactgagaaatgccagcaccaaggattacactgagattcaattttactgaaggctacatttagtttacccactttccacaacctattatattcattatgttagaatgaaatgtaaatgttttgtgtagccctcaaacttacactaagttttgagagagatgtactttaaaaaagcacggggtaatatataaaatcagtggcagaaagtttcattaagcaccaggaactaatttttgtcaccccatactcattttgtagataagtttcaataaccggcaaggcacatttacatatattccaatgaatacttattgacaaattttaaattacactttatgtcccagctatcccagtaactgacatacaacatactaaaatgatttatttagataacaaaaaaccaattaatgtgaaacatacaggctattggcaaccactattttaaaattatgtaagtacaaataaacatactgaaatgtgtgcaattttaagtttttaaaccagaagatttttacactaacacacatttatattaatgacacat

SEQ ID NO: 242786 - DNA, 1539 bp, Homo Sapiens
ttggcgcctgggctgccggtgacctgggccgagccctcccggtcggctaagattgctgaggaggcggcgggtagctggcaggcgccgacttccgaaggccgccgtccgggcgaggtgtcctcatgacttctcttgtggaccatgtccgtgatcttttttgcctgcgtggtacgggtaagggatggactgcccctctcagcctctactgatttttaccacacccaagattttttggaatggaggagacggctcaagagtttagccttgcgactggcccagtatccaggtcgaggttctgcagaaggttgtgactttagtatacatttttcttctttcggggacgtggcctgcatggctatctgctcctgccagtgtccagcagccatggccttctgcttcctggagaccctgtggtgggaattcacagcttcctatgacactacctgcattggcctagcctccaggccatacgcttttcttgagtttgacagcatcattcagaaagtgaagtggcattttaactatgtaagttcctctcagatggagtgcagcttggaaaaaattcaggaggagctcaagttgcagcctccagcggttctcactctggaggacacagatgtggcaaatggggtgatgaatggtcacacaccgatgcacttggagcctgctcctaatttccgaatggaaccagtgacagccctgggtatcctctccctcattctcaacatcatgtgtgctgccctgaatctcattcgaggagttcaccttgcagaacattctttacaggttgcccatgaggaaattggaaacattctggcttttcttgttcctttcgtagcctgcattttccaggatccaaggagctggttctgctggttggaccaaacctcgtgagccagccacccctgacccaaatgaggagagctctgattctcccatccgggagcagtgatgtcaaacttctgctgctggggaaatctcatcagcagggagcctgtggaaaagggcatgtcagtgaaatctgggaatggctggattcggaaacatctgcccatgtgtattgatggcagagctgttgcccacaagcgccttttatttagggtaaaattaacaaatccattctattcctctgacccatgcttagtacatatgacctttaacccttacatttatatgattctggggttgcttcagaagtgttatttcatgaatcattcatatgatttgatcccccaggattctattttgtttaatgggcttttctactaaaagcataaaatactgaggctgatttagtcagggcaaaaccatttactttacatattcgttttcaatacttgctgttcatgttacacaagcttcttacggttttcttgtaacaataaatattttgagtaaataatgggtacattttaacaaactcagtagtacaacctaaacttgtataaaagtgtgtaaaaatgtatagccatttatatcctatgtataaattaaatgaggtggcttcagaaatggcagaataaatctaaagtgtttatt

SEQ ID NO: 242787 - DNA, 1268 bp, Homo Sapiens
tcagattgaatgtatatatttattataatctccaaaataatttcacttggtacaactgcttcttaaaaccatatcaatatcaggctcagaatttaattacaaccaagcaattcacaaaaacactgagcaacaaaacatgcttaatatttctttgagaaagacccttcaaatatgtgtacagcatcactgggagttacacaaaactgttacaaggtgaccattaagtgccccaattctgcacttctgacatacatgaatggctaatgtaaccacgtttgggaatctttttacatctcaaaataaagctttctgatgcaacttgccatccttttaaattttaaaggatattcttggtaattccttaggaaagtaaaactacacacactttcagagaaacaataagctgcttagatttttaaaattttttatattatacacttcaattatgggttatttattaaagacttcaaaaaatttatgttatgtttttaaaagtaccaattagtgagggaaaaagttgaaaatattcaccagcatgttaggttctcctgaaatcacagttttctggataaataaatgtaatatcactaaacaattttcactatgtattttatacatagcctggaaagaacagtattttggactgtaattttcacatcttaaatagtatttttttctttatccctttgataatactaaattctttctcttaaaaatttatatctattttatagatatcaatcttactatgaattttcaactttgactcgaacttgtttatgaaaaatatctaacatctgcaacttcagctggttatactggaaggagaggggttgcgataattttattataccttgtattaacaataaaccttctcacagagaagaaaatactttaaataccttaaatcgtatgtacaacaataaaaattcacatttcatgctttagtgagacacttaaatcatccataaggcagtcctcatagtttattggaatagagcctttctaatatctgggcctctgctgtgtgccaaatacgacaaagctctggatgttatgacagcagccaaacttctaccatcctcctatctagtagaaaaacggagggtaggtcttcgcagccatcaagttgtgaccacaatcctctgtcatagtggggtagcatccgacgtgctgcaggcctcaggacccacgtgagtcaacttgattgtttgaaaagtgctcaaaagccaggatgttctctaatgtgagttgtaggatgatgccaa

SEQ ID NO: 242788 - DNA, 823 bp, Homo Sapiens
gagtagtgatgctccaggctggacatggtgagtgtgtggacactgaggtatccacggtcctctgcagcagcccatggccccagcctggctccgtgcggcattcccatgggagtgcaggggcagggggccagggtggggagccaggacctcaggtgggcagaggacggcttcagaatgtggctctgtggagcttcacagcattggcctcagccagggcttgcagtcagagctcagacccgcatggtatagctgctgtcggcgccccgtggggattcagacgacagggggtttgctggaggagccggggaagcaggggaggtgggagggcttggggtggcacattgcactggaaacagaaatgaacagggaggtgaatgggggtgggtgggggaggagggtgggcacccagagcaagcgaggccctccccaggcagggagtgaggcagggaggcaagcgaagagagagcactgagcttggagcttgctcaagctaggccaagctgtcctcattcccagggcgtcgtggaggagagtgtgaggccccagaggagacctggccgaatctaggctctgctgagaaccagtgtgactgtgggtaaggccaggccatctctgggcaaagggctcccctcccatccacacaatggggagattcacacacctctccactactgtgcagacagaaccagggagtggtactttatatacggcagtgtcactaatgataatgattaatagtgcagtaaaatcacactaatccaaaccatctggccccatttaatgaacagaagtgaagtgaccaccatgttaatcaatgccccaa

SEQ ID NO: 242789 - DNA, 1415 bp, Homo Sapiens
  misc_feature (1108)..(1140): n is a, c, g, or t
  misc_feature (1212)..(1223): n is a, c, g, or t
acaaacaacatagattcttacaaagaaaatggtattaacatatgactgaagtttagcagggttcctgggcaatctatatctttgacacctctggtgtcaagctactagggtgcagattccagttcttgcaacctcagtcaagtattaaagttcttttcacttcagtttcttcatctgtgaaatacagataatagctcctgcttcacaattttactataaaccaaacaaattaggtagagtgctttaaatggtactagaacaaagtcctctgtaaatgttacatagtattaatatacatgtactgaaggaatggctataggatagtgaaacgtcatttgtgaggaaagaactaaagtgacctaaattctgacatgtcaagagagtcaacttttctatctaagggaggagtgaagatttcaggtgtttaggaaatgtaagaggctccacccgaaggaatgggactgtagtaaagaggggcaaagctgtttccagagaagacaggaccagaagcttcaagaaattgagtcagcttcaaaagccaaaaacctactataaatgggtaatttataagccaccatgactgccactgagcagccgagcccctaaaggactacatgtgttgatgatacaagctttgaagtacctgttggaaggagcatttatcaaatgtaggaaggctggtgacattgagccctaaactacagaagagatgtcaattctcattgattgaattatgaccaaagtcatagacctacggctagtttgatctagtagatattttgaaactcaggatattatggcttctctttgtaaacataaagcaactttgtcagaaatttatcaacattttatcaatatacttttcgtaatgataggagcgagacgtgagtttcttttatattacttacagcatcaaaaattgttggtctctcaatagatatttacagaaggcgatcatattgatttcagaccatatggcaggtagaattttctgacgggaaatctatcagtcacacctaatctggagactgatcaactaaactaaaatcacaatgggcattaccttaaaggttgaggaaagttaaaaaatggtggcttccagcacttnnnnnnnnnnnnnnnnnnnnnnnnnnnnnnnnnaaatgtctgcatcttcatacaaaaatgctttgttcttttcagaaatggtttcttagaaatccgaaagccagnnnnnnnnnnnngcagaatgtggtttacatccatgtctaacaattgaagaagctgttacggaatctaaagtttgttttgtgataatgaagctaggactaaaaatgtccttttaagccattacttacacaaacacaaaattattcacatttatggtccaactgatagtcatgaaagttaagtttgcatagggtcagtacatccaa

SEQ ID NO: 242790 - DNA, 1181 bp, Homo Sapiens
gagttgttgtttgtttttaaatccacagtacatgaaaatccttttttgacaagccttggaaagctgacactgtctctttttcctccctctatacgaaggatgtatttaaatgaatgctggtcagtgggacattttgtcaactatgggtattgggtgcttaactgtctaatattgccatgtgaatgttgtatacgattgtaaggcttatgtcactaaagatttttattctgattttttcataatcaaaggtcatatgatactgtatagacaagctttgtagtgaagtatagtagcaataatttctgtacctgatcaagtttattgcagcctttcttttcctatttcttttttttaagggttagtattaacaaatggcaatgagtagaaaagttaacatgaagattttagaaggagagaacttacaggacacagatttgtgattctttgactgtgacactattggatgtgattctaaaagcttttattgagcattgtcaaatttgtaagcttcatagggatggacatcatatctataatgcccttctatatgtgctaccatagatgtgacatttttgaccttaatatcgtctttgaaaatgttaaattgagaaacctgttaacttacattttatgaattggcacattgtattacttactgcaagagatatttcattttcagcacagtgcaaaagttctttaaaatgcatatgtctttttttctaattccgttttgttttaaagcacattttaaatgtagttttctcatttagtaaaagttgtctaattgatatgaagcctgactgattttttttccttacagtgagacatttaagcacacattttattcacatagatactatgtccttgacatattgaaatgattcttttctgaaagtattcatgatctgcatatgatgtattaggttaggtcacaaaggttttatctgaggtgatttaaataacttcctgattggagtgtgtaagctgagcgatttctaataaaattttagttgtacacttttagtagtcatagtgaagcaggtctagaaaataagcctttggcagggaaaaagggcaatgttgattaatctcagtattaaaccacattaatctgtatcccattgtctggcttttgtaaattcatccaggtcaagactaagtatgttggttaataagaatcc

SEQ ID NO: 242791 - DNA, 1159 bp, Homo Sapiens
  misc_feature (478)..(536): n is a, c, g, or t
ttctatttctactcccaaatgcaataactgaaaaaaatctgaagtacttccataaaatggaaaagaaaggagttggagatgaggaagagagggactggagtcaaagtcaaagaagagatgagaacaagaaagagggagtggaggacagagtcggtgcttgtgctttaggcatgacagaggccatcaagaggtctgcagaaagcccaggctggcaagatgcccgatgtgctaagagctgctgtggaaatggtgaagggaggaaaatgggtgacattttgggatggaacagctctcatgcatcccaaagctcaccactgtctctgtacatacccgtcactgtaagcggctgcagcggctgcagcagcggtggctgcggttgcagtagcaggctgtgcatatctgtaggctgcatatccaccctacaggagagaagagaactgactttacagatacctctccccccaggtgtacagaaaannnnnnnnnnnnnnnnnnnnnnnnnnnnnnnnnnnnnnnnnnnnnnnnnnnnnnnnnnntagacacacacatgggaagaaaatgtttcaaactgcatcagtctgcatgttattattcctccaataaaaaattaagccctacgatatgcaaggatttgctttccaatttgtgatagtattaaaagtaaagtttggtagtacctgttaaatacaaggaatgaagatatgattttgaatctgtcttacttcacagtctttgttggaactttcaaaagcgaaaatatttacagcaagttgggagcactctgacaagaaatataaattataaagttaaaatatatgaaatctgtatgtgttgacttcagattctctaacgtgttcttggattgattcattaataagagactacagcatgtaacagaaacctctgctccatccggcctagcatgtttgccaagaagctaagataatcaggtaatatttagaaggaaaaacaatgtagatcaggggtcagcaaactctggcctgtgagccaatgcagcttgccacctgtttttgaaagtacttgtgacagagaccaatgtcctacaaagccaaaaatatttaccacttggccctttacggaaagtttgccaactcagatctacatttcatacttgagcaaatcaattacaaatttccaa

SEQ ID NO: 242792 - DNA, 1767 bp, Homo Sapiens
aatgtagtcaccaggtaaccagcagggccatatacttgggcttggaggtgaggttagaggttactgtctaatacagtaggtctggtttctatgaggagctcatatccacttgcataaggaaacctagtctatcccaaatcacctccaccacaacttctattcctgtctattagaccacttctcttaaacccgaggaacctgatgatttgggggcagggataaaaccattattttataaatgtggcaggtatggccttcgtaattctagaagctcccgtttaggtaacagaaacaaaatttagatgtaagcataaactgcagttatttgagcaaaccagagcatatgtgctgttcaaatcccacttcacaatatacttcaatctcacctccaatgaattctcttccataaaataaaccattccactaagtatatacctactcccaccaaatcatccacatgcctcatcactaaagttgtcccttgtataatctaccagcaaaaagacaaaataaaacctgtgttaagcaaataatcacttaaacagtaataatattgcctctaaattaaaggtaagtcaggagctgaacactcaactgttaactcttctggggaagaagaaaatttttcccacaaaagcaggagtgcagtagtaagtaatgactttctctcagattcaagtaacatcaggtcaagataacctttgctgttagagttttgtttgcatggtgtggaactgctttataaactgagtagagacgtatgccaaaattatttttaacctaattaaaaactttcacagaaaacttgaagtgactgatactttatcacaacgaactgccatttaaacactagcataggtacacaaaaagatttatactatggttttcttggctttaagccattagaattagacaaaagcaaccgagagtaacattctaaaagtggcttcaactactttaaagacatgagtcagtttttgtcaggtcatttaatggtttctttccttcacaaagccactaaatgccagagtcaacacagatccctgagccatagctcttctctgaggggaaacagggttataatcagtcacaacattgtggaagacattaaaaaaagaaggcaaagttctgtataattttcaagactcttgtaagtagtaacacacagccataagcagccaaaatgcttatggtccctttatttcttaatagagggctagaaccgttcatttggggtaacacactaatctggtgttaaaagaatttcatgtgttcttgaaacaaaggcatactgccactgcttcaaaaaaagcctttgtgaaatgaagaaaaatatgacaaacacaggttcccacacgtacacatacatacaaaggaacctgcacacttgcacacacacaggcaggtataggcacacagttccaccaaagcgaagtccaaatcagagttcttaccgattctaccactctgtaatactctcagaagttcccacaactgcccaacacctcacctacccgtttcctgctgcacaaagtctccttcactctcatcttttcgatacatcgtcaggcagggcagaagggcactacgccgcagagcattcgaggctctcagcacactgccagccagcgtgaaaatgcggcttcactacagcccagagaaaagggccaggtttagtcatcgatccagatgcattttcccgggaaatgaccattcccaaacccacagaacagtttggcttttcccacctctcacccctatttccaa

SEQ ID NO: 242793 - DNA, 501 bp, Homo Sapiens
actttgtacaaaaaagttgggtctgccagctccccgaattgtacacgagtatattgggggctacattttcctgtcgacgcgggagcgggcccgtggggaggagctggatgaagacctcttcctgcagctcaccgggggccatgaggccttctgagggctgtctgattgcccctgccctgctcaccaccctgtcacagccactcccaagcccacacccacaggggctcactgccccacacccgctccaggcaggcacccagctgggcatttcacctgctgtcactgactttgtgcaggccaaggacctggcagggccagacgctgtaccatcacccaggccagggatgggggtgggggtccctgagctcatgtggtgccccctttccttgtctgagtggctgaggctgatacccctgacctatctgcagtcccccagcacacaaggaagaccagatgtacctacaggatgatgaaacatggtttcaaacgagttctttcttg

SEQ ID NO: 242794 - DNA, 784 bp, Homo Sapiens
actttgtacaaaaaagttggcttgaaactggctgctggccaagctttatagccctcaccatttgcctaaggaggtagcagcaatccctaatatatatatatagtgagaactaaaatggatatatttttataatgcagaagaaggaaagtccccctgtgtggtaactgtattgttctagaaatatgctttctagagatatgatgattttgaaactgatttctagaaaaagctgactccatttttgtccctggcgggtaaattaggaatctgcactattttggaggacaagtagcacaaactgtataacggtttatgtccgtagttttatagtcctatttgtagcattcaatagctttattccttagatggttctagggtgggtttacagctttttgtacttttacctccaataaagggaaaatgaagctttttatgtaaattggttgaaaggtctagttttgggaggaaaaaagccgtagtaagaaatggatcatatatattacaactaacttcttcaactatggactttttaagcctaatgaaatcttaagtgtcttatatgtaatcctgtaggttggtacttcccccaaactgattataggtaacagtttaatcatctcacttgctaacatgtttttatttttcactgtaaatatgtttatgttttatttataaaaattctgaaatcaatccatttgggttggtggtgtacagaacacacttaagtgtgttaacttgtgacttctttcaagtctaaatgatttaataaaactttttttaaatt

SEQ ID NO: 242795 - DNA, 529 bp, Homo Sapiens
tacaaaaaagttggcttctgttactcattttagaattatatctttgtatttgacttttgacaatttgactctaaggtgctttggagaagaccctttgggatcttggagcttcttctatttggataggtaaacctcttggtgtatttgggaagttttcagctattatttcattacatagcttttttatgcctttggccttatctctatctgaaataccaaaaatttgaatatttggtctccttatggtgtcctttatgttacatagactttgttcatttttatttatttatttttgtctaactgcgttatttcaaaagacccatctttaagttttgtaacttgatctagtctattgttaatctagtctaatgttaattcttttgcttgatctaatctaattttgaaactctcaattatatttttatttcattaaaaaattctttagttctaggatttatgtttggttattttttatgatgtttatctctggtgaatttttcattcatatcctaaattgtttttctgattt

SEQ ID NO: 242796 - DNA, 1095 bp, Homo Sapiens
  misc_feature (195)..(207): n is a, c, g, or t
  misc_feature (524)..(551): n is a, c, g, or t
  misc_feature (876)..(888): n is a, c, g, or t
ttggtgaacaagtagcatgtaatgcaactgtttgacagtttaactcaagtcatgcttcaaactgttttaatgatcaaatcaagacacatttcattttacattttattattgtacagtttttgtttcggatgatgatcacagcaatctttattctatacattttatgtgaacttttttaatgtctttaatttggannnnnnnnnnnnnagtattttaacatttattttaatcctgaagacacttttttgattgtgtttcgtaagagacaacatggcctcctaaggtgcaatcctgccgctatagtgagctaatgtcctgaatccaaaggcttcagaaaattgcttttgcctttttcatgaatgttaagcagcagcattgtgagatcgatctgtcctggcagttaacacgatgtgcaacagtgtgttagcatggaacagaacgcttttcacaaaacaaaggactgttttacaaatgattattccgacagtgtgtcgacataaacttttacaactgcacagcagccnnnnnnnnnnnnnnnnnnnnnnnnnnnnctttaactggatggacgttgttagggtgagaaataaaaggacagcctccaaaggttgagaatgagaattgttttttcctggatatcaaagggattatcacagcgcaatcattgtctacacaacatgtactctcaacgcctgggttacataggaaatgcaccctgaggttttaataaaagcccctatggctataactttaaataaactaaaccaaaaatgttattgatgttttatatatagagagtagtctcattagtttttgttactgtaatgtttgaagtctcaaatgcaccgtattacggtaaataacatggttttgaaaacnnnnnnnnnnnnngtcacagacctgttgtcatagttgaaatgatgtttattgtagatggtatttgaacttattcttctggaaatagttcatcaagtatgtttgttgctcattgtgatacattaaaaactgtatctacatatttactatgtgttttctttctgagttgactttgcaatatttgcacaaggtattaatttcccccacgtgaaggtgacccaa

SEQ ID NO: 242797 - DNA, 661 bp, Homo Sapiens
  misc_feature (313)..(322): n is a, c, g, or t
  misc_feature (348)..(411): n is a, c, g, or t
  misc_feature (432)..(465): n is a, c, g, or t
gttactttaatgaaaagtttataaaattaaataatttatcactgttaatggatgagtggcatgttgctaggttcctaaattctattttaagagctgtggaaacaattatttaattttaaaggaatattaagagttatgattaatacaaatatatttggcacataacaaagaataaatagatgtcctctccattcacaaaagtcctgttaatacgggatgctacatatcaaattaggaagtagctgctagttatgatagaaattattccacaaatatgtatcaagtgctaaatatgtgcagaagtgctgttccnnnnnnnnnnaagtcttcatctaataagtctaaagnnnnnnnnnnnnnnnnnnnnnnnnnnnnnnnnnnnnnnnnnnnnnnnnnnnnnnnnnnnnnnnncacttctttatgctgtttatnnnnnnnnnnnnnnnnnnnnnnnnnnnnnnnnnntttcattcttgtgaaatttaaagttttagaacagggaaagagacaatagatccataaatgtatgttaaagtaaaagtgggcagaagatgctgactttttgttttgtctcgagacagtcttgctttgttgcccaggcaaccttgaacttttggttggtttcaagcaatcctgccttggcttcccaaatggctggtgg

SEQ ID NO: 242798 - DNA, 1538 bp, Homo Sapiens
  misc_feature (966)..(983): n is a, c, g, or t
  misc_feature (1022)..(1033): n is a, c, g, or t
  misc_feature (1048)..(1339): n is a, c, g, or t
ttgggtcatcaaaccagccaaggtcacccctgcaccgactctgcagagagacttcactgcagcctttccaaggatgcttaccaccaggggacatggcccagcagagacacagacactggggagcctccctgatataaatctaacacaaatatccacattggccaatgagttacgggactctagattggccaatgacttacgggactctggagcaaccatcagaataggcatctacatcggagcagggatctgtgctgggctggctctggctcttatcttcggcgctttaattttcaaatggtattctcatagcaaagagaagatacagaatttaagcctcatctctttggccaacctccctccctcaggattggcaaatgcagtagcagagggaattcgctcagaagaaaacatctataccattgaagagaacgtatatgaagtggaggagcccaatgagtattattgctatgtcagcagcaggcagcaaccctcacaacctttgggttgtcgctttgcaatgccatagatccaaccaccttatttttgagcttggtgttttgtctttttcagaaactatgagctgtgtcacctgactggttttggaggttctgtccactgctatggagcagagttttcccattttcagaagataatgactcacatgggaattgaactgggacctgcactgaacttaaacaggcatgtcattgcctctgtatttaagccaacagagttacccaacccagagactgttaatcatggatgttagagctcaaacgggcttttatatacactaggaattcttgacgtggggtctctggagctccaggaaattcgggcacatcatatgtccatgaaacttcagataaactagggaaaactgggtgctgaggtgaaagcataacttttttggcacagaaagtctaaaggggccactgattttcaaagagatctgtgatcccnnnnnnnnnnnnnnnnnngagatggagcctgggcaacaagagtgaaactctgtctcnnnnnnnnnnnnggctaccaaatttannnnnnnnnnnnnnnnnnnnnnnnnnnnnnnnnnnnnnnnnnnnnnnnnnnnnnnnnnnnnnnnnnnnnnnnnnnnnnnnnnnnnnnnnnnnnnnnnnnnnnnnnnnnnnnnnnnnnnnnnnnnnnnnnnnnnnnnnnnnnnnnnnnnnnnnnnnnnnnnnnnnnnnnnnnnnnnnnnnnnnnnnnnnnnnnnnnnnnnnnnnnnnnnnnnnnnnnnnnnnnnnnnnnnnnnnnnnnnnnnnnnnnnnnnnnnnnnnnnnnnnnnnnnnnnnnnnnnnnnnnnnnnnnnnnnattttaaaaacctaccaagtgtttaacaagggtacatcaggtaatactaaataaggtttaaaccttaaataaggttacaggtaatactaaataagttaatagtaatgtttaagtattaaccttaatactaaataagtttaaggtttaaacacttaagggaagtgtttgaagtaatatcaaaggaaagagttttagaaat

SEQ ID NO: 242799 - DNA, 1809 bp, Homo Sapiens
  misc_feature (1103)..(1117): n is a, c, g, or t
taaaagccaactttgtacaaaaaagttggctagatttattgtctacaattcttttaatttcttatcagatttcagtatgaaaaaaagtgaatgaaataagcaaaagactatatccagttactgtaactaatgctaatttcataatctcttaatggtttaatgttatatcctgatggttttatgttttttgaccaatctttcaggctatccttttctgaccactcaaaccatgaaaacctgccctccctggaaaatccaagagccagtcagttcccacaaagacaacaagagccactctgtttggaaaactttggctctttttcagcagtcaccattggccttagaatacagagcattcttacccactggctaagattaacttggttagcagacagcctacatcccttcgtataaaaactgttcttaaaaagtagcaaacattgtcctaaatttccttaccccatccctgactatcatagattatatcagaaaacaatcataagctttcaggttacaatcagtagaaatactgagtggcattctcttctgtgtgaggtttaaattatggatagtcaatcaaaataaaggaggactgtcagttatcactcctgtgtttctttcttagtgaccacctctgaccacccaacttaatacttttactcctccctgccccaaagctgtatgtatctcctctctgctttatttcctccagggcatgtgtgcctcctgtgtgttgcctgcccccatgtggaagggcagctccatgggacgcggctctgtccacttagcttggtgtttgttactggggcccaaggatgttcagtgcttgtggaatgaaaaatagagtagaataatgaaggggattaaatatgtgacattttagtatgttgactgtattatacactgctactaaggaattgaagccgatgtataaacattgtgtctacacattatactattttatgattattgtatggaactttataatacaaaatttctttgcagtacaattttgagaaataggttaactctattttaacttaaaagtaccctaaaaattatttaattgtttattagtgagtaacaggctcaaatacagcagnnnnnnnnnnnnnnnagtattgctttgcatcctctaggcttgaatggtataaacactgtgttttgacttcttattcaattttagattaccaaagaagattttgccacatttgattatatactatgtatggatgaaagcaatctgaggtaatcctgtttttgaagaatatttctgttcaactctcagttcagcagtgggccaagtaatttgttgtccagatttactttttctattttaaaggttttaatagtcagtgatggtcaccatatgtagaattattttatttagaacagcaaaaaacttagtaatctagaattgtctcttaggtatttacaaggaaatacaccttagaaaagggaaagtctagttgttaatagcatgatttaattggaaaactagcttggctgttatagttttgtatcaagcatattgttctgcatgagaacgattttgatatttttgctgtaatgattcctgggcagggcagtgttttattgattctcacgtcaaagctctgcaaccatacgttcctattattatcccatcttgtaaaagaagaagtgagaaacggtaatgttaggttatgtccccgagttcacacagctagcatgtggtggatgtcatgggatttaagcctagctcagtgaggaaggccctgctgtatgcacccctgcctcagtcaccaccctcctgacctgcccagtccc

SEQ ID NO: 242800 - DNA, 776 bp, Homo Sapiens
tgatctgtcttctggtaggtgaattatatcttcgtttttaaaaaccaatggctgtttaaactctgtgcacaccaggggttagcaggacatgagggagtgtagctctgatgcggtgacctgggccggagccctcggactagcctcagctttggtggcagcacgccctgccttgtggagccacggcctcccgggacggactccccggctctcccccagccgcccgcagccgccggatgatcctctgctcccgtctctgtctcccacagtcggcctcgctgaggatggagcccgccccgggcctcgtggagcagcccaagtgcttggaggccgggagcccggagcctgagccggcgccgtggcaggccctccctgtcctgtccgagaagcagtcaggggacgtggagctggtgctggcctacgccgcgcccgtcctggacaagcgccagacctcacgcctcctgaaggaggtgtcggccctgcacccgctccccgcccagcctcacctcaagcgggtgcggcccagccgcgatgccggcagcccccacgccctggagatgctgctttgcctggctgggccggcctcgggcccgcgctcgctggctgagctcctgccacggccggctgtggacccccgcggcctggggcaacccttcctggtgcccgtgcccgcccggccgcctctgaccaggggccagttcgaggaggcccgggcccactggcccacgtccctccacgaggacaagcaggtgaccagcgccctggctgggcggctcttc

SEQ ID NO: 242801 - DNA, 826 bp, Homo Sapiens
ttggagttgactagcacctgctaccgcgcctttgcttcctggcgcacgcggagcctcctggagcctgccaccatcctgcctactacgtgctgccctgcgcccgcagccatgtgccgcaccctggccgccttccccaccacctgcctggagagagccaaagagttcaagacacgtctggggatctttcttcacaaatcagagctgggctgcgatactgggagtactggcaagttcgagtggggcagtaaacacagcaaagagaatagaaacttctcagaagatgtgctggggtggagagagtcgttcgacctgctgctgagcagtaaaaatggagtggctgccttccacgctttcctgaagacagagttcagtgaggagaacctggagttctggctggcctgtgaggagttcaagaagatccgatcagctaccaagctggcctccagggcacaccagatctttgaggagttcatttgcagtgaggcccctaaagaggtcaacattgaccatgagacccgcgagctgacgaggatgaacctgcagactgccacagccacatgctttgatgcggctcaggggaagacacgtaccctgatggagaaggactcctacccacgcttcctgaagtcgcctgcttaccgggacctggctgcccaagcctcagccgcctctgccactctgtccagctgcagcctggacgagccctcacacacctgagtctccacggcagtgaggaagccagccgggaagagaggttgagtcacccatccccgagtgggctgcccctgtgtgggaggcaggttctgcaaagcaagtgcaagaggac

SEQ ID NO: 242802 - DNA, 1313 bp, Homo Sapiens
  misc_feature (513)..(513): n is a, c, g, or t
  misc_feature (898)..(906): n is a, c, g, or t
  misc_feature (1134)..(1160): n is a, c, g, or t
  misc_feature (1223)..(1246): n is a, c, g, or t
cagattccaaagttctgtattttcaaaataaagatcacacattgtttagagacaatctacacaagagttacaaaaaatagttgcccaggcataagcatacacaggtttgttaattatacacatatggttacaagtgtgcttgcaaaaaagttcattggaaatatacacaaggctctggaaatgtacaccgtgtagtgttacaattctatattcaaacaaggaaaattgacagtatgttacattcacttacaagtagacaaaatgcaaaatacagttcatcttctgtacaaaagggaagggcgattcacactttacaaggtgagaggggctctgattgtaaggaaagctcgggcaaggctagacttttgcacgtccttttgactgtcacaaaatcaaaacattacttttttaggattaaaaaaacactagtgagaactcaatcttgaataacatttagaaagaatctcgctatacttgagactagatgacaaataaaaccaagctattttttcnctcttaaacattaactaggctgtataaagaacatttattccttcaaaagaaaaaaatttacttctggttgaaattacaatttacaatatacaacactatatgctacgaccataaaaggtgagaatatacactgaatgcacagggctggctaattctcttttcttaccaaaaaacgtgtttatgttgattcaaacttctccacatttacattacaggtatacaaatgtacaattgtacaatcaaaagtatgttcgactactagggtacattatagatacagattagacatcaaaacaagaaaatactacaaatttgtatatatgcaaagtctacaccaagtatacactatatatttatagaagcaagaccaaaagcagagttggannnnnnnnnctcatgctaaataatcagattttacctttcaatgttaatagaaaaaaatccagtaggcagtaaacaatcacacccgcccagcctcaaaagacgttctgggtgctcgcatctcctcctcacgaacagccttcttcagcataatatagtctccaaaaaaggcattttttagaatttcataaacttaatgtcacaaactgaagctttagcaactctgaaacctttttcatnnnnnnnnnnnnnnnnnnnnnnnnnnntttttataaacagtgttaaatgccagtttggggtcatttaactacaattcaaacttctcaggnnnnnnnnnnnnnnnnnnnnnnnnactaaaatgaggaggtggggaagagctatttgcaaaacttgccggccaggcaaatgagctaaaaacc

SEQ ID NO: 242803 - DNA, 1812 bp, Homo Sapiens
  misc_feature (323)..(376): n is a, c, g, or t
ggctgcccttgggagaagcggcggccgcactctcgcaggcgaagggccgctcgccggagtgcacgcgcgagtgcgccaccaggtgcgtcttcttgccgaagttcttcccgcactcggcgcaggtgaagggccgctccccggtgtgctgccgctggtgggcccgcaggaagcgctccagccggaagctcctgccgcagtcgtcgcagctgtagagggaggggggggcttcgatcgggtcctgcgggtgctctggcggggcccctggcggcggctcctgggccggtttcagaggtaccgccggggtgggctcggccgcggactcnnnnnnnnnnnnnnnnnnnnnnnnnnnnnnnnnnnnnnnnnnnnnnnnnnnnnncccctcggatcgcttgtgaatcttgctgtgagacagcaggttgggtttgtgccggaagcggcggccgcactctttgcacgggtagggcttctcgccggtgtggatgcgccggtgcgaagtcagatagggcttattggtaaagcgcttcccgcactcggggcactggtggggccgctcgcccgtgtgcacgcggcggtgagcgatcaagttgggcttgtgccggaagcgcttgccacaacaggcacactggaaggggcggtcgacggcatctccaccgggccggggggcggtcaccgcggggcggcccctgggccggggccccagagccttggctgcggcctcctccagggcctcagctacgtgcacccgcttgtgggcaactagctggtcccactgggcaaagctccggccacagttgccgcatatgaagggccgggcctccggggcgggagggtggcaccgccgcagatgagctcgaagctgctttcgtcgccagaagcgtctctcgcatttgggacaagcgatgggccgctttgcagctgaatgggcccgcagatgcagaaccagggccacccagcctcggaagctctgcccacagaggtggcaggcaaagcccaggtctggggtggcagcagcatggacctggcggtgcagtgctaagaagggggcatggcgaaagcgacggccacactcagggcagggcaagggcagccgggcctggcaccggcgggtgtgaagccacagagccacccagccagggaagtgccttcgacagtgggcacagcgatgggccctgcctggggcttgggcaccagactgggccactgacgtgccttgttgcctcagcccgcgggactccttccccagggtctggggtgactcctgggagggcccagaaaggagtcggggctgggccaggcccatggccagggggcccctgcaacgacgttccagcatcggttcttcctctgctgagggtggaaaagcacagtcactccagagaccaactcactctgcccctgtttctcccctcccaacctcagccccggacaggagctgccatctatgaacccctagagccccggacatggagctagactactctcctgtttccttgtgtggtatgtattatttcaatcttgggtttttagataacatttcaaggatgtttgtcttatgtctttgttgccctggaaacttccagaagggagggactctgatactagaatccccctcatggcagctaccccagtgtcagacagggagtaaatgctccagtgctgaatgcacaaacattcctgccacaggactcaccagaaaatgtggccactgctccctacagtgccttatgctgccctctccctgtgtctgctgtttcctatgccacatccgagctgcacagcaactctgagaagctggacaaacagacactgagc

SEQ ID NO: 242804 - DNA, 354 bp, Homo Sapiens
gcccactttgtacaaaaaagttggaggagttttaagtatgttaaaaatctatactggacagttacaagaaattaccggagaaaagcttgtgagctcaccaaacaaggatttcagtgtagattttgtctttcttgaacttaaagaaacaaatgacaaagtttgaatggaaaagcctgctgttgttccacatctcgttgctgtttacattcctttgtggagcctacatcttcctaagctttttagcaggtatatgttgaacacttctgtttcatggttgagacagaatcagaggccatggatactgacaactgatttgtctgttttttttctctgtctttttccatgactcttata

SEQ ID NO: 242805 - DNA, 952 bp, Homo Sapiens
acaaaaaagttggcacacttcctgaaactgcttgtcaacttggccgatcacaacgggaacacggcccttcactacagcgtgtcccactccaacttctccatcgtgaagctgctgctggagacaggcgtctgcaatgtggaccatcagaacaaagctggctacactgccgtaatgatcactcccttggcttccgcagagaccaatgaagacatggctgttgtctggaagctcttaagagaaggaaatgtgaacattcaagctactcagggaggccagactgcgctgatgctgggagtcagccacgacagggaggacatggttcaagcgctgcttagctgccaggcagatgtcaatctgcaggaccatgatggatcctcggccctcatgctggcctgtcaccatggcaacgtggacctggtgcggctgctcctggcacacccagcctgcgacagcagcctgactgacaaggctggccgcacagctttgtccatcgctctgaagtcacccacccatatggaaattgctgggcttctgagagcccacgcggagcagggcaggtccctggggctgtaggggctgcagaagaactggccgtggggaacaaaagccttcttctctggactcctccctcgcccttgaagagggcagaggtcacaggccagagagccacccttctagagaagaaactatgtcaaatatgcacatacattcctgttgtataattctgctcattaggatgctttgtagtttttgccttagccaagcctgaaaactacacgggcttcagagcaggttcaaggtgcaaggtgaggggtacgtcggtgtcatccaaatatccaaacatcttcagccttgaattcctcatgactctaccctctgtacattgtgtagcaagcaggcaggcaggagcacattagcacattagaaaagcaatactttttacatggaattt

SEQ ID NO: 242806 - DNA, 840 bp, Homo Sapiens
ttggctgtgtagtttttcttttgtccttcctttcccatccacactttccactctcctttcctctgagaggttgtgtctctgcagcaggccagctatgtctccaaagggaagtagtcagtgcttggactgagggaaccttgagagagaatcctctcctttgtcctccaggtgagagagctgttgcatccactcacacctggaaggttgctggtctcctctcgctggacactgagagctgtttaaatttgacaggtggttcctgattcccacctggcattttttgctgctgcacaggtctgtgttgtgtcttagaaggctgagggaatacttacttctcaactcagataaccaccttgttggtaggttcaatgtgtgtctgtgtcaaggcagatgctgggaaaaaagggcccagaatgtgagtgggaggtagaaatcaaggctagaagaccacacatgttaatctggagtacttggtcaggtttgattttggcctgtgtgctatagctgggcaagaagccagttgtgtttggaaatgtacagatgatctattttcctgatgaaaccttttgaggtctggaataaacatagcttgctttctctctttccctcttttgagattcaatttctctcccttggacttctataccctagtagagccaaaagttccagtacaaaccagttttgagactccagcattaatcaactaatggatgttgtaggtcatccctgaaaaacgagggctgcttgctctgggggaagctgggaaatggcaccaagtgtcatccctgctgcccaggatgggatgacagctgctggtgttaattacgtttctggcagaac

SEQ ID NO: 242807 - DNA, 1164 bp, Homo Sapiens
tattttaatctgaacttggaaacaactttcctactttaaggcacaggatcaggataagaacccacatgtacgagctaacagagctgcacttcaaatttactaagttaattaattttcccttcattggcttggctcaaggtagaaaagttaaaattcccttttcttagataaactgattatttaaaactgaaaattaacgttttgacaactcaagagtgtctgacatcgctgggatcctggagtgctgagtgtggcctcgatggtggcttcactcctccacatctgggaggcacttcagtgcctcagaatcaccccctttttttaaaagagaatggaggcagctactggaggccaagcacctccaggcactcaaggccctggggacagcgctactgactccactgcctcagggcaggcacggtgctgctctaccacttcctctgggctttgtacctttaattgtgtctactctgcctaagtgcttaaataaagcattccattaagcaaaatacacatggagcggattacacactggactgcagaactcagatgtatgggatgttggtaaaaattactggcatgctacaatttccatgagtgctgctgctttatagattatgacagaagactttcaacagacctgatttttaaaaaaccctcaacaaatctaatactaagggaaagcaactagatttaatgttgttacctgtcttccataaataccatagttaaatgttttgtgtgcatacatgttcgtatttgtctataaaggtattgatacgcttcccaaataatcctatatactaacattggaaatggtttataaagaggctttacagtcgcatgtcattcagcaggagggaatatactggtctttatgattacatgaaatatgctgtgaagctacagactccattataagtaaacccatggttcaaagtgtaagttataaattgaaacaaaatcaaaatctgctagaagggagggtgggtagacagccaccagccttgtttataaattcaaacaaaataagaatctgctagaagggagggtgggtagacgccacccgccccgtcacaggcactttggtttgtttggtcatgtgagttacccacaagttgtatagttccatgaaacaagctaaaagctccccaacttttttgt

SEQ ID NO: 242808 - DNA, 798 bp, Homo Sapiens
gttgttaaagaggcatatctgatgaagaaggaaatcagattagattcactcttcaccaagaaacagagcaactcaatggtgacaatatcaattttcccccatgtggctgaattttccattgcctttaaaaatgcttaagactttttgttcccatatcagcagaaaaaggcaaatcccttaatcaacctagtagtataaatggccagttaggcaacgagagactaagaaaacagtcttccttttgattttacacatgaatagatgatgtgaattagttttctgaagattatgtgaattagtttaaatgaccttaaaggcaagatgaaagaatctccttgagagttgtatcctctttggaagcaaagtattgttttgccccaagcccatctcgctcactgaacataccatttgacttaatttaccatatacgcttgtattttggaatttaaaaaaaatcaatgtacacattttaaatcattattaatgattattatgtaacaggaaaccagtggtttcatggatcctcttcctaaatacacctaaatgaacctatagatgacaggcagccccccaaaacatcaagctttaggtttctgtttgtttacaaaagggttactccacagacaggccacttagctgtgtgcatagtatcttctggaaagatttatttggaaattttccaatcaagtagaagaaccttccccagaaacctaacagtgagagctaatggcatgggctgtcaagctccatgggagacagtgggcatgccttttgccaacttttttgtacaaagttggc

SEQ ID NO: 242809 - DNA, 1535 bp, Homo Sapiens
  misc_feature (639)..(649): n is a, c, g, or t
  misc_feature (794)..(804): n is a, c, g, or t
  misc_feature (1167)..(1177): n is a, c, g, or t
ccctccacagtcagatatatacttaagggggaaaatactttcttggggaagaaagttacccaaatcaatttaatttaacattgaaaatatatataaacaaatcttggcatgggaaaatatcaaacatgaaaagcaatacatatacagataataagaaaaagcgtggtatctattatacagtataaatacaaacagcaaaacccaatacctttcccaacgacagaaccaccatatcatcctgccatttctgggctttccctacctcccacttggtgtcaatgaagtccacctcttaccaatagtcaccaaccttactaatggaggctgtgctctctatggggaaatctactctctctgtagtgatgagaaagaaatatagcaaattttcttggagtgttgtttaaaagtattggtaataactttctaaacactgaagtgtgtgataaaaagcatcaaactcatagatgccttccctgccactggtgtcaatgtgaccaatctagcaccccaagactctaacagggcagatctcaattagcacctgaaagcctatgagctctcttcatagctaaatcctagtgctaaaccaagaaaagttcatgatcattcagaaaaactgtttacaggctttaaacaccnnnnnnnnnnngagagccatggcttgccagggattagtttatggtaaagaggttatctataaacatttgtattttaagcttacaatatctaaattatgttcaaataattttaaaaggataaagtttaaatttgtaagatttctaaacctaagaggnnnnnnnnnnngaattataaaagtaactctaaggaacttttcctcccctgaatcatgttactctgtagctgtgctggcaagacagtgatttattgattctggtttccttaatattacagttgtttaaatttcagtttccaaacattttcatgagtatttttgttaaaactacttctgcttagtttttaatcaggccctcaccacctcttctctctgtcattccccaaacccaggtctccccaccccactgtgattcccttcaatctccttaaaattctagaatattttaataaggaaataccaaatggaaactggcaccactaaattttctgaagaattctagtgaatgtgtactttttccttttcttaaaggnnnnnnnnnnncttgcctgcaaatatttaagctctaatcatttgattaaaaattttctgcctgtaattatcaatatcatgactaattaaatccatgctacatatacagttactagcctttatgcaaaaggaaaagcccactctgttaatatcatcaaagaaaaatgagaattatttatactagatacagattaaattggctaaaaactggtcagtgccaaaacaagtgtctttaggaggccactaagttatccttgaaaaattattaatgaatgactggttaagtcaagtttaatagttattagttcataacatgctggatatgcccaagcaatgaagcataagcacttaaatgtaattgaatagccaa

SEQ ID NO: 242810 - DNA, 796 bp, Homo Sapiens
ttggccatgtttccactcgcacccgaggggatggcaggaaatacccaaagctggtgctggacacagaactggatcgcgaggagcaggccgagctcagattaaccttgacagcggtggacggtggctctccaccccgatctggcaccgtccagatcctcatcttggacttggacgccaatgacaatgccccggagtttgtgcaggcgctctacgaggtgcaggtcccagagaacagcccagtaggctccctatttgtcaaggtctctgctagggatttagacactgggacaaatggagagatatcatattccctttattacagctctcaggagatagacaaaccttttgagctaagcagcctttcaggaaaaattcgactaattaaaaaactaaattttgagacaatgtcttcgtatgatctagatatagaggcatctgatggcgggggactttctggaaaatgctctgtctctgttaaggtgctggatgttaacgataacttcccggaactaaatatttcatcacttacctgccctattcccgagaattctccagagacagaagtggccctgtttaggattagagaccgagactctggggaaaatggaaaaatgatttgctcaattcaggatgatgttccttttaagctaaaaccttctgttgagaatttctacaggctggtaacagaaggggcgctggacagagagaccagagccgagtacaacatcaccatcaccatcacagacttggggactccaaggctgaaaaccgagcagagcataaccgtgctggtgtc

SEQ ID NO: 242811 - DNA, 685 bp, Homo Sapiens
  misc_feature (247)..(256): n is a, c, g, or t
catcttttcaccctcttaacagggttttatacagagcaaaagttttcagttttgataaagtccactttactgatatttcctttatggactgttgcttttagtgttgcatttaagaacaactctacctagtcttagatcccaaaggttatctgttttttcctaaaagaagttttatagttttaaatttaagtatgcatgtgagccatgttaatttttgtataatgtgtaagacttaggctaaagttcnnnnnnnnnnaatcctatagctggtccagctgctccagcaccgtttgttgaaaggctgtccttcctccattgaattacttttgcaccttaaagtcagctgggcatatttgtgtggtcctgttcccgtgatgatctcggctctgtcgatctgtgtgtctgtgcctctgccagcattgcactcttggttcacatagctatatagtagatcttgaaatcagctggactgattcctcctctcactctattctttttcaaaatatttttgctataaatttgtatatgaattttagaataaccttgtctacatctacaaaacatcttctaggattttgataggaactgcatttaacctgtatgttaatttgaggagaattgatatctttactgtattctgtctagcaatccatgaacatggcatgtctatttaaatctttgccaa

SEQ ID NO: 242812 - DNA, 300 bp, Homo Sapiens
gagattaatgcatttattccaagtaattaacacattaaaaataaagttaaacttgtccaagccaactcataaattctttaatctttttaacaaaatatacaaccccaaacatcgtactatggttgaaattaattgggaaaggaggaggtagaggaaaggatacatatgggtttgtggaacagggaatgagttcaatctcaagacaagtttcagagatcttctaccccttcacaacacaaatggctgctaaacaatttaatacaaagtgttattggatcacaatacaatgaacaaagccaa

SEQ ID NO: 242813 - DNA, 919 bp, Homo Sapiens
ttggcccaagatggcgggggacgtgtccgttactcaccggcccccgctgagccctaagtctggggccgaagtcgaagccggcgatgccgcggagcgccgggcgccggaagaagagctgccgcctctagatccagaagagatccggaaacgcctggaacacaccgagcgccagttccgtaaccgccgcaagatactgatccggggcctcccgggggacgtgaccaaccaggaagtacatgacctgctcagtgactatgagctcaaatactgttttgtggacaaatacaaagggacagccttcgtgaccctgctgaatggggagcaggccgaggccgcaatcaatgctttccaccagagccgcctgcgggagcgtgaactgtcggtgcagctgcagcccacggatgccctgctgtgtgtggccaacctgccccccagcctcacacagcagcagttcgaggagctggtgcggcccttcggcagcctggagcgctgcttcctggtctacagtgagcgcactggccaatccaagggctatggctttgctgagtacatgaagaaggactcggctgcccgtgccaagtcggacctgctgggcaagccgctgggaccacgcaccctctacgtgcactggacggatgccgggcaactgacgcctgcccttctccactcccgctgcctctgtgtggaccgcctgccacctggcttcaacgatgtggacgctctgtgccgggcgctgtcagctgtccacagccccaccttctgccagctggcgtgcggccaggatgggcagctgaagggcttcgcggtgctggagtatgagacggctgagatggcggaggaggcacagcagcagcggacggcctgtccctggggggcagccacctgcgagtctccttctgcgcccctgggccccccggcc

SEQ ID NO: 242814 - DNA, 948 bp, Homo Sapiens
tacaaaaaagttggctcttctccagtgaccctgccaccagtcatggctcaacagtctagaagtgggcacttgacccaagctgggctgatgagtggctcccccgggtacagattcaggatggtatctcatcagtgtaagtaaaacataagagtatttagtggttatatttccaactacctggaagaaatgaatctgtaaggcgaaagagtgggctggtcctcacacgtagagaagatggggagagggtcctggagtcactgggctatctgcctccagcctgtcccagaggcctggctgcagcctgctcttcatttgattctgggagctcacatctcctccattttgccttagcaaggtctgcttgggtttctgtgatttgaaaggcccaaatgaaatgttccctgaagaaaggcctcgctgtcaccaccttgctgcagtctggctctgtaggaagctcagggcctgggtttcctctgatgacaatggctgactaacaacagtcacttggcctggaccttaggatcccaggcagctgttttcacatttctcccagctgggcaagggtggccagagtggtgggtactgcacaaccacagacttagacaaaatcaacaccaagatccaaaacattttaaatggagcattctggcttttgccaaagtgcacaaagaacagggagtgtgaaaatgaggctgtcccaaggaggaggctgcacagaggcgccatcaaacatgcggctaatgagatctgggctctctcgagggtcatccagtcagatgagcctgtggtttcaccgaattggcttcagctaacttggtcaggcacccaatgcataggccctgttatatcccagatgtgatgcctttccccaacagagatggtggtaattgatgaacaaactggaggctatggcaaggtgctggaactcagatatacagagaatatggg

SEQ ID NO: 242815 - DNA, 479 bp, Homo Sapiens
  misc_feature (445)..(456): n is a, c, g, or t
gagcagaacagaaaaaacaaagaacctgggtcctgatatcgggttacctgaaactgccctgcttatacacttcctattatgtcataaatgtatccttattgtttaagccatttttaggtttatggttttatgtcatctgtaactaccctcactctactccttccattagctctaaaactcctagaactagctgtctggaaacaacatccctctttatccttctaatggaggaaccacaattgtcacttcttcatcagtccaccactattgttactacagtatcactgtttattgaggtccttcaatctgtcatgttatttcggtgcactgggcttctgtccatggctaacaaaacagcacaaccaacaaaaacttaaaccagcatttactgaatacatactatgtgtaagacatgaagacaatttttttcccattaaagagactnnnnnnnnnnnntttgggccgggcacagtggctca

SEQ ID NO: 242816 - DNA, 904 bp, Homo Sapiens
taacataaaaaataataataaagctgttattgctgtggcattaacattcctctaaaacttagaatccctggattaatctgtacaactagaactacttattcagttactgtggctattgagatcaaggcactgttgattggtggtgacctttgtataaatagctaaggacattgcagaggatgctgtctgtgtgctgtaggcatagacatgggtgatcatttgggagatttatctctaatgaaaaaggccactcttttctaagaccatcatgagcagaaagacatggagaaaggggttggtaaaaggacaaagtatatgttggtataattgtaggaataacaaactagagtcaaaagttatctaaaatcctctgttgtgtccatataaagtattctgttattgatctgctgtaaaaatctctcccacagtaaaactgtattcctacaatgcctgtgtccttctgggtatgtgcagcaaaatttcattttacattctgcctcagctgataacactttagcttgtttaaaaatatagataagtcttagaaagggaagccaggaggatatgttattcatcaagcaaatctcagaaagagctgttggttctgtgtgtataataaggcaaatgtggtgtttttgttttttccatatgatagctgagcgtgctcgagtgggtcttgcaccattgcctgataaatacagaagctgtatattaatagatacaatgttgccatagattcttcctcaacagcctggtgtctcacagaaaggatcagatgtcaggcagttccggttgctgaggatacatcagcaaagcagagacaaaaatacctgttcttaggatgttcaaattctagtggtgggtgcacctcctggttgccgcgactacacccaacttttttgta

SEQ ID NO: 242817 - DNA, 306 bp, Homo Sapiens
cctgcaagcagtttctttaactctgttgggatgccattcgtgggcaaagctagatttgggacaagttgcccagctctgctaggaagagtcagtcctcagggggaagtttcttttcacctccgggatccccagggcttcctgggttgactcaggacttcatacgcagcctggatctccaggaagtgcctctgtgcctcctctgtctggtccaggttgtggtctgggtgccagaccttcactagctcctggtaactccgatgtatttcttcatttgttgccccttctgagccaacttttttgtacaaa

SEQ ID NO: 242818 - DNA, 1765 bp, Homo Sapiens
ttttttctgtactcttcttttttcttaaaagcatgatagacccctctgcaaatacagagcccttgttgtggctttgctgtacttttggtaccttgctgtttattccttagtctagcagcatccttagtttgtagtatatcttaccttagttgcaaataaaaaaaattgctagcctaggctttaactgggagtttctattatctagaaggttactgtgaacctttcagaaaagtggaaagcaaccaaaagagctgtctcaaagactgtgtccccccagagtttgtccagctcttactgtagacactctgaacaggcacggttatctcatgtccaaagctcataacagcacattagaagaaagtggggagcctgttagaagcaggcatattgatagtgtgggagaagacatagcaaattacttagcagatattttaaaaattttaaaatccaacagcagtctgaggcaaatgattctgtatacctcagggctgagagaatcactttataacatatttgttatagccctttacattttatgaagtgttttacatacatcagagctggatacttataataatacattatgaatataactttaacttttcatcatgaaaatgtgaattatactgagcatgatgtttaagaagaaggcaggaaggtatactaacatacctgaaatactcacatcaaaaataattacaagttttaaatgttggcacttgagagatatacattagctatccaaaaattcatatgtacggtttccttcaagaccaacacggggtatcactgagtgaattttcacagcgctcagtgactgctggtcattaaatggggatgattgtcatcagtataagtatcacactatttgtcctgctaaatgcaagttaaaagatacttatggatgccactaccacatattctgacaaataagccaaacactaggcttttaaaagattcttagagtgttttccctatattgcactttctagataacacaattttaacaatgatataatgtgatcttggttctagacacagcagtggggaacacatgaatttacctttttcttgttccttttcttaaagtttttagtatagtctcaggaatatagcaaggagaaataacaaaatatacatgtgctttgggcttctgaggaaaaaagaccacccacacacatttttaaaagactaaaatagacgtctcttctgctttagccatttcattttcacaactgaaaataaggaactactatatatttgatgtccctaactcattaaacatagcattgccataaatgcactgttctgcggaaaactttttaaaacagtagaacaatttgtactgcatttactaacaattatactacattaccaattatcatgaattatgaataaaaattactgaataaaattcagagtaaaaaacatcagattagattttactcttaagtgaaatggggctttgaaatgttaagatgtaatttcttccaatactatagcattcctaatgccctttaattccttgattaatattccttgctaactttttgatcatcaccatatctcaaggaggacaaaggttcttttgagtttgctggctgttaatttttaattctcatctgtgtggctcggttttttttcacaatgccgtttatccttaatttttcttttctattttatagctgcttattctgcttgaagttttttagtcaggaatggccagaatgtgtgccctgagccaacttttttgtacaaagttggc

SEQ ID NO: 242819 - DNA, 906 bp, Homo Sapiens
gcgagcgcgctccacaccgccctccccgccgacccatcgcgttcaccacttttacccctctctccccactcctcttctccgaccctccgggaggccttccccacggtgagatgcgctgattttcccagatcgtcctttggctcggctggcttgaaatcgaggacttttaaatccgatttgctttttcatcaaatccgaagggaattgtgtgtggttttgccctccttaacaccttggtgtgtgccagccgtctcctggcctctgactcttgcttggtgtgagatgtgttgccaaaacgattcccttctttccagttctaaaaactccccgaattttagtgcagtctagatttagtctagatttagattttccctctcaaattgttgcaatccattgttgagacagctgttaagcagctgtcactctctgctcttagatggaataggggaaagttgccataaaaacaacgtgttctgtgttgcgtagaaagagacttaagttctttggaaaatgtcttaactggtgggtttttaaccgtctaaaattttgacattcttttatactttgtttccatgatttgtctcgcattctctgcagggatcgtgggactttaccagatcggtttgtaataacacctcaaagacgctatccgatccatcaggcccagtattcctgtctgggggtacttcccacagtgtgctggaatggttatcacaagaaggctgtgctgtcccctcgcaactccaggatggtgtgtagcccagtgactctgaggatcgcccctcctgacagaagattttcgcgttctgcgatgtgagtattatcgttggaagaatactctcccttttcgtgtccactttattcttctccagttgttcctatgacaacatgacccaacttttttgt

SEQ ID NO: 242820 - DNA, 236 bp, Homo Sapiens
ctatcaatattcttaaaggccaaattcctaacaaaacggatcatcaactcactcttaacccaagattctctccataagctccttttttctagttttcatgtagattgcccatctcatttcccccattcacttctccatgctatcccaacactagttttctccaatcttcaatcttcaattgttttgaacaacaattaatgtgctttaaggagaataaccccaacttttttgtacaa

SEQ ID NO: 242821 - DNA, 1075 bp, Homo Sapiens
tttgtacaaaaaagttggctcaaggaaggagcagcttgtgtttctgatcaacaactatgacatgatgctgggtgtgctgatggagcgggctgcagatgacagcaaagaggttgagagcttccagcagctgctcaatgctcggacacaggaattcattgaagagttgctgtctcccccttttgggggtttagtggcatttgtgaaggaggctgaggctttgattgagcgtggacaggctgagcgacttcgaggggaagaagcccgggtaactcagctgatccgtggctttggtagttcctggaaatcatcagtggaatctctgagtcaggatgtaatgcggagtttcaccaacttcagaaatggcaccagtatcattcagggagcgctgacccagctgatccagctctatcatcgcttccaccgggtgctgtcccagccgcagctccgagccctccctgcccgggctgagctcatcaacattcaccaccttatggtggagctcaagaagcataagcccaacttctgatgtgccagaaaccgccctgagatctgccggtcatctccatggacttctgcaccccattccatacccttcttcacctggggtaccccttccagttttccccttgcttcccaggcccttgacatggcttacctgccttcactcccagcaccttgcccaacaggataagctggatccccttggccttctgaatatcccagtgtcttcaggtttcccaagaccacttccctgtgggcttccaaatggcctttatcatttctccagtctgtcaccctcctttcctgctcccatacacccaagcttgtttcttcccctgtaaaaaccactgcctcaatctctggttcactcaactagtcaccatgtcctgaggcatgaagcctcctcagctcttggaattgctggcaaggggtgactgcctctgagtcattgtgtttttcagagtgatttcttttctgtagctttttgacctaagatctcagcaatttgaacactaacctctcccctcctggctcagaattactccgaagtcagtctgcagaaaataaatattta

SEQ ID NO: 242822 - DNA, 896 bp, Homo Sapiens
ttggcacaggtactgggaacaggtgcttgccttgctatggccacggtttgaactgatcctggagatgaatgttcagagcgtccgaagcactgacccccagcgcctaggggggttggatactcggccccactatatcacacgccgctatgcagagttctcctccgctcttgtcagtatcaaccagacaattcctaatgaacggaccatgcaattgctgggacagctgcaggtggaggtggagaattttgtcctccgagtggcagctgagttctcctcaaggaaggagcagcttgtgtttctgatcaacaactatgacatgatgctgggtgtgctgatggagcgggctgcagatgacagcaaagaggttgagagcttccagcagctgctcaatgctcggacacaggaattcattgaagagttgctgtctcccccttttgggggtttagtggcatttgtgaaggaggctgaggctttgattgagcgtggacaggctgagcgacttcgaggggaagaagcccgggtaactcagctgatccgtggctttggtagttcctggaaatcatcagtggaatctctgagtcaggatgtaatgcggagtttcaccaacttcagaaatggcaccagtatcattcagggagcgctgacccagctgatccagctctatcatcgcttccaccgggtgctgtcccagccgcagctccgagccctccctgcccgggctgagctcatcaacattcaccaccttatggtggagctcaagaagcataagcccaacttctgatgtgccagaaaccgccctgagatctgccggtcatctccatggacttctgcaccccattccatacccttcttcacctggggtaccccttccagttttccccttgcttcccaggccc

SEQ ID NO: 242823 - DNA, 924 bp, Homo Sapiens
actttgtacaaaaaagttggaactcgagtacttgttgacattagaggagaaatgccaaggaatttaagagaatacatggttgaaaaaatttacccacaaatacctgatcacctgaaagaaccattcttagaagccactgacaattctcatctgaggtccatgccagcaagcttccttcctccttcatcagtgaagaaacgaggtgttcttcttttgggagacgcatataatatgaggcatccacttactggtggaggaatgactgttgcttttaaagatataaaactatggagaaaactgctaaagggtatccctgacctttatgatgatgcagctattttcgaggccaaaaaatcattttactgggcaagaaaaacatctcattcctttgtcgtgaatatccttgctcaggctctttatgaattattttctgccacagatgattccctgcatcaactaagaaaagcctgttttctttatttcaaacttggtggcgaatgtgttgcgggtcctgttgggctgctttctgtattgtctcctaaccctctagttttaattggacacttctttgctgttgcaatctatgccgtgtatttttgctttaagtcagaaccttggattacaaaacctcgagcccttctcagtagtggtgctgtattgtacaaagcgtgttctgtaatatttcctctaatttactcagaaatgaagtatatggttcattaagcttaaaggggaaccatttgtgaatgaatatttggaacttaccaagtcctaagagacttttggaagaggatatatatagcatagtaccataccacttataaagtggaaactcttggaccaagatttggaataatttgtttttgaagttttttgtatataatatgtaaatacatgctttaattggcaatttaaaatgaaggg

SEQ ID NO: 242824 - DNA, 900 bp, Homo Sapiens
ttggctaggaggcgccggtacgcggctcaacgggctgggaggtctaaccggaggaggtagcggcagcggctgtaccctctctcccccccagggctgcggcggcggcggcggggggatcgccctgtcgccacctccgagctgcggagtggggaccctactttctaccccggccgccgccacctcttcctcaccctcctcatcgtccgccgcctcgtcctcatcgccgggctcccggaagatggtggtgtcagcagagatgtgctgcttttgcttcgatgtgctctactgtcacctgtatggataccagcagccccggaccccccgattcaccaacgagccctacccactgtttgtaacatggaagattggtcgagacaaaagattacgtggatgcataggtactttttctgccatgaatttgcattcaggactcagggagtacacacttaccagtgcccttaaagatagccgttttcccccaatgacaagggatgagctgccacggcttttctgctcagtgtctctgctcactaactttgaagatgtctgtgattatttggactgggaggtgggtgtacatggcattagaatagaattcatcaatgaaaaaggatcaaaacgcaccgccacctacctaccggaggttgcaaaggagcaaggatgggaccatatacagaccatagactccttattgaggaaaggaggatacaaagctccgattactaatgaattcaggaaaaccataaaactgaccaggtatcgtagtgaaaagatgaccctgagctatgctgaataccttgctcatcgccagcatcatcatttccaaaatggcattgggcatccccttccgccatacaaccattattcctgacactgagccgcacaaccagtcactggggc

SEQ ID NO: 242825 - DNA, 225 bp, Homo Sapiens
gccaaggcaactttggtttagggtgttccaagtagagaaaaagggaatagaaagatctcttgtaggggcactcctagccctgtaatctacttgttaaaggatgagccaaaagttaaaactaagaaatgtcatttaacaaattgtaagcatctgtattcacgactaccctcattagatgcttacaatttgttaaattttttaagaaatgtcatttaacccaacttt

SEQ ID NO: 242826 - DNA, 666 bp, Homo Sapiens
  misc_feature (538)..(561): n is a, c, g, or t
gacattagtcttttattataaccatattgaatggggtcgctttgccaaaaggagaaatcatttcttaaatcagtatgagttatagcataaagatggatgagaaaaaagcgatagggcatacatggcgtcactgaatattccatcaatcaaatgaattgtgccactgtgagaaaaactactatgacagcttttacatcaaagtggtctcaagcctgtttatacgaactttatatatctttttaacagtataaaaagagagctttagtaagtaacactgagaaagcagtctggcctttgagaaggaagcctggcttgccaggtgccatcctcaatgtatccggcctcttctctctgctccacagcctccccagtgcccctcctccagacacacagggcaggggccaggggccaggtgtgtgtccgcaggaaaggagggatggaattggttggagccgccacagaacggccactctatgtggggacctaagtcctccgtacacactcctgttctataatgaacccttggagcagttccttnnnnnnnnnnnnnnnnnnnnnnnntaatgtgcatcaactctgactcacaggttattcttaggaggccagcatgactgccacagagtttgatatttgttcagcatctctgacaaagtagaggaggcccaa

SEQ ID NO: 242827 - DNA, 1355 bp, Homo Sapiens
ttggaactcctcaatacctgccttttgagctgtaccatgcaggagctaattggcttatatgttaccatggaggagtacttcatgagggagactgtcaataaggctgtggctctggacacctatgagaagggccagctgacatccagcatggtggatgatgtcttctacattgttaagaagtgcattgggcgggctctgtccagctccagcattgactgtctctgtgccatgatcaacctcgccaccacagagctggagtctgacttcagggatgttctgtgtaataagctgcggatgggctttcctgccaccaccttccaggacatccagcgcggggtgacaagtgccgtgaacatcatgcacagcagcctccagcaaggcaaatttgacacaaaaggcatcgagagtactgacgaggcgaagatgtccttcctggtgactctgaacaacgtggaagtctgcagtgaaaacatctccactctgaagaagacactggagagtgactgcaccaagctcttcagccagggcattggaggggagcaggcccaggccaagtttgacagctgcctttctgacttggccgccgtgtccaacaaattccgagacctcttgcaggaagggctgacggagctcaacagcacagccatcaagccacaggtgcagccttggatcaacagctttttctccgtctcccacaacatcgaggaggaagaattcaatgactatgaggccaacgacccttgggtacaacagttcatccttaacctggagcagcaaatggcagagttcaaggccagcctgtccccggtcatctacgacagcctaaccggcctcatgactagccttgttgccgtcgagttggagaaagtggtgctgaaatccacctttaaccggctgggtggtctgcagtttgacaaggagctgaggtcgctcattgcctaccttaccacggtgaccacctggaccatccgagacaagtttgcccggctctcccagatggccaccatcctcaatctggagcgggtgaccgagatcctcgattactggggacccaattccggcccattgacgtggcgcctcacccctgctgaagtgcgccaggtgctggccctgcggatagacttccgcagtgaagatatcaagaggctgcgcctgtagctgcctggatgagcacacctgggctcatcacacttgcaggcctgttccctaaagggccccagccaaggagctgagcgaggctgtcgggcttgggggagatctgacagcccagacctttctacggctggcagcagagaaacaaagtctggaccactccatgctctgccctcagacctggccaggtgatgctctggggg

SEQ ID NO: 242828 - DNA, 794 bp, Homo Sapiens
  misc_feature (70)..(83): n is a, c, g, or t
acctttgctcctccattcgacccccaccctgaactctcagcagcaactccaggagctcttgcccccctgnnnnnnnnnnnnnnctctgaccgctgagcttccatccgctggcactggtgactgaggatagtgctgtaaagctgttctctgtcctcgagaggacggagtggggcaggggctaggcttgaggggttttggggggtgtagaaggtggccctctgctcctccaggcggcgggactgggcttcagccaccaggtccagaaggagttcagtctgcagggagagcagggaggccgagcggggtcccagggctggggagaggggtgtggagggctcagagacccagagaggttggcagacaggagccgtgggggagtgtggacagggtgacgtgattagggactttggatcagaggagagggggtgcaatggggaatcccaaggggagtctggaggaggtggggagagggcccacaatggagtgggccttggtaatggggtcaggatgtgggcactagggtcggggctctccctgggtgggtaggggtacctgtgtggcgggtccctggaggaggaggggatggaggagcagatcgccaaggccgagtggtggagtttggagggggccagccttcctcatcctgaggggggccctgctcaccatcctcttcttcctggggtctctcagcctccatcccctagaggggagaaactggtgggggaggggtggctgggatttgggaggagggctggaaccttgggttcctgaggggagtgggggctggaagccaa

SEQ ID NO: 242829 - DNA, 1079 bp, Homo Sapiens
  misc_feature (764)..(855): n is a, c, g, or t
caagcatttctgtgactttctgtacattcacaggcacattttccaggatttaggggttgatttctggggcaggttcttttacatacacactggcatgtgttttcatcaaattctcggttggccccacattggctggggaagagtttgtttttacagacacactggcatgagtttctgtctagttctttgtggggtccacagctggcaggccgaagccccgctctgcagacacactgacaggtctcttcatccagctccttgtttggtccacagatgtcatggaatccatctgttgagtcatctccagcatccgaggaaaacataaaatcttcctgagccaggcatctgcagatgtgattattccacatgtaattggtggggcaggtcttgttcgctgcctgacacctttggaagaaacagacgaggtttagcaatggtgtaactggtacctagaagggaccatctctgctcacatatgtatcaaaataatgctcatagaaaagctttaaaaatataagaattatgaaataaaatgtgaatgttttctcccaaactctctctacccacaactgctataaaatttcaattccagaggtgatcactgtttgtggtatggtcttagaggacaccagacttttatctttttaaggcaaacacattggtttgtataatcatatagggttttagcttgtgaaataaataaggtaaaaccttttgctttaaaatttttttccattatacaatatatcatggacatttttatnnnnnnnnnnnnnnnnnnnnnnnnnnnnnnnnnnnnnnnnnnnnnnnnnnnnnnnnnnnnnnnnnnnnnnnnnnnnnnnnnnnnnnnnnnnnaggtaactatctacatcactttgattttggcttttccaagcaatactggaggaaacatctatgtaaatgtatctttattgacttatttctgaagcacagatccccatcttgtaaagcctccagaaatgcaaaatttccactctgtactcccccaaaaagttatcaaagatattttgtttcattgttgttctagctctttacttccttccttccctccctcccaa

SEQ ID NO: 242830 - DNA, 959 bp, Homo Sapiens
aaacaaacaaacaaaaagatgtttgactgcaataatgttaaaatctatttatcttcaaagttcacaagataaatacatctataaacatgcttcacctcagtaattaaataaataaagcacaatatgtcatacacccccattaaacctttataaaaaatgttaaatgttgatgagtatagggtaacaaccactcgaaagagaatacaaatttatcccttttgattaatattgttcagtatgttttaagagccttcaaaatgtacctaaaaaatcaattctggcaatatacaagagagagataatactatatacaagaaacatgtataaatatgttcttcacataggggaataacatatgttcactgcacagaacattttacaatcatttataatgatagttattaagatgcattgtgagaatgggaaagtggtacctaacagtaggttaaaaagcaggacatgaaattaaatgtttttacccacaaatacataaaaaatatacattaaaataatggaagaaatatatcaaaatgctaataattgttatattaattcccaagatctaattcctcaaaccagctttcaaaatcattaaaatacatacacaccccttatacacaagtcaaagactatctactttaccactaatggaagcataaggtttaaattaacatagtaaatgagacagaggaggccagcaatgcaatgaaaaaaactcactacaaaaacctggcaccttaggacacttgggctaatagactcaataccaggattcaaaactatacaactgaatcatatgcataggtcatttactaattctaattatctgctttactatcttctccattagcaaatgtgctaatctttaggcaattggttgttcattactgatatcaaatattaaatgtaatagagccttgtttgggagtaattccttgaaatattaagtagaaagccaa

SEQ ID NO: 242831 - DNA, 923 bp, Homo Sapiens
ttgggtggtcagggacctgacacccacctcacctggagccctgagtgcagaggaagcccaggcggggatgggggaggggggaggcgctgcagctgaggtcaggaggataccccggagatgggcagaccccctatcctggggacacgtctcaggcctctgggactctgaagccctggccagccccaaaatgctaggacctaaggtgctgggctctgcgtttgatcagcattgtctccgcctgggaccactgccacccaccttgcagttgaggatactgagggtcccggaatgccaggggtgaagggggcggggtggagctggggtcctggccccagacctctccctgtcgcccctccctccctccaaactcacaagggagaagccaggtcttcagaatgccccttccaaaagtcactgtagagatggccggtttctaacgtggattccttgcgctcttctgaaagaccagcaacacagaggcccacaggctggtcctggtcccctctcctgcctcccaagggcagcctcatccaacatgagcttgccctccctggagcccccagacgccccctctaccctgatggggtgatcctgcccccccgtgtgacaaccttgggccccaccaagccgctaccctcactgacccttcacctgcttgctggcttcttcccacgcgcagaggcagtaatgaaacttcaatttgaaccatcagtaatgaaacttcaatttgaaccatcaggaaaccgtgaggcaagcccgtcaccccacacaggctgcggcatcaccctcagaccttggagcccaaggggccactgctcttgaagtggagtgggcctagagtgtggcggtcctcatggtggcagctccccgactgatcatccagacacaaaggtcttggttctcccaggagctcagggcctgtc

SEQ ID NO: 242832 - DNA, 937 bp, Homo Sapiens
gtttttatagtccaactaaatatctttttatttgtaggtttaaactgcttagacaggacttccttacccccaatatttcataagactgttcaccttattttctggcaaacttaccattttccattttttccttttaagtctcagttccactgaaatttgtccaagtgctggccatgcatatgtctcaattttcacccagatggataattagttcattcattcaaccaaccatgcagagcatgaacaaaacaggcatagacttttcctcatgagtcccctatctgtataaccacaatcaaaagagactccagaatgatgccaaggcctgaggtccttcaaattagcatcctcttagccatttttaatactgtcctttccttaagcccctaaaaccaatagatcagcaggtcctgttgctaactccttcccgaaatgtcttctctaagccttcctctctctcccaactctgcctatcacaggccacaccccccattgcagcagcccttgaacttgtttcctgcccccagcctctctccagtcaagattatcttctataccaaggattggcaaattgtagcactggctaaaactagtctgcagctggtttttattttaaaaatattattcaaatacagctatgtccatccatttatatatggactgtggctgcttttgtgctattttggcagagtcaagttttgagtcagataccagatggctcacaaagtggaaaatatttactatcttggcctgtacagataaagtttgcccacccttgttttatatcatagtgggggctatttcccttaaaaaatactactccccttcttcagttccttcagtgatgctccattgctcagggtcaagttcaattgctattgggttgcacaccacttagtgaataacttacatgttcccacctacttgaaatgctgca

SEQ ID NO: 242833 - DNA, 1558 bp, Homo Sapiens
ttgggaacattttgaaaaacttatctttttgaaagtgaatcttcccttaatatactttcagtattgaaactcacgacggcaccactaggccagaggcgtggctgccccagcgttagcagcctgtaccaggtctatgacccgctctgcccacggctgtgtacgacatcagaccaggcactctcagggccgctctccagctcaccacagtgtctccacgtgccttaccccttctccttcaggccaagtttcgcggggtgttttattaagacgtccactagaaatagcttgtcctgtcaactatgaaatatggtggctagattttaattcataaccgtaaagttttttaaagttttgggttagtaatttgttttactagaatgacaaagaagatgtaaaccattttattctgtaggctttttactcaattatgtacaaaccacaaatcaggtactgtattttagtgaagcattgctttaattgcaacagaatagcttttgtggctatcaaatgaaatctgtaaataggaggtggagggcaagccatcctgactgagcagtttttaaccgcaggttctaaagtgtcccgcggagtacagataatattctggaaggtaactgtttactacgacagagacgtggcatttggaaacgaaacttagatgtttcatggagcttattttgagaactttcccatttcaggtttctgcattcaggctttacatggtcagttaactcagagataccccagctgtttatcatcagctcctctgaaatgtgatccctttgtaactgtgctcatcacttcgccagtgcgttcaatgacacgctgatggcaggtggtccctgctgaaacccccacgcctccgcttcagcatctccacgctctgaagctgtctttcaaaatgtgtgcactgacccccttgtttgatcaaatttgtgtaaaatttttttagaagagatggcttattaacagggaagaagcttgttatattccagttgtaagaatagccttagtgtttagatttttttatgatagggaagatgcggccatcactgggatattttcaaatcccaaggacatcagagtgaagtgtcagttgtcagatgattttaaaagttatgtcttcagagaaaaaaagattcattttctcattttaagccaattaaatattctgagtgagactaatcactcatttgcctacgaccttttagaaaagttgttttgttgaaatactgtacgtacgcttaatctaaatttgcattgactatgttttagtgtatttataaatggtgaactcagtttctgaaattaaacttcttatttgcaattttctagtgctggcagacactggctttttatttttaggataagaaaacaggcatattctttgtggtccattatctagagcccatacttgggcagcatttgaaatttcaccttaaccacagacagggctccagggaagtggagatgtaattcttacaacaacagttctgatcatggccatggtgatgactttccaggtctcgtgttcaagtggtgccagaatgcaggagcc

SEQ ID NO: 242834 - DNA, 1582 bp, Homo Sapiens
ttggctggcatcggggccccgagccgagcggagccggaccccgggcgagcgcgtctgcagccaccccagctcatacctctctgcctccccgctctcaaggagggtctgccgcatgtgatgaaagtgtctactctcagggaaagctcagccatggcttccccactgccccgggagatggaggaggagctggtgcctactggctctgagccaggtgacactcgggccaaaccccctgtcaagcccaaaccccgggccctgcctgccaagccagccctgcctgccaaacccagcctgctggtgcctgttgggcctcggcctccccggggtcccctggctgagttgccttctgccaggaagatgaacatgctggcaggaccccagccctatggtggcagcaagcgcccccttccctttgcaccaaggcctgcggttgaggcctccactggaggagaagccacccaagagactgggaaagaggaggctgggaaagaggagccaccccctttgacacccccagctcgatgtgcagccccagggggtgtacggaaggcccctgcccctttccgcccagcctcagagcgcttcgcggccaccacggtggaagagatcctggccaagatggagcagcctcggaaggaggtccttgccagccccgaccgcctgtggggttcccgcctcacctttaaccacgatggcagctcgcgatatggccccaggacctatggcacgaccactgctcccagggatgaggatggcagcaccctcttcaggggatggtcccaggaggggccagtaaagtctccagcagagtgccgggaagagcacagcaagacccctgaggagaggagccttccttccgacctggccttcaacggggacctggctaaggcagccagctcggagctacctgctgatatttccaagccctggattccctcaagtccagccccctcctcagagaatggaggccctgccagcccaggcctccccgcagaagcctcaggctcaggccctggctctccccatcttcacccgcctgataagagttctccctgccactcacagcttctggaagcccagagtcctgaagcttcccaggcttctccctgccccgctgtgactccatcagctccaagtgcagccctgcctgacgagggctcccgccacacccccagcccggggctccctgccgagggggctccagaggcccccagacccagcagcccaccccctgaggtcttggagccccatagcctggatcagccccctgccacctcaccccggcccctgatcgaggtgggtgagttgctggatctcactcggacgtttccatctggcggggaggaggaggccaagggtgacgcacacctccgccccaccagcctggttcagcgccgattctctgaaggtgtgctccagtcacccagtcaggaccaggagaagctggggggctcgctggctgccctgccccaaggccaggggagccagttggccctggatcgtccctttggggcagagtccaactggagcttatcacagtccttcgaatggaccttccccacgaggccctcgggtctgggcg

SEQ ID NO: 242835 - DNA, 1067 bp, Homo Sapiens
caaaaagccttcatgtttttatatatttcatagaaatttttatagcagttgcaggtaaactgtcaggattggttttaaaatatttttgtaactttaaaatattctataattatgcatgtgattttaacatttaatattcaaaaataaatctcttgctggatttgagagtattgcatttttaaagtctctcttctgtaactggatgttttggcaactttgtggggagagactgctggatttcttaaagcaacgtattcctgacactggccacagaatgcctttggaaatcggatgtactgttctcttgttcacgtttagtggtgttttgctgttttgttttttaaacaaatgatgctgagaataaggagagaaatgaatgtagagagaggtagagagagaaatatgaactctaacaaaggactgaggagtgcagtctgctggttcaggctcttcaaaagatgtagaaaaagagatagaaggaaccacctatgcttaaaatactgtaaatatgcagtgaggtttggcaaaatctattccatgtgtgatttgcttgtagaaacaattttgaaagccccttgaggaaaataaaaatcaagaagaacacttttctcccttttccatacaaattaaaacttaacagcatcaaattattgggaccagaaaccaagtaatgtataatgtggcttttgttgagttaaataagatgctatataatggagaagaatttgaaaatgcacaaaaaaatcaatctacattatcagaacctgcagtgaaattaaacttatgttaaataaaaccagtttgcaggtgcccaaactatgagggttttgtatccacgtaacacaggtagttacaaaaacatgttattgtactgtgtaaagatgcatagtcatttcatttggttggctttgtcccttgtaccttttttagccttggcttttgttgaactagaaccctcagcacatactgtgttgtacttttgtaaatgattttttaaatggaattttgcacataatccattgtaatactgtatgataatcatgtgtgaaaataatttttgaaatttc

SEQ ID NO: 242836 - DNA, 1339 bp, Homo Sapiens
  misc_feature (1235)..(1273): n is a, c, g, or t
aaagccaactttgtacaaaaaagttgggatggcggcagccgaggccgcgaactgcatcatggagaattttgtagccaccttggctaatgggatgagcctccagccgcctcttgaagaagtgtcctgtggccaggcggaaagcagtgagaagcccaacgctgaggacatgacatccaaagattactactttgactcctacgcacactttggcatccacgaggagatgctgaaggacgaggtgcgcaccctcacttaccgcaactccatgtttcataaccggcacctcttcaaggacaaggtggtgctggacgtcggctcgggcaccggcatcctctgcatgtttgctgccaaggccggggcccgcaaggtcatcgggatcgagtgttccagtatctctgattatgcggtgaagatcgtcaaagccaacaagttagaccacgtggtgaccatcatcaaggggaaggtggaggaggtggagctcccagtggagaaggtggacatcatcatcagcgagtggatgggctactgcctcttctacgagtccatgctcaacaccgtgctctatgcccgggacaagtggctggcgcccgatggcctcatcttcccagaccgggccacgctgtatgtgacggccatcgaggaccggcagtacaaagactacaagatccactggtgggagaacgtgtatggcttcgacatgtcttgcatcaaagatgtggccattaaggagcccctagtggatgtcgtggaccccaaacagctggtcaccaacgcctgcctcataaaggaggtggacatctataccgtcaaggtggaagacctgaccttcacctccccgttctgcctgcaagtgaagcggaatgactacgtgcacgccctggtggcctacttcaacatcgagttcacacgctgccacaagaggaccggcttctccaccagccccgagtccccgtacacgcactggaagcagacggtgttctacatggaggactacctgaccgtgaagacgggcgaggagatcttcggcaccatcggcatgcggcccaacgccaagaacaaccgggacctggacttcaccatcgacctggacttcaagggccagctgtgcgagctgtcctgctccaccgactaccggatgcgctgaggcccggctctcccgccctgcacgagcccaggggctgagcgttcctaggcggtttcggggctcccccttcctctccctccctcccgcagannnnnnnnnnnnnnnnnnnnnnnnnnnnnnnnnnnnnnncacatcgtgactgtgtttttcataacttatgtttttatatggttgcatttacgccaataaatcctc

SEQ ID NO: 242837 - DNA, 899 bp, Homo Sapiens
ttgggtcccccgcagtctctgtgcgttgaagccggagaccgcggcggcctcagcgaggaccctccgccccggagccgccggccggagccgcagcctctgccgcagcgcccccgccacctgtcccctccccctccgcctccgccggagccgcctcgtgcactctggggtatggccgtcaatgtgtactccacatctgtgaccagtgaaaatctgagtcgccatgatatgcttgcatgggtcaacgactccctgcacctcaactataccaagatagaacagctttgttcaggggcagcctactgccagttcatggacatgctcttccccggctgtgtgcacttgaggaaagtgaagttccaggccaaactagagcatgaatacatccacaacttcaaggtgctgcaagcagctttcaagaagatgggtgttgacaaaatcattcctgtagagaaattagtgaaaggaaaattccaagataattttgagtttattcagtggtttaagaaattctttgacgcaaactatgatggaaaggattacaaccctctgctggcgcggcagggccaggacgtagcgccacctcctaacccaggtgatcagatcttcaacaaatccaagaaactcattggcacagcagttccacagaggacgtcccccacaggcccaaaaaacatgcagacctctggccggctgagcaatgtggcccccccctgcattctccggaagaatcctccatcagcccgaaatggcggccatgagactgatgcccaaattcttgaactcaaccaacagctggtggacttgaagctgacagtggatgggctggagaaggaacgtgacttctacttcagcaacttcgtgacatcgagctcatctgccaggagcatgaaagtgaaaac

SEQ ID NO: 242838 - DNA, 1066 bp, Homo Sapiens
ttgggtaaaaacggcatttcatccaaggcttatcgtagtctagaacagtgcacagtgtgggaaaaaggaaacaagggctcttcctggccctgccaaccccctgcagagctggaatccagctgtttgggctgactaaaatcacctttccaacttgacagtgagtgagaccaggttgaacttggtacagagacgctgggctggcccagatgacttcaggttactcctttccatctcactggagccattaaaaactccaactcctcctcctcctcctgctccatcagcatatctctgagagagtcacgggggcctaagagtctcttttcactgcctggtgagcagaccagaagcagagggagagaggcaaatgaacagaggtccaagtaattcacatacttgactgtgacagtctctgcttattaatgtaatctgttttcctatttgaaagggatgttatctgcaaaactacctcaggccccacatggcagcctgattctgaagcatcattgaatcttgtatgatattaagttgagaaagctgcccttggatccagtgtctaatctttgtgaagatcttaccccatacatagaatacaatgatcggaaatgtcaagggttaggacagcacagccctgacttctacccaggctcacttgttgcctgctccctgacccttgcaggatctgcccaaaggtgaagcgcgtcttcaggtcaatagataatctactagagattgtccccagagaacagaactgggccctgaggcccaccgttgccctttcctgagagtcccagcccagtgaaaggaacacagttgacatgttgttgaagccggagatgttgcctgtatgcgtaaaagagctctctgtttcaggctcatgtacagtcaggaatggttccttctcatccaactgcccatgcgccaatgatgctaatgacgacacagccacccggcggtccccaggccgctctcgctcaaagtgcactacagcccattccagtctcgacaacagcgcatttcccctatatgacgcacccttcagtgaggcgtgtgtgtgcaggggccg

SEQ ID NO: 242839 - DNA, 1359 bp, Homo Sapiens
ttggcttatttttctttcagatgacattaaagtatcagtaaatgattttatcatcaaggcagcagctgttacccttaaacaaatgccagatgttaatgtaagctgggatggagagggcccaaagcaactgccatttattgacatttcagtggctgtggcaacagataaaggcttacttactccaatcataaaagatgctgctgctaaaggtatccaggaaattgctgactctgtaaaggctctatcaaagaaagcaagagatggaaaattgttgcctgaagaataccaaggaggatcttttagtatttccaacttggggatgtttggcatcgacgaatttactgcagtgattaaccctcctcaggcctgcattttggcggttgggaggttccgacctgtgctgaagctcactgaggatgaagagggaaatgccaaactgcagcagcgccagctcataacagtcacaatgtcaagtgacagtcgagtggttgatgacgaactggcaaccaggtttcttaaaagttttaaagcaaacctagagaatcctatccgacttgcctagtcctcaaagataagaagttggtgttcagcttagttgattcagtagttgttaccaagaaacatatgttataggaaaacaacttggtatttaagtatgaagtggatgaaatgtttatttatttaaggtgaaagcatttgacccagggtgtcttcatcttcaatttgggtttaatgttatagaaataaatgatgataaactctaactaataaaggaaagagaatatttggttactcagatccatttttaacctctggtgctgtataaagggaatattaaactagatgtaaatcaaagtatatgtttggctcatttgagcattttggaatatttgagaatgtatgatacatgtaaaattaaaaaaactattagaactgtaccataattatgttgaaggtagaagtgatcttcaaagagatggccattaacttagcagtgggacctcacttttacaagcactgctctagatatacttgaagaatttaatatgtacagaagtttattctggataataaataaataaggatcacactgtattaggggttatggcaacattattgaattttttatgtacataaagccatatgtttagggtggtttctatctgtcttgtttttcacttatataacactgtgaacttctaaagaaagaggataaaagaagcatgaatgaaaagaatgacatttcaaaaaaatggttcaatgaaaaactatagctaaaatatgtaaacctttctaggtaaaccgcttgccttcatcttgagtcggaatatatttaaataaattgtgttatctcttgcc

SEQ ID NO: 242840 - DNA, 1171 bp, Homo Sapiens
  misc_feature (623)..(731): n is a, c, g, or t
  misc_feature (750)..(859): n is a, c, g, or t
  misc_feature (876)..(924): n is a, c, g, or t
tttttgctcacataaatttttaataaacttttttgtgtctatgtcatatttcataatgtttttcctaaatgcttaacctaggaaacacatgtgtgcacacccatgccaaacacacaaatgaatttaacagtgtggtttatgaaatgaaagcaataatagtttgactcttcagaacctcttcattgtggcctatgtcaagctctctaatcttttctcctcaatggtaggccatggttaagggacagatgataaagtacaaggttttcaattgctaactgccaaattttcataggttatagtattactcaaaaagttgttttgtctcatttcttcaaattttgaaataacttgctttgctgactcatctgactatatttttaatgaggactggctttattagcacttttagaaaaaaagctctgcactccacactgaaagtcaaatcaaatagatagttaattatttgtagcgtggagtaatgtatgctcagtctctcctcacaacggagccaaaggtcacaaacatttacagaaaacctacttatgtcccaggtactctgctaggtactttcctaacttgtctaaagtcacagcataggctgggtatggtggctcatgcctgtnnnnnnnnnnnnnnnnnnnnnnnnnnnnnnnnnnnnnnnnnnnnnnnnnnnnnnnnnnnnnnnnnnnnnnnnnnnnnnnnnnnnnnnnnnnnnnnnnnnnnnnnnnnnnctgggtgtggtggtgtgtnnnnnnnnnnnnnnnnnnnnnnnnnnnnnnnnnnnnnnnnnnnnnnnnnnnnnnnnnnnnnnnnnnnnnnnnnnnnnnnnnnnnnnnnnnnnnnnnnnnnnnnnnnnnnngagtgagatactgtctnnnnnnnnnnnnnnnnnnnnnnnnnnnnnnnnnnnnnnnnnnnnnnnnngccctgatggataaagagcctagatgggaaaagatcaagaatttaggattcaatgcacaggaggaaaagttagtcttagaaaggaacatatacttctttggtgactatttggaaggagaagagcataaacatatttttaaatgcagagaaaagcagcagtagctctttcgaaagaatgtgtcttctcggtgaaggaacaaagtcgtttgctatgtgaagcagtgatgaagaagtggagcttagccaa

SEQ ID NO: 242841 - DNA, 1862 bp, Homo Sapiens
  misc_feature (588)..(596): n is a, c, g, or t
cacattagaatataagttttttaatttttataaataacttatctgttacaaagatagtttacccagctaaatcacaaaaccatcaactcaagatatccaaattacgttttattaataaaacaagtaaaaactgatttatcaatcttcacatagaactgcagatgaagctgaaaaacaaggcctattttaaaaataaattgcatcaaacgtaagggctttgggtctatggtttaattacctaggattgtcatatttcttcccatatacaaaatgcaaagcctgaaagttagggctctgacattcatagagatcaactgtaataatcccatttaaaacacagccacttgcaaacatttacagtgggtggtagtctatattatcttccatcctttgctctatttcagcacttcccttagccccattctaagcactcatataatttcataattctgtctttttaaatgcatactgttctttttcttgatttcagttatatacattcctgatcatctgaatattttccttacaaaaatatatcatcaaaataaagagatgcttgaggttgcttcagtgttcaagtttgcttgnnnnnnnnnccagcttttcttcagttgtcctaaatatggctagccttgttttataaatacacatgatactgtcaccaagtcaggattagaaatggactgccccaacagtaaagcatttaaacttctctccaaaaaaagggctgtaggtactgctgctgttgctggttttgagactgtactttcccaataacaactgcttgtgcaagttctgtgggacaccaagcagatgaagcttaaccttgttgttctgtcagtgggttaaaaatatcttttgttttaagcttccctgtggaagacaaacactgtgttgtgtcacccactgctcaagtcagtatttaatgtgacctacagacatcacttctgtaatatcatctgcaattcactgtgcagcatctgcctgtcttcacacaacattggaactcatgagggcaaagtacagaataagtagaggaaagttattctgtgcatactttcatctcattaatgcttttttattttaaggcattgttcctctcaggtaaggcttaaaaagggacatgatcgtgcttaattactaaaaggaaaaaagaaaattagttaacaaaaggctattacactatacatatagaaatataagaaaataatcaagaagaaaagaaatcacttaaagcagactcgagagatctgtacagtaggaaaagctttcgggtatttcgctgcacatttgtacagacaatgcatgctgctttcctttgcatctttagcccctagatgctggcttcacagagtggagacacgttcagggaagacaaagacaaggccaagagtaccacagatttctgaagttcttccctatccaatggcactatgcggcagcaaatggttcttaaatagttaaaccttgttccttttcttcgtgtatgtagtgtttcactgaaagctttacaaataaaacaagctatcattctattccttcctcctgtcaaaattcagtagtgacatgaggggaaaaaggtattgggaacacctaggtgttaacatattgagaattatccataatgggacactggtaacactgtacacagttaggcagtgggcaaccaagtctttcagcagattacttttcatgtgatgaatttcaactgctcatgacattatactgaggtattattagctctgtgggctgacatttaacattagcagaacaccatcttgtcacaccttcaatttgacaaaatcctatgtagcagtgaaactttttcccgatgacagactagtttcttgaactttagccaa

SEQ ID NO: 242842 - DNA, 654 bp, Homo Sapiens
  misc_feature (589)..(597): n is a, c, g, or t
cacattagaatataagtttttttaatttttataaataacttatctgttacaaagatagtttacccagctaaatcacaaaaccatcaactcaagatatccaaattacgttttattaataaaacaagtaaaaactgatttatcaatcttcacatagaactgcagatgaagctgaaaaacaaggcctattttaaaaataaattgcatcaaacgtaagggctttgggtctatggtttaattacctaggattgtcatatttcttcccatatacaaaatgcaaagcctgaaagttagggctctgacattcatagagatcaactgtaataatcccatttaaaacacagccacttgcaaacatttacagtgggtggtagtctatattatcttccatcctttgctctatttcagcacttcccttagccccattctaagcactcatataatttcataattctgtctttttaaatgcatactgttctttttcttgatttcagttatatacattcctgatcatctgaatattttccttacaaaaatatatcatcaaaataaagagatgcttgaggttgcttcagtgttcaagtttgcttgnnnnnnnnnccagcttttcttcagttgtcctaaatatggctagccttgttttataaatacacccaa

SEQ ID NO: 242843 - DNA, 1262 bp, Homo Sapiens
ttggctgattcaaaaacctggtagtaacgcatttgtaggaggagccaaaaactgcagtctctccgtagatgaccaaaaagacccagtagcatctactttgggagctatgccaaatacattacaaatcactcctgctatggcacaaggaatcaatgctgatataaaacatcaattaatgaaggaagttcgaaagtttggtcgaaaatatgaaagaattttcattttgcttgaagaagtgcaaggacctctggagatgaagaaacagtttgttgaatttaccatcaaggaagccgcaaggtttaaaagacgagtcctaattcagtaccttgagaaggtactagaaaaaataaattcccaccaccttcacaacaacattagtcacatcaacagcagatcatcatgttagtgcaaagaccagtgagaaaaaaatgacaagttttctgtgctgtaggatggaacaggatattgttgaagcctcctggaatgtttgagtcaagggaattgctttccagatgctaagaagcagcagtggggcttttgaattttatgattatctggcagtgaaagctgggcttttgccttaataattttttaaagtatgaattgttttgttttgttttcctcaattgaggaagctgatgttattaattcacaggctaaattcggtaaacaccactgcccctaccacgggtaatgagaggtcactcacttgaactttgccattccaggcattctcagagtggcgaggggccacctgcaagtggagcacaacttggtgctcttactgtgtccttcagaaagaataggtgtacagaaaggaaatggcaatcttatgtgtgctgaacaaagttttcaacaattcctagttgtgccttttaaaccatgcaatattcaggatagtttgaatcaaagaagtaagaagctgctatttgggtaacttatttctctgtgggaaggggcagggagagtcaccaaacaatctacctccaactctcttctcttttgtctagagacattacaaagtgcacttgaggctgcccccaacctctgacatttgttcttgcatgtgatgatagaaagtcttcagatggacttatacattctgtgctttggaagcacaagaagaacaaaatatgtgtatatttcctttaatgtttatacaaaagtttatatggagcagtattgttatgtttgtatgaatttgcaaaattaaagtgtaccaagagattttggattttgcatatataaaataaatcatttta

SEQ ID NO: 242844 - DNA, 1316 bp, Homo Sapiens
  misc_feature (326)..(338): n is a, c, g, or t
  misc_feature (415)..(423): n is a, c, g, or t
caaagggaaatcaagggtaattcggtagtgatttgaagggaaatttcccaaccaattatgtgagtcttgcagtatttcattatacagccctttcttcccattatttatttttttgcaaaataaagtcattttgacccaaatccagcataaatagcttttcaccaattcctaacttaagacaactaaaatttacaatcatgtggcagtataaattttaaaattacagttcgtacactttgacaatcaagatagtctgaagtacaaaaaagtaaattgccctttagctgaattacctttttaaaataggcctgctagttaatctaccnnnnnnnnnnnnntacaagttttacgtgttcttcagattccttttgtagttgtcatctgctagtaaacaacatatgcaggttcttaaaannnnnnnnnccagtctattcatgacattcaacagagctctttatatggaaatgttaaaaacaaaaacttctaggagatttatttacttttgaatgggtgtgttatttccctttgtttcagatatgaggcacaaacttctgaatttaagctctgtaaggcatagtagaaacttccaatttacaaataaggaattctctgggggttagaactgccatgtcacgcaaaaagggaaaaatcatctgtaaactggtacactgcaatgtgttaagtgagtcatgaaatggctgcttgccttggtatgctgaagaaaggtttctgtgttttatgtttttgtttttgaataagacatgcccaagtcaccataaaactcaccacaggcctccattacctaagcatcaacaataggaggccagtggcacacgcttataacgcttgcaatcacaatataatataaagcatgagtaaactttgtttttatacaaaactgaaaagaatcccgtcccgcccctagccccttcaataaaaccccgaagaaacaaaaaagaaaatcctttagcttcgattgactggtgtggctaaaattaggtttctatgcatcactgctgctagggtgatcaattttttcctttctcaagagaagggatcttgtcatgcaccctacaggaacagcaaagccacaaacctcaattctgcatagcaaattccatcccaatttcataaagacaaatataacaatctttccctgttttgctcagcttcttcaagctttgagatcaggtttaattgactacatttactatagctctattaaatagaatatcttgattccctaaaactgtaacacttatgatcttgtgatgaggttttctctatacacactgtaggccttcaaatgttgccaa

SEQ ID NO: 242845 - DNA, 1309 bp, Homo Sapiens
caaatattgaatttttattcaaaattctttacaactttattacaatatagattttgtgttggatagttttgcccactgtaggctaatgtaagtgttctgagcatgtttaaggcaggctaggctaagctatgatgtttggtaggttaggtatattaaatacatttttgacttatgatcatattttcaacttatgatcatatttttaacttatgatgggtttatcaggatgcaaacccatcacataaatggaggggtgtctataaaacattgttagacctataattttgctgttgattattgggaggtggtatggcacagtggttaggggcagaggccttggagttggactacatgggttcaaatcccagcttggctgttttctgtgcagttctaatccagttctgccacaaacttgttgagtggccttaggtgagtcacataagcactctagatatagcttccttattgcaaaatgtctcaagctaagtttagtattctccctccaccccgaccctgcttctgttcctcttccaggctgccccatctcagtaaatggcccatcagccacccagaaggtcaagccagattcatccttcacatcgaatctaccttctaaacacatccacaatccattcccctttctccatccccactgtccccgctccagtccatgccatcaagacttttcatttgcactttgccgcagagctgttaaaatacttttacaaactacaaatttgattgagtcactctgaaaaggtgaatgtggcccttgacctctgcatggtttggtcctggtctgtctctctccactcagttcaggccatcctctcagtgctccagacaagctagccttgcattcctccagctagaaggagccccagggcctttgcacaactcctccctctccctggaatgctcttccccaattgtcttagcttgatggctcacccttcaggtctaggctcaaatgtcagtccttcagggaagtattttctgatccttcaaagaggtcaggtcctggtgacctccttcagagcacctgtcaccacatcactggtgcatgtctgcctccttcccaactactgtttcaagagaggccccttccctgttgttgtctcagaccccttctttccttcaaagcacttatcacaatttgtaactgctttatttctttgttttcttcttagctgtctccccaattctctttgtataatttctatgaagagataagctgaggtctgtcctgctgtattcccaggacccagcactgaacctaggaacagagcagagattctcaaaaagccaa

SEQ ID NO: 242846 - DNA, 1794 bp, Homo Sapiens
  misc_feature (234)..(259): n is a, c, g, or t
ttttaaatgatgaaatccaattgtaattaatctatagggaaagcaattcaagaaaattcgggatacttaaatgttcagccttttagatgtgcaagaggactcctatgagacacttttcagtatatgaaatattactataatccttgaatgatttacatgcaaggatttattttatttgggacagactaaattgcctgaagataatgccatggcttctcccagtgatccctgagnnnnnnnnnnnnnnnnnnnnnnnnnncccatagtttactgctgtgcttaggttctgattgatgacacactcacgtaaggcacttatttacaaggtatggacttaaaacagaatcacagcatttctgcgaaagccctcaaactctccatctatgtttgctgctccaggacttctaaatagtcaggttcagcatgtaaattagctttaagttcaaaatactcattttttgtctgttccactaataccttccttggacgtgagtacattaatgtttccattaacttcagctcttcgtgggctccaggataatgtgcctccatatcaggctggagctgagcaatgtttttccttaggtattctgtgattcccagttgctgaagttccctttctttttctaaaatgtttctgtacaatgagctggcatcttggaaggataaaaattctgttgattggttcgtggttttgtatttcatatttgaccctgtgagtggtgaatgattttcctgttccaaaagacttctttggagatgttttgcatcacttccttctttctcattcctctcttcttcctcttccagatgctttggaccaaaggatggacttctatagacatgaaccatggggctcaccatgtgctgttcatagagtgaggcagagggtctttcagtagtgtgatgagtggttttatggccatacatgctgtactgaagatgcacaggactgttgtctctcatttgctcatctacttgtttctttttgtatcttctcctgcggtgaagaacaagaaccactatccctgcagcacagaaaacaatagtgatgaacataatcagaagtcccaatattagaacagacagtggcacagcgtccgtaagagatcgtaaaatagtatcagccgtatttgttgttgttgcaggagtggtgaccataaggtaactagtctgtgttggcatggatgggttatttactaaacctggacagagaatttcactatttagggctttcaattcctttttgtcgagatgcccgggggaagtgcagaggatgtcatctgtcactgtgttcttgcttaacttttgtatccattgctgcagtccaaccaggtcacaggagcagtcccaggggttatcctcaaggtcaatctgggttagtaaatcaagatcatccaaaatattacttacaggtagatgggtaaactggtttgttttaagatttaccttagttagaggaacccctgaaaaaatatgtggtggtaaaacttggaggaggttgttatttaaatacaggactttaagtttaggcattggattaaaggttcctggcagtatttccttaatggcattgtattcaagatataagtattcaagattatggagaccaaggaacatgcctttacttaatttggtcaggtggttaccatttagatagagtttttgtaatctcgttaggttcataaacgatccttcttcaagaacttcaatacgattgtttcccaagtgaagcatttccaaagtgaaatattccactagatcagacttcattaaactgtgaataatatccaa

SEQ ID NO: 242847 - DNA, 849 bp, Homo Sapiens
  misc_feature (689)..(714): n is a, c, g, or t
agttatgacaaattttattgtatatattgcaccacattgaaaaaaaatcaacatcatgaatgagattaaaacaaaggtcattttaagagaatatttctcaggccaggaaagacctggttatagcctaattagtagtgatattaacagtaggggactagtcagcatggaaacacacacaaaaaacagagtcacgttgccaggggagatgatcaatctggggactagataattccagtcactttaaaataattttgttacaaagcaggggtggtttatcaacttcaccacggcctaaaagaaatatgctcatgcataaacctctgaacaggtgatttggtgtgcagagtgctttggctttgctgtttagagagaagaacactggaaaacaggtgggtgtaggtgttgtcaatgaaaagaaagattatcctttgtaaattaatgagatggtatcctgatttatgcatatgtcccttctgttctgagtctgtttattaggagtaagtttccctttctctgatcaactcaagattgactttataggtatgaaaaatccaaagcaaaaccctcagcaatcatgacctaccaataaatgaaatgacagtttaggaatccttctgatcccccaaaaccacaacagggcaaagttcattggtaaacagcaaaaaaaattacatgaacactataaacannnnnnnnnnnnnnnnnnnnnnnnnnaaaggaataatagtaacaaaaaaacaagagagctcataaaaagtattctgagtataaggaacataatcttaatattccatactactcatttttcaaagaatatatccaagactttgaaagtggaatcagaaatgg

SEQ ID NO: 242848 - DNA, 1568 bp, Homo Sapiens
  misc_feature (358)..(376): n is a, c, g, or t
  misc_feature (576)..(591): n is a, c, g, or t
  misc_feature (617)..(702): n is a, c, g, or t
  misc_feature (749)..(775): n is a, c, g, or t
  misc_feature (911)..(936): n is a, c, g, or t
ttggtgtgaatcaggcattagttgaaaccatttataataacgctcttcactttccagtgatttacataggcatgtgacacaattccagcccatgagacaagaaagaaaaactgctggagagcttctgtgtgatgcttctctgatcctaaaaggggagtcatgaggaaaaatgtctcttctgaacaatgccttctgcaaaagatatggaattactaattagtggtaaccactggcattttggactggggagtttcccaaaacagctaaaaagtacacacttatttgaaaagtgattgctcatttattattggacttcagttgaaactgcttttattactgaaggagatactgttattannnnnnnnnnnnnnnnnnncttccgacttttaggttcaagaagtacatgtgcaggtttgttacatgggtaaatggtatgttgtgggggttttgtgcacagataattttgtcacccaggtaattagcaaaatacctgataggtagctttcaattctcacccttctcccaacctgtactctcaattaggtgccaatgtctattgttccccctgccactgcnnnnnnnnnnnnnnnngaggtggagtctcattctgtctcccnnnnnnnnnnnnnnnnnnnnnnnnnnnnnnnnnnnnnnnnnnnnnnnnnnnnnnnnnnnnnnnnnnnnnnnnnnnnnnnnnnnnnnaaaataaaaacctgccaccaaattatttctggattctcttcactatnnnnnnnnnnnnnnnnnnnnnnnnnnnccatttctgattccactttcaaagtcttggatatattctttgaaaaatgagtagtatggaatattaagattatgttccttatactcagaatactttttatgagctctcttgtttttttgttactattattcctttnnnnnnnnnnnnnnnnnnnnnnnnnntgtttatagtgttcatgtaattttttttgctgtttaccaatgaactttgccctgttgtggttttgggggatcagaaggattcctaaactgtcatttcatttattggtaggtcatgattgctgagggttttgctttggatttttcatacctataaagtcaatcttgagttgatcagagaaagggaaacttactcctaataaacagactcagaacagaagggacatatgcataaatcaggataccatctcattaatttacaaaggataatctttcttttcattgacaacacctacacccacctgttttccagtgttcttctctctaaacagcaaagccaaagcactctgcacaccaagtcacctgttcagaggtttatgcatgagcatatttcttttaggccgtggtgaagttgataaaccacccctgctttgtaacaaaattattttaaagtgactggaattatctagtccccagattgatcatctcccctggcaacgtgactctgttttttgtgtgtgtttccatgctgactagtcccctactgttaatatcactactaatttaggctataacaggtctttcctgggcctgagaaaatattctcttaaatgacctttgttttaatctcattc

SEQ ID NO: 242849 - DNA, 1005 bp, Homo Sapiens
ttggcaacgatcgtgggcaggaggtggtttctggtttgttggggcgtgtgtatgtgtatttggggggactgaagggtacgtggggcgaaacaaaaccggccatggcagcagcggaggaggaggacgggggccccgaagggccaaatcgcgagcggggcggggcgggcgcgaccttcgaatgtaatatatgtttggagactgctcgggaagctgtggtcagtgtgtgtggccacctgtactgttggccatgtcttcatcagtggctggagacacggccagaacggcaagagtgtccagtatgtaaagctgggatcagcagagagaaggttgtcccgctttatgggcgagggagccagaagccccaggatcccagattaaaaactccaccccgcccccagggccagagaccagctccggagagcagagggggattccagccatttggtgataccgggggcttccacttctcatttggtgttggtgcttttccctttggctttttcaccaccgtcttcaatgcccatgagcctttccgccggggtacaggtgtggatctgggacagggtcacccagcctccagctggcaggattccctcttcctgtttctcgccatcttcttctttttttggctgctcagtatttgagctatgtctgcttcctgcccacctccagccagagaagaatcagtattgagggtccctgctgacccttccgtactcctggacccccttgacccctctatttctgttggctaaggccagccctggacattgtccaggaaagcctggggaggaggagtgaagtctgtgcatagatgggagagccttctgctccagaggctcactcagtaacgttgtttaattctctgccctggggaaggaggatggattgagagaatgtctttctcctctcctaagtctttgctttccctgatttcttgatttgatcttcaaaggtgggcaaagttccctctgactcttcccccactccccatcttactgattt

SEQ ID NO: 242850 - DNA, 1362 bp, Homo Sapiens
ttgggtgtttcttttggattttacaggtagcccctgaagaagatgaaaggaaaaagaggcgacgagaaagaaataagattgcagctgcaaagtgccgaaacaagaagaaggagaagacggagtgcctgcagaaagagtcggagaagctggaaagtgtgaatgctgaactgaaggctcagattgaggagctcaagaacgagaagcagcatttgatatacatgctcaaccttcatcggcccacgtgtattgtccgggctcagaatgggaggactccagaagatgagagaaacctctttatccaacagataaaagaaggaacattgcagagctaagcagtcgtggtatgggggcgactggggagtcctcattgaatcctcattttatacccaaaaccctgaagccattggagagctgtcttcctgtgtacctctagaatcccagcagcagagaaccatcaaggcgggagggcctgcagtgattcagcaggcccttcccattctgccccagagtgggtcttggaccagggcaagtgcatctttgcctcaactccaggatttaggccttaacacactggccattcttatgttccagatggcccccagctggtgtcctgcccgcctttcatctggattctacaaaaaaccaggatgcccaccgttaggattcaggcagcagtgtctgtacctcgggtgggagggatggggccatctccttcaccgtggctaccattgtcactcgtaggggatgtggagtgagaacagcatttagtgaagttgtgcaacggccagggttgtgctttctagcaaatatgctgttatgtccagaaattgtgtgtgcaagaaaactaggcaatgtactcttccgatgtttgtgtcacacaacactgatgtgacttttatatgctttttctcagatctggtttctaatatttttggggggcggggctgtcaccacgtgcagtatctcaagatattcaggtggccagaagagcttgtcagcaagaggaggacagaattctcccagcgttaacacaaaatccatgggcagcatgatggcaggtcctctgttgcaaactcagttccaaagtcacaggaagaaagcagaaagttcaacttccaaagggttaggactctccactcaatgtcttaggtcaggagttgtgtctaggctggaagagccaaagaatattccattttcctttccttgtggttgaaaacccacagtcagtggagagatgtttggaaaccacagtcagtggagcctgggtggtacccaggctttagcattattggatgtcaatagcattgtttttgtcatgtaactgttttaagaaatctggcccacggtgtttgcaagctgtga

SEQ ID NO: 242851 - DNA, 483 bp, Homo Sapiens
tgagccaccgtgcccggccctaaaatgaaattattaatgttggttctgaaacaacctcttagcattcagattgtattttaaatacttaaacacaccaattgtagaaagcaaccctttatttttagcaagtttggtttactcttctcccatgagattttgtctttctacattaactagtaagacataaagatttgaaactggaactatattatactttttaaccaatctctgtggcttcactcatgaaatttacttcagttaatatgagactgggggttaagttgtaactaatatgcaaaattgctttgtatatttggtgattttgtaatgtaagtgaattgattcttatttcactgatactattaatcatgcagtgtacaattcaaaatcatgcaatgtttcactttagaattggatttgaagaactcgactttatgtgatcatggtattggtatacatgtggggtggagaacttattttttc

SEQ ID NO: 242852 - DNA, 896 bp, Homo Sapiens
tggttgaagaaaggaactcacctcttacacatactcaagatatggagctgtggcatgaatctgaatggaagggaaggaaaattaactcacttctttaggagtctgatgccacccagttcccctgttcttcatgccccgtttctgatatctacttctagaattcactccagctgaattcttctcttttcctgtgccaccaccaaaggtgcaaacatttctaaaagatcttggtggctttagtggaaaccatttggtttttacatttttcacctatgatatgaatgatgagtctgcatgatttttatcttaaataaatctgacccaggctgcatccatcctgttctgacagtagaaaggcatacacacttttacttaaagctttcatatctaaaattgatgggacatctgaaaataagggaattgggtatatgaaaagatcctttaaaaaactgctctcatctttcacattatcttctttttaactaagtgcaatacagtgaacagcaaaatagcagcatttttagagcaaccattggggaaaattcttagatcaggggacctgctgtcctgacagagtctatattcggccagcaaaggctccctaaatgtgtatctgagacttatttgaaaacaagtcaccatagtactgagtactgaattgagtggcaaacactccacttgcagtcaatgaaaatccaattacacaatatacacaaagagctgaccaagaaaaacatgatttaaaattatactgacaaaaactaaaatcatatgaagtaaaataaaactatctgaagactaataactgtgtaaaaataaatatctaagtaacccaatgacctactctcacggtaaaatagttacgaaaaaagaatacaatattaaccaaaacccaa

SEQ ID NO: 242853 - DNA, 1034 bp, Homo Sapiens
gaaaaggccaaaatgagggaggggggtcgaattcaagagaaattttgacacttgcatatgacttttaagttccttttcaatcctgacttccaatgactgcatgtgaggaaatggaagcgggcagtcaaagatgggattcccgagggatacgatttggtagataacagaatgactcacaggaggttgtgttcttagattgtttatggtgttcccaaaatagaggcaccattgagctgctcagaaaaactgttttgtaaatggggtatggtatatatgaatctaaatctctcttaagtgagtatttagtcaagtttaaaggacatgccatccttttaatcatcttaatagacataaacatactgaatcatataattaataacaatttgaagtgaccaattaaatcaaatggacaaagtccaggtcctgcgagcagctgtggtgtcattcagggcgacttctgtgggtctcatttgtaaaaagacaggtttggatgcatcctactgatggcccttttagtctcaatgggctatgattctgtgaataattttgctatactttaaatgtaacaatccccttttaagaaaatcaagcagatgtgactgagaacaagtgtaatgatttgtttaccaaacatgtaggcagcacctgctagtatggcgtccagcaccagggaaatgtattaacacagaacacagaatcagcatggcaggctactgtattccatgaataaaccactggggcatgccgtgttcatagagaaggctcagaattgttttcttctgtgtctttctgcttcaataggaaaacaaaactgaaaatatttgttgtaattagctttcatttatttgcatccaagttaatattccacagtacattttgaaattcttaagatcaagacttcaaaaaatcactcattgcatatatgattaaatagctattttgtctttccaaaataactatccacaataacttttaactaaaaaaaataaattttgttcacgtcttggaggttgtaaaagttaccttttctccaa

SEQ ID NO: 242854 - DNA, 709 bp, Homo Sapiens
aactaagacctaattaagattgaggcagaagaaatgggtccttgggatttgaaaattactattcaatttggaagtttaatttgcaacatagattgtctgttattaaattactagatataatatcacaaaggtggaaagaaaggttgcttagttaaagatctaagttactagtcatggtgtcagatatagagaatgattgaaggttatcagagtcacacaccagatgagtaaattgttgttttcaaggaagaggttacataaaggtaagcggagtaatatttcagcatttttgttaattaaaaatttgtaaagttatttccatttcaaggaaattactctcagtaattttacgggtaaaatgacaaattccaagtttaattttcacatgtaacaccctccttgagcacttatttttataaagctattaatctattttggtctcaatttacctttctttaaagagattttaaaattttctgaaagaagctaacatctggaagtgtagctgttatatttttcaatttttaattacatatttaattatcctttaattacttaaggttattctcaaaagtgaagagatagctgggatcacactgcgtaagattttactcctgaatgtaatattcaaaaatgttacaaagtctatcaaagaggttttcattctgtgacaatacatggtcaatttgacatggtcaggaagcaccaa

SEQ ID NO: 242855 - DNA, 801 bp, Homo Sapiens
  misc_feature (641)..(674): n is a, c, g, or t
aaaggagtgaatgtttttattctttagtgtttaattgaatacataacaagtcacataatcaatgattcattacttcacacacaggaaggaaaacagtagctagtatttctgttatacaactggttgtgaacaggaagaacaaaaatctttatagcattagatggttgaagaaattctcaaagtttgggcatgtctgaaaagactttgactgcatcttttttcaatataaagggatttttttcttacatttctgtgtcattagaaaaatctgataatcttaagagattttttctgctcttcttacatttagagaaaatggtttaatgatatgtactatttaaaaaatcagaatcccagataactctgtgtgaatcttacattgtctagcagataaggttttcagatgcctggaaaaatttaaacaacatataatttacatcttcaaaattaacatccagatggatgttttaatcctttgtcactaaatggttactaacgctgtttgagtggtcataaatgaattgtcatttgtattcaatagtaatagcaaaatttacctgcctataaagtcgcaaaaacagttgtataatagtttacattacaattaatgtacccatacctcaaaacacatttagaatttnnnnnnnnnnnnnnnnnnnnnnnnnnnnnnnnnnttaagtgacaacaaatcttgattaactagtccatcttcctaccacacatgattatactctaatgtagatattctggttgaatttcttccaaccaagtttgaagggccccagtagaaaatcaagccaa

SEQ ID NO: 242856 - DNA, 773 bp, Homo Sapiens
  misc_feature (481)..(539): n is a, c, g, or t
ttggagaaaaagcagagctggagtcggagatcgccgagctccaaaaggagaaggaacgtctggagtttgtgctggtggcccacaaaccgggctgcaagatcccctacgaagaggggcccgggccgggcccgctggcggaggtgagagatttgccgggctcagcaccggctaaggaagatggcttcagctggctgctgccgcccccgccaccaccgcccctgcccttccagaccagccaagacgcaccccccaacctgacggcttctctctttacacacagtgaagttcaagtcctcggcgaccccttccccgttgttaacccttcgtacacttcttcgtttgtcctcacctgcccggaggtctccgcgttcgccggcgcccaacgcaccagcggcagtgaccagccttccgatcccctgaactcgccctccctcctcgctctgtgaactctttagacacacaaaacaaacaaacacatggnnnnnnnnnnnnnnnnnnnnnnnnnnnnnnnnnnnnnnnnnnnnnnnnnnnnnnnnnnncaaagtgggtgtgtggcctccctggctcctccgtctgaccctctgcggccactgcgccactgccatcggacaggaggattccttgtgttttgtcctgcctcttgtttctgtgccccggcgaggccggagagctggtgactttggggacagggggtgggaaggggatggacacccccagctgactgttggctctctgacgtcaacccaagctctggggatgggtggggagggggg

SEQ ID NO: 242857 - DNA, 1939 bp, Homo Sapiens
  misc_feature (1439)..(1447): n is a, c, g, or t
aatttatatcagaaataaaactaatttttagcccttatattctttttcctatatcatgagcgtttataaatttcatcccagagggacccagtacaccaggatgtgggactgaatttcccatgaaaaaaaataatcatcctctcatctgagacccattattgatcactatagggtttctgaaaacttgatgcttcaagattaagtatcactagcattaataacagtaaacatttaattaaacagaaagcaatttttctttaaaacagtctttaagcattactactacaaaagtaatgcatactgggagtaaagtgttcaaaaaattttttctttgaaaaaaagccttttccttctatgtgataatttgacctatggttgaatttctacctttgttcctccaggaaatctaacctaagtggtaagttaactgggttactattatgcaatattgtacagatcttaaaaataacccgattgaacctggattgggacaaactatgaatcaactagaaataaccaataatgacaccacagctttggctctaagggcacagttaggtctgagtgaccacattctaacttttgtcatttaaacaaaggagttaaaggagcacatttgggttgtttttagcaccctgctcaatgaatttggaataccaattaactcttgataataaattagtcaggattagtagttatttcagtcacttaaaagtaatcttttgctccaaggtgaatcgtctctcattttatgtttttcatggcatttatcactatctggcacatagtatctatttattgatttgcctgctgtctgtctccccgtctagaatgtaagcaccataagggcaagagctttgctctttcttattcactgcttcattatcagtacttaaaatagtaactggtacatggttgggttcaaaaaatagtttttgaatgaaactcctactaagttctgggtattatctgattgactaaacgttattggacacccgctatacgtccagccctgggctagtcaggcatggaaatagaatggttattgtctatgattttacagagctaaaaatcataggtaaaacttcagacaattttctattgaccaggactattttctgtattaacatataattacatccctaaaatcctacatgatttactacatttagtagcactttactaaaaaactattatcttcaaaatcctgggctcttacccaagaattacaaacactgcacaaactgcttcaatcacttttagaaaccacctctcctagggaagtaggaggagccaacaccacatctgtgatgtcagccaacaggagacatttgaatgtctcctaatgaatccctacttccaaatttttctcagctttcctttggtactttcccacaagttttctctttaattaaaagggtaattaatttattctctcnnnnnnnnnaagtgagcatttcttctttatatatgatgtgttcaggtaaataatcaggccttttgaagaatcacacaccagtttccttgatcgtagtagctttgcagaattctgacatcactcacagtcctgcaggcaccttccagttctccctcacggaacacatggtagtaacgatgaaacacaggacttgggtcctgggatcctatgggaccaaatggctcaacaggtttgcctttatcaggatttcccttaaggtgccagggaaccagtacatcttgagaataaaaagaagtcctgttaacatgaacaggcagcttggaattagaaacttgccttgaattacatcctccttcctgagagtcattaatgcgggggacagaagatgccgagtctcgactgcccatgtcacgcatttgctccacaagtgacctctgcactgaggtatcactgttcatctcctctttctttccttggctatttctgtttcctctaagccaa

SEQ ID NO: 242858 - DNA, 1308 bp, Homo Sapiens
ttggggacgcaccatttcagttgtgttcttggttcatttcgtgtctcggcgatgtttcctagagtctcgacgttcctacctcttcgccccctttcccgccaccctttgtcctctggaagcccggagacatcagcggctgcgattatgctactcactgttcggcacggaacagtcaggtaccgcagttcagcgctgttggcccggacaaaaaataacatccaaagatattttggcactaacagtgtgatctgtagcaagaaagataagcagtctgttcgaactgaggagacttccaaggagacttcagagagccaagacagtgaaaaggaaaatacgaaaaaagacttgttaggcattattaagggcatgaaagttgaattaagcacagtaaatgtacgaacaacaaagccccccaaaagaagaccacttaaaagtttggaagctacacttggcaggcttcgaagagctacagaatatgctccaaagaagagaattgagcccctgagtcctgagttggtggcagctgcatctgctgtggcagattctctcccttttgataagcaaacaaccaagtcagagctgctgagccagctccagcagcatgaggaagagtcaagggcacagagagatgcaaagcgacctaaaattagtttcagtaacataatatcagatatgaaagttgccagatctgctacagctagagttcgttcaagaccagagcttcggattcagtttgatgaaggctatgacaattatcctggccaggagaagacggatgatcttaaaaaaaggaaaaatatattcacagggaaaagacttaatatttttgacatgatggcagttactaaagaagcacctgaaacagacacatcaccttcactttgggatgtggaatttgctaagcagttagccacagtaaatgaacaaccccttcagaatggatttgaagagctgatccagtggacaaaagaggggaaactatgggagttcccaattaacaatgaagcaggttttgatgatgatggttcagaatttcatgaacatatatttctggagaaacacctggagagctttccaaaacaaggaccaattcgccacttcatggagctggtgacttgtggcctttccaaaaacccatatcttagtgttaaacagaaggttgaacacatagagtgggtttagaaattattttaatgaaaaaaggatattctaaaagaaagtaacatacagctccattaagaccatggaaatttttatttcaaaccaattagagatggatattacaactaaataaaataattttactag

SEQ ID NO: 242859 - DNA, 1129 bp, Homo Sapiens
gccaactttgtacaaaaaagttggcttataatcctaaaacaacaattatttgaatcccaacaatggatgaatggcttaataaattatgatgcaacaaaatcatttttcaaaagattattaataacaaagagacaggcctaaaaagcagaatcagcactcacctctgtttttagttttctatttaggttcaaattttaaaatattatgtttttatataatctatatctttatataaaaacccacaaagaaatgcatcaacatattactagttgttatatttaggtggtggaattatgggtgactgttttcttctgtacactaaaagaagcatttttttaatattaagaaaacaaatataaaaataagctacaaggaagaatgaataattactctttgtgtttctctgtggaatgaattagttggacaaaaaaggtgggtaatgggagtgagagggggatgactacaatctgcctaacatgccccagctgaatgtttgttttaataaatttgttacttgaaagcatgcagcttcttttttattgccccactttatgagggccgatttattgtttagcttgtaatgagtaccatatttggtcgtagtcacttgaatgtttcaaagtttacattttggaacaatcagtcttattttaaaaaggatagaatagaataaagaatgaatgtatgcagctttatgcttcaaataaataaaaatcagttctgacaatgtaagaacattctctgctcctctaattcccactttgttttgataagttaattctcagatactgtatgttaaataaagatattctatgataattcactaactaaacaatgttaaaggttaaacctcattagtttaccagataaattttaggtctgttgttaattatggaaaaatactctttcctttttaaggtgatgatttgaatgacacgtcatctaaggaggcaaattcccaaagagagtctgtcacattcaaggatatagaaaagaggtcagttacattccttcagaaaacatgttttaataaccattagtgccagaccctcaaatatgcacaggattacttctcaataaatcaatacttttgtattttcatagtatcagaatccacttaaatttattt

SEQ ID NO: 242860 - DNA, 1009 bp, Homo Sapiens
ttggtgatcataaaactctgtttctgaaaacactaaatgaacaacgcctggaaggagaattttgtgatattgctattgtggttgaggatgtgaaattcagagcacacagatgtgttcttgctgcctgcagcacctactttaaaaagcttttcaagaagcttgaggttgatagttcttcggtcatagaaatagattttcttcgttctgatatatttgaagaggtcctgaactacatgtacacagcaaagatttccgtgaaaaaagaagatgttaacttaatgatgtcatcgggtcagattcttggtatccgatttttggataaactgtgttctcagaagcgtgatgtgtccagtcccgatgaaaacaatggtcagtccaaaagtaagtattgccttaaaataaatcgccccattggagatgctgctgacacccaggatgatgatgtagaggaaatcggggatcaggatgacagtccttctgatgacacagtagaaggcacacccccgagtcaggaggacggcaagtcgcccaccacaacgctcagggttcaggaagcgatcctgaaagagctggggagtgaggaagttcggaaggtcaattgctacggccaggaagtagaatccatggagaccccagaatcaaaagacttggggtcccagacccctcaagccttaacatttaatgatgggatgagtgaagtgaaagatgaacagacaccaggctggacaacagccgccagtgacatgaagtttgagtatttgctttatggtcaccatcgggagcagattgcctgccaggcgtgtgggaagacgttttctgatgaaggcagattgaggaagcatgagaaactccacacggcggacaggccatttgtttgtgaaatgtgcacaaaaggtttcaccacacaggcccacctgaagaacacctaaaaatccacacaggatataagccctatagctgtgagtgtgtggaaaatcatttatccgtgccccagacttaaagaagcatg

SEQ ID NO: 242861 - DNA, 925 bp, Homo Sapiens
gggcagggcctgtggtgtggatggactcgtctgcagtgagtcaggcagcaggcagagctggcaggctgtgtggtctctagtgggtaccaggggaccctgggagggcttttgtgggaggttgtccacggtgtgagccagtttgccatctggggtcctggagttccctcccgccctttgagttaaaaagagtcagtcctgggctgagacttaattgcgctagtgctgagtgaccttgtgtcaggggaaatcggatggggcaaagtgttttttaattagcaggactcactgacctttccttcactgtcagcaacttctcacagggaggcagagcaaggggggctggagccccgcatctctctaatggagcctatgtccaacaaggaggtggatggctggattcagggccctgggaggacttcatgtgggaagcagacctcaggaagggcccttagtgatggtgtgggccagggttctcacctccttagtctcctgtcctgtccatctccgcagcatcctaggcaaaagaagcggagaaacactcaagccactggggtggttagggcacactggtggcaattgtttaaaaccttaactaaaacaaggttaagcaaaaggagtttacaggctctcatagatgggaaggatgtgggagggtcacagactgagaggaaccagggctgtggctgctggaaggagcctcaccaccgccagtgtgtttcctccccgtcgtcggcatctctgcttctctctgcacgccagcagctctctcttagggcacgcagacctttcctctgcaggggaacacgagtgccggcagccccgagttagtgactatcatagaaactcagtgtatttctctcttgtttatcattccgagtcctgagtcacaggcttgtccagcactcaagactttttcttttctcta

SEQ ID NO: 242862 - DNA, 896 bp, Homo Sapiens
gcagctagagcagcatctgcctggggaccaggaatctcctttggaggcaccagagtccacacggtttcagtcctacttcctttagcagcgttttacattaatacaatccttcttcaatagcctgacgtaaacaagaaggtgcaaagaaacgagccactcatatcgtcacagatggcctcgactctcatgcgcaagtatgcgccatccttggcttatgttttcactcaatagaatgtggttttaggaaaacttttcattacaaggaaatgctcccagcatcacagagaaaaagcaagatataaaaccctctatacaatataatccctttttaactttaaaaagatagatatgtatatctttttaatctacgtatagaaaaatatccttagaaatctagagctaaaaatataccaaaatattaacagaggttatccctgtgatgtggcattacagataatttcagttttcttcttaatacttctctgttccaatctaggaaaaaaactggacaatggtcatgacaattcctctaacaattcccctagagtcatccgttagaaaatattaaatataaaattataatttctggttttcataatgttctgggttatagtgtagcaaacatatcgatccaataatatataattgaattttccagcagttgaagattgaagcaggtctcattttcaaactgctgaacctaccgtcatagccagtgagcactgccccattccactgacctgaattgaagtcacgactccattagcaaagacggagagttttccagcaaccgatctcactccctgcttgaactgcgccatgtcgggggcgttgggcagcacactggacaggctgtagttccctgctggctgcttcctcggctcctcgaacaccaa

SEQ ID NO: 242863 - DNA, 1817 bp, Homo Sapiens
atgagctatcatcacgcccggccccatctctttgagggacaggacatgtggggtttcttgctcacccccactcttgtgggacgcggcctgtgccctgattttccttcttgccttggtgtctgaatctgcagcatcgccctgagcaactggtggtttgtggcccacctgacagacctgctggaccactgcaagctcctccagtcacacaacctctatttcggttccaacatgagagagttcctcctgctggagtacgcctcgggactgtttgctcatcccagcctgtggcagctgggggtcgattactttgattactgccccgagctgggccgagtctccctggagctgcacattgagcggatacctctgaacaccgagcagaaagccctgaaggtgctgcggatctgtgagcagcggcagatgactgaacaagttcgcagcatttgtaagatcttagccatgaaagccgtccgcaacaatcgcctgggttctgccctctcttggagcatccgtgctaaggatgccgcctttgccacgctcgtgtcagacaggttcctcagggattactgtgagcgaggctgcttttctgatttggatctcattgacaacctggggccagccatgatgctcagtgaccgactgacattcctgggaaagtatcgcgagttccaccgtatgtacggggagaagcgttttgccgacgcagcttctctccttctgtccttgatgacgtctcggattgcccctcggtctttctggatgactctgctgacagatgccttgccccttttggaacagaaacaggtgaaggttgcagcagcagtggttttctttgcttgtcagtccctgctagagcttagttgtatagctgttgccgatgtgcgtgtttcctcctttgtcgttctgcctgtgcgcgtgtattccccttagcgccctctctgggattccagactcacacaggaaacaaacactgcttgatttgaaatgaggtattcgtatacaaagcacactattgcgaagggtatgaaaggaagaacgtccgaacatgggcccctgccccaaccaatgcaggccagggctgggggcagccaagcaaggcaggctctcttccctaggtgattttctcagcagaacagacttatgagttgatgcggtgtctggaggacttgacgtcaagaagacctgtgcatggagaatctgataccgagcagctccaggtcattttcacttttgggttgatggttccacatggaggtgggaaaaggctccctctatctcaggcttccccttccctccagaaacactggctcctatggacacatgtgcctctgttccccttaacctgtgtaattcacacaccaccttcttttaggagaaaatcagggattctagtgttctcatctctacattttgttctttgctgttcatcatttccagtatggccctttggtattgctttcttttacatcgataatttgctggaagctactatgaatgttaagtgccctctacctttggattagctagacccttcgggagtgtgaaagggctccttcctgctcttagctcatgctggcgctctctgctttgcaggatgatgacatagagaccaccaaggtggaaatgctgagactttctctggcacgaaatcttgctcgggcaattataagagaaggctcactggaaggttcctgagaactgcttcaatgtggtatctttgtatggcaatgtatatagattttttaaaagaataaatgttgttttgcaaatgtaggttcttagagtccacccagggaattttttatctgtctagccaa

SEQ ID NO: 242864 - DNA, 1299 bp, Homo Sapiens
  misc_feature (846)..(954): n is a, c, g, or t
atccataaaatcagtttattaaattacatagcaatatacatcccaaaccttttctcaaaattgtcattagctttttaaattcgttaaatattttcatctcattaaaaatggtttcttcctttaaaatttcccagaaagtgtggcctctgttttctgctactcagtttaaacacatcatcaaggatagataattaatgtcaggtgagcataaaaggagattataaaccagaaatgtgttttctgggaaccaagtttcaagtgactcagataagttttattaatttcatgggtgaagcccctggataaagcagtgcctaaatcaggcttgtttacccttggcattatgtcaccaaacactgtttcaggatactggaagtacatacagcttgggaggtctttggcctgagcctgttttggccaagcccatccagaatgaaaagtacaaaagaaggctagtgtgtgtgcaaagcagcatggcttattttgaggtcctattagttgtgggccaacaaaacagtggcaggatttgaaggaagaaatgtattgcaatagtccatatccttcgaaccacaaagggagactgaggaaatgctggctttaggccaaaaaaccctggctcaaaacagcttcctccagtggctcagaggcagaccaaattcatcaagtcaaggaccttttcctgctaccaccttgcggagaggggccttcaccagcccaccctgcacatgggtttctgctgttcagaacctacccagtaacaacaggagcaaacatacatgttttcccctcatgtaactttgcatttaaatatattctgggaaactgctgggcacagtggctcacacnnnnnnnnnnnnnnnnnnnnnnnnnnnnnnnnnnnnnnnnnnnnnnnnnnnnnnnnnnnnnnnnnnnnnnnnnnnnnnnnnnnnnnnnnnnnnnnnnnnnnnnnnnnnnttagctgagtgtggtggcactcacctgtagtctcagctactcaggaggctgaggggagggatcgcttgagccagggaggttgaggctgccgtgagctgtgatcctgccagtgcactcagcctgcgtgacacagtttggaaaactgtctctctctatgtatgtatctgttcagggaaatggcagcgtgagattttatggcagttcttgagacttcagaaacacttcggcaccagccaaatccccccaagagagcaaggaacacttttccagttgcttaaaaaatttaaagttataatgaaaaatgttgtaaaaagaactacagaggctgggtgtggtggctcacac

SEQ ID NO: 242865 - DNA, 1146 bp, Homo Sapiens
  misc_feature (977)..(1005): n is a, c, g, or t
agtaatataaaatgcattgtttaaatctcctatagttattaagtgtttgcagcaatagcacaacaaatctttttttaatacatctgacaagccccaatgatttcaatgctgggaggggaaaaacaacaaacaccactcttgtctatctataattaacctctctctctctcagtgctacattggttaaaatcaatggacaacccctttttgtatgtcaaattgtaaattttaatgttttcattagaatagtcttttatagcactctccaaaaagaagcaataaaataactaacagcaaagttcaatacaggagcactctccgggttaacaacgccaacaaaaaaagtgaaatgtaaatcacatataatacaattgaagcgtccaaaacaatttaaataattttaaatattttatttttaaattgctacaaatgctttatacaatatttcaacataaagtccccataacagaaatgtaacaaaatgggaatgatagtggaaggattaaagtggcacaaattcaccaaacaaatattaaactacaaatttttcagaggtagattacttttgaagttgagaacaaaaaacagtatgaataaaacctagccgctttccaccaactcagtcattaatttagggggaggcataaaatgtaaggataaatgatattaatatacttaggaagaggccaatttgttgtttttaatctctattagagatgcaagtgtaaaacctggtatgcaaattcatttatacttacgtgtagacatacatctgtacaggcctgggatgcgcctgtgcactgatatattgctacatagtctctgataatataatagttataaattagtgccagataagaatctgagaggataacgtccatttggatatacaaacgcaacaccagaataggcataaaaaagagtccatatccaatctggtttcctctccattacgctggcaatctacttgtgatttnnnnnnnnnnnnnnnnnnnnnnnnnnnnntaccaggggtaagagatcagctaaatgcctctctctgtctataattaatttaaaagaaaggcatcaagagctgatatgtgaccaaaacgttttaaatgagtgcatccaaatctgtcatccctgaaacctacaacaatccaa

SEQ ID NO: 242866 - DNA, 960 bp, Homo Sapiens
  misc_feature (89)..(124): n is a, c, g, or t
  misc_feature (579)..(638): n is a, c, g, or t
attgatgagcaatgcttaacttttaaaagaacaactttgtacaaaaaagttggggaaaaaagatttttaaaatgaatcttatgcaaaannnnnnnnnnnnnnnnnnnnnnnnnnnnnnnnnnnngaaaaagacatttaaagacaaagacattatttctcatagcaggaaatgtagaggtagatggttccagtatcagcatagtgactaaactacattataaaagatccagcttccttctgtcattcccctcttttgtcttcctcagcaggttggcttttttccctggtgcctctcacttcgttggtgaccagtttcttaaactgaaagctttaatgttacatagtaaatggtagtgtgtcctgtgtaaattagtgtacctattaaaagttgcaaagtggaattaaaggaatccctagaataaggattctgaagttttattttaaattattatcttcttaacagtttagtcccacctcttacttcctgcctcagtctgctttctctactgtctggattaattaggcagcctgctataaagttaaagtcacacatttctattttgcaaacactgtgattannnnnnnnnnnnnnnnnnnnnnnnnnnnnnnnnnnnnnnnnnnnnnnnnnnnnnnnnnnncagacaaattactgataaaaatgatattgctctatatgtaatatatcctgaaagcattattttttgttgaataggaaataaaattaatgaagacagaggctagaaagcatccattaattaatgagacacacttaactacttatctctaaaccatctatgtgaatatttgtaaaaataatgaatggactcatcttagttctgtatataaatatattttctttctagtttgtttagttaaggtgtgcagtgtttttcctgtgtattaaacctttccattttacgttttagaaaattttatgtattttaaaataaggggaagagt

SEQ ID NO: 242867 - DNA, 489 bp, Homo Sapiens
gtgcacacgtggcaaataagggttgtaatttagatgttacacaagaaaaaaagtaaaattactgtactttattgctgtatctatgctttcccagtatagctataatactacaaggagccacagagtgccaccttctggtttaaaactgtggcaccttatttcttttgaaatgtcactttataaggtgtatgtagaaagcaacagcagcagttacaaaatgttgtctgagtgattctgagagctcaaaacaaggatccgcgtataggctgaagaaaaagacgttcagttaacagtgcgcgctgtagaactttaacacaagtcttcaggtggaattcctgtgtaaaccttagtagagatgcgactcacggagaccaaaagtaaaaatctctttaccgtttacagtttagtgaggtggtctgcattctcgcaaacgacttacaaagtacaagaaatgttgcgtgtgagtattaggcatagaatatttcccaa

SEQ ID NO: 242868 - DNA, 795 bp, Homo Sapiens
  misc_feature (642)..(654): n is a, c, g, or t
taaacccaagttacttcgatgactagatactggaggtctgaaggagaagctttaaaaatacagattgattgcttcagagaaatcctatttataattatgatctgaacttattctatgattagcaaatatatcatctgaaaataaaacaggagttctctccccagacttttgtttttcaggatggtgagttttggtctgggaccctcatggcacccattttgataaaaggaaaaagatagtaaaacaggaaataggaagtttccagagatttgggcatctcaggattccatgaaatgctgagactaacccactaaatccaaattttattggctatggtaaatctaaatctgttcagtgttctgaacagattttatgagtttatgtctaagagtttatgtctaagagaggtacataattcacaaacactatcatgctggcagctgttttgtccacatcaattcccttgatttaatgctctgatttcaatttagaaagtactgagacatgtaaagtctcaaaataggaaaaacctatcctgtttataaggtgtggtcaataaatagaccacagataatcttagtctattaattaactctcagatcatcttagactattaattaacattctgcttgctgctgattnnnnnnnnnnnnnccctaaaaccttcagcaactgaagtagtaatataaaaaataacctttaatagttatggtcaaattacgcttcacttggataaacctcaaaatgtagtctgagtttttttgtgcacacttcacaaatcctgggggaaaaatc

SEQ ID NO: 242869 - DNA, 966 bp, Homo Sapiens
  misc_feature (267)..(689): n is a, c, g, or t
  misc_feature (712)..(828): n is a, c, g, or t
  misc_feature (843)..(859): n is a, c, g, or t
aaaaataaaccaaataaaatgttttttaaaaacgcactgggaaagttcactattgcagttggtggcacatgccaatctaaaataacaaggaaaagctactatttaattcgatttgttactctcaaatgcataagaagctagaactgctaatgaagcttccaagatgtcatcctgagactgctctaacaaatagctgtcttaagtattaagttactataaaataattgcccttctaggccgggcgcagtccagccgcggtggctcagnnnnnnnnnnnnnnnnnnnnnnnnnnnnnnnnnnnnnnnnnnnnnnnnnnnnnnnnnnnnnnnnnnnnnnnnnnnnnnnnnnnnnnnnnnnnnnnnnnnnnnnnnnnnnnnnnnnnnnnnnnnnnnnnnnnnnnnnnnnnnnnnnnnnnnnnnnnnnnnnnnnnnnnnnnnnnnnnnnnnnnnnnnnnnnnnnnnnnnnnnnnnnnnnnnnnnnnnnnnnnnnnnnnnnnnnnnnnnnnnnnnnnnnnnnnnnnnnnnnnnnnnnnnnnnnnnnnnnnnnnnnnnnnnnnnnnnnnnnnnnnnnnnnnnnnnnnnnnnnnnnnnnnnnnnnnnnnnnnnnnnnnnnnnnnnnnnnnnnnnnnnnnnnnnnnnnnnnnnnnnnnnnnnnnnnnnnnnnnnnnnnnnnnnnnnnnnnnnnnnnnnttggccaggcatgctggcacatnnnnnnnnnnnnnnnnnnnnnnnnnnnnnnnnnnnnnnnnnnnnnnnnnnnnnnnnnnnnnnnnnnnnnnnnnnnnnnnnnnnnnnnnnnnnnnnnnnnnnnnnnnnnnnnnnnnnnatctgtgtctcaccnnnnnnnnnnnnnnnnngaaagatgcttaacaaaggttaccataagccacaaattcataaccacttatccttccagtttcaagtagaatatattcataacctcaataaagttctccctgctccc

SEQ ID NO: 242870 - DNA, 1495 bp, Homo Sapiens
  misc_feature (1159)..(1172): n is a, c, g, or t
ttggctggctctgttcggatgccggccgggggggagaggtgcaatcctctcctcgcggctggtggttgcgaccacccccactccccaaaggcaggctccggaggcggcgggacagagcgcctgcgaccccagtcggtgctccggggaggtcacctgacgaggaggtatgtgaggagcagcgctgtgaggaggaagtcttccccctggccatgaactacctggatcgctacctgtcttgcgtccccacccgaaaggcgcagttgcagctcctgggtgcggtctgcatgctgctggcctccaagctgcgcgagaccacgcccctgaccatcgaaaaactgtgcatctacaccgaccacgctgtctctccccgccagttgcgggactgggaggtgctggtcctagggaagctcaagtgggacctggctgctgtgattgcacatgatttcctggccttcattctgcaccggctctctctgccccgtgaccgacaggccttggtcaaaaagcatgcccagacctttttggccctctgtgctacagattatacctttgccatgtacccgccatccatgatcgccacgggcagcattggggctgcagtgcaaggcctgggtgcctgctccatgtccggggatgagctcacagagctgctggcagggatcactggcactgaagtggactgcctgcgggcctgtcaggagcagatcgaagctgcactcagggagagcctcagggaagcctctcagaccagctccagcccagcgcccaaagccccccggggctccagcagccaagggcccagccagaccagcactcctacagatgtcacagccatacacctgtagccctggagaggccctctggagtggccactaagcagaggaggggccgctgccacccacctccctgcctccaggaaccacaccacatctaagcctgaaggggcgtctgttcccccttcacaaagcccaagggatctggtcctacccatccccgcagtgtgcactaaggggcccggccagccatgtctgcatttcggtggctagtcaagctcctcctccctgcatctgaccagcagcgcctttcccaactctagctgggggtgggccaggctgatgggacagaattggatacatacaccagcattccttttgaacgnnnnnnnnnnnnnntgggggctctcatgttttcaactgccaaaatgctctagtgccttctaaaggtgttgtcccttctagggttattgcatttggattggggtccctctaaaatttaatgcatgatagacacatatgagggggaatagtctagatggctcctctcagtactttggaggcctctatgtagtccgtgctgacagctgctcctagagggaggggcctaggcctcagccagagaagctataaattcctctttgctttgctttctgctcagcttctcctgtgtgattgacagctttgctgctgaaggctcattttaatttattaattgcttt

SEQ ID NO: 242871 - DNA, 905 bp, Homo Sapiens
ttggggcttggggcccaggaaggcactgcagggttcagacattgagggagaggccagaattgctggagggtggtgaggtgccactgggagggctgtgcatggtgacaccaagttttggaaggtacagcaagtgcatcaagagctttttgtgggtagggaatgggcactgccctttaagagcaggaatatcatcttaagagcctgttgcccccatcccgcccctgctggttcatggcgcaggtggcctccaccagcactgaggttgggtttagactacttcattgtcttccacccaggagaggcgtggagtgggtgcgagtcccttggtcaccaacccaagtctctgcttccctgtaccccttcacagaagccccttcagtggcttcaagtggcagtgctggctggagctgactccgccttcctgaacagcccacgtccctggaacaggccacctgcctggaacacactcagggtctggggtctcctgggcagattgctcaggcagccccttcctagcctgggcagggaccccagggtcacttctcccctctagggctggaattcgagcgctggctcaatgccacaggcccgccgctggctgagccggacctgtctcagggatccagcctgacccggcccgtggaggcccttttccagctgtggaccgcagaacctctggaccaggcagctgcctcggccagcgccattgacatctccaagtggaggaccttccagacagcactcttcctggaccggctcctgggatgggtccccgctgccgcaggaggtggtgatgagcctgtcaagtgctactcctccctgctggactcgatgaacgctgagatccgcatccgctggctgcagattgtggtccgcaaccgactactatcctgacctccacaggg

SEQ ID NO: 242872 - DNA, 800 bp, Homo Sapiens
cacagaactgattttattagcccaatacataccaaagacgggtggaaaagaagtattatttttgtagttttctttcataatggaagtttatgctattacagactgcagttttccagtcttttgattaagccttgccagttgtgtgccgctgcagcaccaaagaaactgttttgcagcctgtcacctcctctggcaggcagccatcctggtctcggagagtggggtcagcaccagactggagcagcagctctacaatatccagaaactcacaggcagaggctgaaaggaaaattgacaaatatgaaaacaagtttaccacgagacagagaaactcctctacttcagcaggaaaggaaagtgctgagcaataaggaatactgaacaatgagcaatgttacagtgactgaaggatggtcaggcctggtaatgagaactgtggtattatgctagattttcaagccttaggaaaatcaaatttacctttttggttgtctaggaacacacacgcaaacaaatatatattttaaattgtgaggcttttgggctctagtctttaagaatgggattaaggaaaggaataaaaaatagtatttaagtatctattttactttgatctttatttcagaataatgatacatgtgcaggatatgtcaaaaggctaaaaatactgtaaatgtcaaataaaaggttttgttttgtttttgaagaggggataagtgggtaactaactgaactttacaatttgtaaattttttaaaaaaaagctggcccagtaatcagaccattcttctacaggaact

SEQ ID NO: 242873 - DNA, 1909 bp, Homo Sapiens
  misc_feature (1048)..(1081): n is a, c, g, or t
  misc_feature (1254)..(1498): n is a, c, g, or t
ttggcctctctacagctaggagccaatggcagaagacaaaaccaaaccgagtgagttggaccaagggaagtatgatgctgatgacaacgtgaagatcatctgcctgggagacagcgcagtgggcaaatccaaactcatggagagatttctcatggatggctttcagccacagcagctgtccacgtacgccctgaccctgtacaagcacacagccacggtagatggaaggaccatccttgtggacttttgggacacggcaggccaggagcggttccagagcatgcatgcctcctactaccacaaggcccacgcctgcatcatggtgtttgatgtacagaggaaagtcacctataggaacctgagcacctggtatacagagcttcgggagttcaggccagagatcccatgcatcgtggtggccaataaaattgatgcagacataaacgtgacccaaaaaagcttcaattttgccaagaagttctccctgcccctgtatttcgtctcggctgctgatggtaccaatgttgtgaagctcttcaatgatgcaattcgattagctgtgtcttacaaacagaactcccaggacttcatggatgagatttttcaggagctcgagaacttcagcttggagcaggaagaggaggacgtgccagaccaggaacagagcagcagcatcgagaccccatcagaggaggcggcctctccccacagctgaggggctggggctaggggtgggtggagcccttttaaaatacccttcccttcaacaactctccagctctgaatggagaaactctctaggccatcccctcttctacctcctgcaacccacccatcctattagcctcccacattctaggcccgtgatacagggatgaggtcagcaccagcaaactctggactggtggaagaattccccaccagatctccttgaagcagaagtagggatcagcatcattaacaccttccccaccccctccccgcaggcagacagtgaagagaatcagaaaacatgattatgtgtcactttaatacaggaaatttaggnnnnnnnnnnnnnnnnnnnnnnnnnnnnnnnnnnctttccaaagctcacctcggggacaattccttgggcttctcctgaggtaatgatttacccccccacccacagctgagtctgtgaggccccatcctttccctacgttttctcccatcttttttcctcttcagtctcccagtcatctggtttgtttgtttctttgttcgttctgnnnnnnnnnnnnnnnnnnnnnnnnnnnnnnnnnnnnnnnnnnnnnnnnnnnnnnnnnnnnnnnnnnnnnnnnnnnnnnnnnnnnnnnnnnnnnnnnnnnnnnnnnnnnnnnnnnnnnnnnnnnnnnnnnnnnnnnnnnnnnnnnnnnnnnnnnnnnnnnnnnnnnnnnnnnnnnnnnnnnnnnnnnnnnnnnnnnnnnnnnnnnnnnnnnnnnnnnnnnnnnnnnnnnnnnnnnnnnnnnnnnnnatgagccaccgcgcccggccccaatcatctgtttttaaacaatcgtttttgagcagatagctattcattccagattttcgtgtacccattctgtttcaggagctcttctaggtaaagctgagatcacaggaacagcaggtgacaggcctagctatagttaggaatacacaagccgtaaaatcgagtccttacagccataccacaaggtacgtccatttggactacaagaagagcttcctttaaagttcctatttcagcacaaagaggctgtccttttttttgaggaatagtttggaccttgtgcctcctgtgggaggctgaggactgcaagaggagagctagcagatatgcctgttcacccctctctggtacttgtggcttgctagtatgtttttatgataatctcgggca

SEQ ID NO: 242874 - DNA, 1005 bp, Homo Sapiens
  misc_feature (178)..(212): n is a, c, g, or t
gacactagtaaggaagtaattccaattctaaacttcagaagttctgccagttgagaagtggccttccttgggcgctgggattgcagtggtcaggagcaggcgcactggcccttgcctggagtgcggctgggcagtggctgctgggtgagacaggtcagtctaacttgagaagctgcannnnnnnnnnnnnnnnnnnnnnnnnnnnnnnnnnntccctcagtgctgcccgcctgcacccccactcccaggcattcctttccctgagttgtgtggttgccagtaagacgcagaaatgccacagggcatagggggcacagccaccaccacaagaggcttctggggagatcagggtaagaaaaggaaatgggtaccagtcttaggggtgggccagcgagcaagttcatagcttgcctccagcccctctggagtccacacttgggaacgggagctaatactgttcggcactgcagtgtgaccccgcacatacaagtagggcttggaggggcagccccttctcctggaaaggggtgggggaagaagagggcttctcagaggctaaaccttctgccttcatggccccagcagaacacagggctgaagagttggagaggaaggctggaactgacccgagatccccatggctgcctgggactggagtcaaatgggaaccccagcctctttccacttggcctaggggatgccgcctctttctcagagctgggggtactactccctggtgcagacagagagggagctggcacttggtggcaggacatgttccagcgagggctgctcaaaagagcagaggctggggctgggctggggcagtgtcagtgggcaacaggagactccagcttctgcaggcggcgccggcggagctctgctgcatcgggctctccatcctcaggcatctcctctgtgcccactgactcaggagctggggacagagagactggaagtggaacctagagaagttccctgctcccccggctggaggccaaccaa

SEQ ID NO: 242875 - DNA, 781 bp, Homo Sapiens
  misc_feature (507)..(541): n is a, c, g, or t
ttgtacaaaaaagttggccctaggccaagcttggaaaaaggaggctggggttcccatttgactccagtcccaggcagccatggggatctcgggtcagttccagccttcctctccaactcttcagccctgtgttctgctggggccatgaaggcagaaggtttagcctctgagaagccctcttcttcccccacccctttccaggagaaggggctgcccctccaagccctacttgtatgtgcggagtcacactgcagtgccgaacagtattagctcccgttcccaagtgtggactccagaggggctggaggcaagctatgaacttgctcgctggcccacccctaagactggtacccatttccttttcttaccctgatctccccagaagcctcttgtggtggtggctgtgccccctatgccctgtggcatttctgcgtcttactggcaaccacacaactcagggaaaggaatgcctgggagtgggggtgcaggcgggcagcactgagggannnnnnnnnnnnnnnnnnnnnnnnnnnnnnnnnnntgcagcttctcaagtgagattgacctgtctcacccagcagccactgcccagccgcactccaggcaagggccagtgcgcctgctcctgaccactgcaatcccagcgcccaaggaaggccacttctcaactggcagaacttctgaagtttagaattggaattacttccttactaatgtcttttggcttaaattttgtcttttgaagttgaatgcttaatccctggaaagaggaacaggagtg

SEQ ID NO: 242876 - DNA, 726 bp, Homo Sapiens
tggatctttgctctttgcttgtttaacctccttgtaaagtttgtgtcttccagattacaataattccatgtaaagatgatgctggcacaaggctttcaacccatcccctcttctgacccagaagataaagacatcctacctttgagccttttagaacaggtatccagggattttacctctccagtgctaggcagggtctatgcccataacatcagcaggaagcagttacagaagatgaacctccgcccttttgcaagccccttaagattaaggaggagtatataatctctgatggggaaatgaggtaggagaccagaaggacttattttccattcccaaccccattgaacagagcaggatctggtcaaaacagggtgcagtggagaagcctgctgaaaccagcagatgatgatgaaagtgacctctagttgccctcactgcttatgagcataaagacactaccactgggaccatggccagtttacaaatgtcatggcaacacaccttggcaatggcctggaagttactttatatggttctggaaactccctgcccctttcccagaaagttctgaataacctacctcttaattggcatgcaattaaaagtggctctaaatacaactagctagtagcccacaggcaccaactctgggcacactgcctataggttagccctgctctgcaagaagtagcaccagttcaataaaagttgctttctctcacc

SEQ ID NO: 242877 - DNA, 373 bp, Homo Sapiens
taacaatgagacatatgcagctttatttaataatctgtaaaaagtcatactctggcagagtgatgcattccttatctcagcagaaagcaaacagtctgtctgaaaagccccttcccaagatttggaactgtgtaaccctgagcttacatctcaatgctcccaagagctgggctcttgctatgtggtagttggtctccacaattctctcaccctccagcaatactctctgtctggctgtgactccctcacctaacagtagacatgaggctgaaaacaactttacctggacagggctacccctacagattggccctttctctcctacaaaagggagttcataggattaacaatctttctaatggctgggagcaat

SEQ ID NO: 242878 - DNA, 1295 bp, Homo Sapiens
aaaaagcaaagtttcaatcatacaactccaccaaaaggaaatgaataaaaaagctagtattttagttacatcttttaactttcaaattatggaaattaaagcattggcaaatttataaactaaagacattaatgtatgctgaagtcttgtacataactgaaaaaaagcagagaatctaaacgagtcactcactattctctggggggtgaggggtgaggcaggaacaagaatttatgatcaatttagttaacacaagtatgtttatttccatataataatttagatcaaattattcttaagaaatggatctttcttcaattatcaccaattccctgatgcaattactagaaaagtattatgatttttaaaagattgtcagttttagactcttaagaaaaacaacagggcttcttctcagggttcctaatttataaattcactaaagaattatatatgttaacaaaattcaacttgttttgagaaaaatatatgtcaattgctacccaaaatcaaaacccaacatatatgttccatataaagtctagtcttgcatttgaaatctgacttttcagagtatgtgatgtgtttaaaatttttttggaggaggggctagaaattaaaaaattctagcccttcagattaaatcatgtaaaggtcagattttttttctgtgtgggaaaatgaattatcttccatctaagattgaaaaggctctacttttatctaggcaatgaccatgaaaagatcatattcacttcagaaagggaagaagcagcagggaacatagttcctttcagaagattttaaaaatatatgtatacagagaaatagattataaattcagtttcagaaaaaaaccctccaaaaccaaaaacaacactaaactttaatggcatactgtagatctgccaaaatgaggcaaatgcagaacataatgacggtatcacaaaaatacatttttaaatggtcaatttagaaagggtacttttgtataaaggttcagtaaatcatttgacaagtatttttaaacagtaaattttgtaaagtgtgaagtctatggaaatgtcaacacaaggcacattaggttctgaatgaccacaaaagtttaaaattagaaaaagggaaaataaataggttttaaagtggaaatgcagtaagttctgtatgttcactatttactttcttagttttcattccttctactgtaatgttatgctataatgtgagatctacatcagaattggtaggaaaaacagcttctctcttctgtcacctcaacaaaagatactttaaat

SEQ ID NO: 242879 - DNA, 999 bp, Homo Sapiens
aaaagaaatggatgcttttattcaacctgagttaaaaccacaatgaatcatatcagagttcatgggaatcataataaatgactagtaaaccactcacaaaatcaaagctatcaacatactaggatcacacacattaattagtgctatagttcaaaacataccctttaacttatttagcacgcaaaataatcataaaagtaatgtctataagctctaaccaaaaattttaaaattaaaaatagcacaattctacaattctgattttaccaagaaaataaaccttttttggcacatattatcctatgaaaatggaaagctgactcaggctgctctgcttttcacagcacaaataagcattcatgctatcagacttgggaaattaactcggtgacaaaaattcactggaaaatagaatccttggaaaaatggggtcaggtgccatccactgtgaggcaatgataatgtgtgtccttcgttattagcacaaagttaggcagcacactataattttagctacatgcaactctataggaacacatgtgggtaaggcctgaaagttacaagcaagagtgaaaagaactgctgtgttgggactgaggaatgatgggtgtttgtttttctttaaatgtcatttcaccttttaaaggaaaataaatcaagtaggtaggtaaaaattactgaactaaagagatactaaagatcagaagactggccaattgagaaaatcaagtttcatgattaagagtgactcaggaaggatgtcttagttatgaggggggtggtggaagacagtttatatctttgggtatttatggcaggtcagaattaaagatttaactttttcccttactctttacataaaaagctggtttatctgaaaaaagtatcaatctagacttggcaataaagtggcacttaggcactatattattgccaacttttttgtacaaagttggcattataaaaaagcttttttaagtcgaatttgttgcaacgaac

SEQ ID NO: 242880 - DNA, 699 bp, Homo Sapiens
gtcttcaaagaggacaacatttatttagttgtatgtaaataaaaattacttggatacatgaggggaaaacgataaagcacatgatataaatatacaattaaccctttataatatcttcaaacaacggcaaataacataaacaggaaatatttgcagtaattctttacagtattctcttttactctgttgtcaacatgaatactgcaagcaggtctttattttttttgacaatgggaacttccactcattcggtagaagtcaccactttcaaaacatagtaagtcaacacacaactgtacaaactgaacgtgagcaagtctaacttagatgtaattagagttgagtcattggataaaaagttcatattgatgatacacaaccagcagtgcaagcattcaaatacattggctatagcaccatttaaaatatttaacactgcctcttgttagtttgatgttgtcggaaaatgaaagtaatgaagcaatgtagtttttaaaacatacaacatgtgtttcaatctaatcatcctaattctatggtaaattacacagagagagatagaggagggagcattgcctcagctttaagattatctttatcaaaatagagagctggattctttaacagcagccaaagctgtaatgataacacataggttgttgtgttgaaccaaatggagtatgacccaacttttttgta

SEQ ID NO: 242881 - DNA, 1000 bp, Homo Sapiens
tgtgcttcttaaaccattttgcttggatatacaattaaagaacatttagatactatgaagtcctcaaacgttttaaagtctaaatataaaaatgttttcataagtctaaccattagtagcaaaagaggcaattccaacatattgtatatattgatattttaaaaaatattatattacttaaagaatgtaaataatatggtgatttaacactcccttcattcattttttctaaatgtcaataagttgctctttaatagtcccttttgctccttgaattcatgtttccttttcactccctcacagaattgtacgttaatatatttttgtgcttacaccctcacattgatcaccttcatcatatttctttgcaataaaactatgtatataaattgaaattatgtaaataggtttttctctatgatctcaatggtctaagtgtttcattaaaaatcatctggttattatatgtattagccataaatcattgcaaatatcataaagtattgtacatttacagtattataagattggagatgggagagaggtagtagacctttcgaagtttagtgggacaagggcaattgtgaaagggaagacaataaagaagtacaatggctcttgaccatggggaaattctcaggcagttcaatttttgaaataataaacatgaaagttaaagttatatgtgtccaagtgctcccctgggaataattcttgtaacccaagaatgtgcatattttgttttgaagatctttggactggctgaatttacttaaggctctatttgaatagtaagaacactccttttaaattgttagtcccagtggaaaaattaaaaattgtaaaagatgccttattgaacacttatgagaatctgtttgaaaacattattatttttatttggacttgctggggagagagctggtagtaaagaggaactgaaactatcttcctgccacatctattcctcatagccaccgcttgccaaacttttttgtac

SEQ ID NO: 242882 - DNA, 951 bp, Homo Sapiens
ttaaaaccttataactatgatttgaaattactaaggtcaatgtagttctgatagctattgtaatttagctaaatttcaaatacaaaggcaaaaaatgcaccattctactaaaaaagaaaaataattgcgcacgtggtcaaaattagcttctaagaatatataagctttgaattcctaatgttcacatatttaaagttattgtcacagctatatgagtataaaaggtgctaaattttctagaatttaactcaggacataatgccagaaagaaatatttgtgattctgtatttcccacaaaaatgtaaactgattttgacaaataacagcaattacacctattacttttagcactttgatacttattttctgagtaacgtgtaatctacaaataagaaaaactaaaaactgctgtgatttttttcaagcaaatttgacaatccaatctattacagcattttaccataaaacatatgacttatttttccccattgactgatagtagtatatagtatgtttgactttgtaatgataatttattatgatggtcttaaaatttaaagagaaaaaaagaaggaaaataatttttaaagtgtactattttaatacattactttatagaatttaattgttcctgggctcatgacaaataaattgacttaaaactagcctcttatttgtattgatgaaagttaatttgtacagcaaaagatgagtaaaaattaacttgtacagcaaagggggaaaaatagaaatgaccattcaaatacttttttaaaaagtactttcactataaaactgttagatacattaatcagtacatagaatcaggtaagtggtatcacgtggtcaaagatagacccaataaattcaataccaaattaaaaggttttactcttaaaggctccaaagataccatttgtcagaacaatgaattcctctcttttatccaa

SEQ ID NO: 242883 - DNA, 753 bp, Homo Sapiens
gcatgaagtgaatatttggtagtacgggattttactttaataatttttcactactttttatttgctttgtggttgctctaagcttaccatgtacatcttaactgcaaaaatttatactatattctaatgaaccacaaaaacattactcctatatagctctattccctttatcccctttttgtggtattgctgttatacatatcaataaacatcacaaactccataatgcattgttataaattatgaccttctataattttatgtcttccaaaaatgctaagaaaaggatagtaattatatgtttatagctcttgttaatatttatcttatctttctggcttccttcattagttcctgttgatttgaattatcatctggagtaatttccttatcccagtacaactttaataccacccatgtcctttttgctgtatgcgaaaacatattacatttctatatgttataggcccaaatgacattatatatacactgttttatatgatcactttttaaatcagttaagagtagagagtagaagaaaaatgcattatgtatttttaccagtcagagtcttgctctactgcccaggctggagggcaacctacctcactgcacctcaaattcctgggctcatggggatcctcccactttggcctcccaagtattaagattacaggcatgatccatcacacgggcctttactgtctttttaaattacctaattacatttaccctagttcttgcttattttca

SEQ ID NO: 242884 - DNA, 256 bp, Homo Sapiens
gaggtaacaaaggaagcatcttcagtgatttgtcactaggttatcctttaccgtgtatgtcaactactgcaatgtcaaacctaagacttatacaaaagcatttctcagagaatcataaatacagaatatgacatttccaaacaattattctcattacagcagggaaaacaaaatggatcaaaaaacaaagcctaaaataaatgaaggcttgattattttactagtagagaaatgaacaatagcatccagaatccaa

SEQ ID NO: 242885 - DNA, 455 bp, Homo Sapiens
aaaaatcaataaattttacttcatcaaattaagtattttcatacttcaaagaacactataaagaaactcaaaagatgattgacagactgagggaacacactgtcaaaacatacttaataaaagtctagttcaagaatatatacaaatgcttataactcaacaataaaacaatattttaattataaaaggaacaaaagatttgaatatgtatttccttaaagaagatatacaaaaggccaaaaagacatgaaaagacaatgtcattaatcgtttgggaaatgcaaattcgacaacccataatgagatactactttacacacaatagaatggttataatcaaagaaagggataacaacaaacattggcaaaaattcaacattatatatttatgatgggaatgtagagttgtacatacgtggtagaaaataatttggcccaacttttttgtacaaagt

SEQ ID NO: 242886 - DNA, 667 bp, Homo Sapiens
acctcaaaaagactatttctagaaacatgaagttttcctggagaaatgattaatggaagcaagactatcagtaaaaaatattcaagaaaagggatgttactttacactgatcaagttaaaaagcctctgaaaaggcaaacaaaaataaagaaaagcaaaatacactatttctctcctttatggataaaatgtaggtcattatgaacaataaagtcagggagtaaaaggaaaaagccatttgattattaagaaagactgtctattgcatggatatagtacaggtcatacattagagttttagttttggttaaacctgtcagttatggtacatccacaaacaagtgtgtgcacaggaattagcagtgacttgggaaattcagttgctcaaattttaccactgcaagctcatggagtttaaccaaacaaatgaatctgcaatcaagaaagtaaaaaaacataaacaagctttaaacaatctttagaaaaaatgttcacatgcaagagacttcccaggcaagaaggttttgattaaaaaaaatttgagtcccgaagtagtgatttaccttcagaaatattctcatctaggattattacactccaaatgcaaagtgagctagagagggagaatgcttgcaagatgtgttcagttcatattaaataaatccaa

SEQ ID NO: 242887 - DNA, 771 bp, Homo Sapiens
gtacaaaaaagttggtttggaaatggacatctctcagtattcatggggaatgagctttgatcttcatctcagtatagcattgcactcataaatgtagcaattgtcatatacttaatccacccctgcaaaagactgatcctgtgacatgggagtgagagaggaaagtcacccagagccagtggcggaagttttcaggaacagagatacaagaaacttggcgtgatccagtccatatgatagagagcataataaacaaaataagacaaaattgaaacaatgagcttttacacactgatggtaaaaacagcagtttgaaaaacattgttttaagtcacagcagaggtcagcaaactttttctgtaaatagccagatagtaaatattttaggctttgcaggccatagcatctctgttgcaactactcagctctgccatggtagagtgaaaacagccataaacaatatgtaaatgaatgagtgtggcggtctttcaacaaaactttatgtacaaaaacaggcaatgggctggatttggcctataggtcctagtgtgcagacccatagactagagtaacagaaccatttgaagggcttgttaaaacaattgttcctccatcccatttctgattcattaggtttggaataacctaatgaataggcagaatcctccctttttgttttaataataatagccaccacttaagcacttgctgtgttcccagcactattcagggttctctatacacattaactcatttaaaaatgaatttcag

SEQ ID NO: 242888 - DNA, 773 bp, Homo Sapiens
gaatatacttgcagaatatttatttttagatctctcagcagtacagtaagagtctttcgtttcagatcagctggcctccagccaaagcagcgaagtcagaggaacttcagcccctaagccttcctgctccctaagagtaccagcgctcctgcctggctccggcataaatggttggcaataagtcattttttattaaaattttaactctaggcagcaattttgctttaaaaggtttttctttggagtgcatttttattttaaaaaattaaatactcttggatatgttagtattcagaagcagcagatttcaacagctcacactttctctgaactttttttcaacagatatttcacacactaaggagggcctgaattctcagaattgtacctctataagttcatagctgccctcgtcttttagggggtgggtggaaaatccaactcaccactcaggctcttgcaggtctgaaggctaaaccggtgtgaaacaaagggtcccctttcactcactactcccaaagccgggaactatccagtgaagagtggccatgccatttacgtggcacaaggtggcccaggggtgatgagctgttcaccttcaccggccatttctctcactgctttagtgcgtggcacagtgcaccctaacatcccacatttaacaccccatcaagaaaaatgtgagtgcagcaaaatatccaacaagtacttgctcctaggagcaattcaaacacattttgccaacttttttgtacaaagttgttttttaaagg

SEQ ID NO: 242889 - DNA, 566 bp, Homo Sapiens
  misc_feature (210)..(225): n is a, c, g, or t
  misc_feature (256)..(279): n is a, c, g, or t
tctccaatgtttttagatgtcactgtctcatttttccacctggaaattaggaataatatagaatgccaagcagtatgtttccttttggaaaggactttgaagacaaaaaagaaaggagagaacccgatggctagaatattatgaatattccaggattgagttgaaaagagaagactgaagatccaagttgcatttttaatctgtttcagnnnnnnnnnnnnnnnngcactaacaatcagtttatgaataaagaggnnnnnnnnnnnnnnnnnnnnnnnntcgtgattcatgagaagaagtcaaaataccaacattaataggagtttggaagaagctgattccaactctcatggatgactttggggattcaagccttcagcagagaaagtaacaacaactacagatgtggtgaaaatagcaagacaactagaattagaagtggagcctgaagatgtgactgaattgtcgcaatctcatgatcaaacttgaacggatggaagtggcttcttacggatgggcaaaaaaagtggtttcttgagatgaatctcctcccggtgaagatccaa

SEQ ID NO: 242890 - DNA, 394 bp, Homo Sapiens
ttgaagtcaagtatgccttgtctacagcaatggcataatacatcatttacctgagaatgagtaagaaagacctaaaataattatcagccatctttgttactacaaaggcagttttagtgacatttgctaaatcaacaacaaagacaagccattacatgggtaaataaaaaatggaaaactactcccacatatgagctcacaacccaataattcctttcctgaatgattttctttaattcccaaagcattaacttttacaccttctaggtaatacttaataaaataatgatgcaacctatattggtgggcggggtagttgtcaaaaagtcatttttagagtggtttatacaccacaaacaaatacaggtcagcaaccaacttttttgtacaaagt

SEQ ID NO: 242891 - DNA, 282 bp, Homo Sapiens
  misc_feature (121)..(131): n is a, c, g, or t
ggatctcggttttctatgcagttatatcacctcagtcttttaaaagtaaattgaagtatttacatatattgtgatatgggtatatttagatttttaaactatattttcccttaattttccnnnnnnnnnnnctccttctcttgggtcaataaagtttagtttatttcttctatgttctacactggtttagagacagtagattgttctatttttagtgcagtggttcttaactgaaggcaattttgcccccaagaggatgttttagatagagagttttgccaa

SEQ ID NO: 242892 - DNA, 1611 bp, Homo Sapiens
  misc_feature (1281)..(1327): n is a, c, g, or t
ttggctatcatggagactgagagcgagcagaactccaattccaccaatgggagttctagctcagggggcagctctcggccccagatagctcaaatgtcactatatgaacgacaagcagtgcaggctctgcaagcactgcagcggcagcccaatgcagctcagtatttccaccagttcatgctccagcagcagctcagtaatgcccagctgcatagcctggctgccgtccagcaggccacaattgctgccagtcggcaggccagctccccaaacaccagcactacacagcagcagactaccaccacccaggcctcgatcaatctggccaccacatcggccgcccagctcatcagccgatcccagagtgtgagctctcctagtgctaccaccttgacccaatctgtgctactggggaacaccacctccccacccctcaaccagtctcaggcccagatgtatctacggccacagctgggaaacctattgcaggtaaaccgaaccctgggtcggaatgtgcctctagcctcccaactcatcctgatgcctaatggggcggtggctgcagtccagcaggaggtgccatctgctcagtctcctggagttcatgcagatgcagatcaggttcagaacttggcagtaaggaatcaacaggcctcagctcaaggacctcagatgcaaggctccactcagaaggccattcctccaggagcctcccctgtctctagcctctcccaggcctctagccaggccctagcggtggcacaggcttcctctggggccacaaaccagtccctcaaccttagtcaagctggtggaggcagtgggaatagcatcccagggtccatgggtccaggtggaggtgggcaggcacatggtggtttgggtcagttgccttcctcaggaatgggtggtgggagctgtcccaggaagggtacaggagtggtgcagcccttgcctgcagcccaaacagtgactgtgagccagggcagccagacagaggcagaaagtgcagcagccaagaaggcagaagcagatgggagtggccagcagaatgtgggcatgaacctgacacggacagccacacctgcgcccagccagacacttattagctcagccacctacacacagatccagccccattcactgattcagcaacagcaacagatccacctccagcagaaacaggtggtgatccagcagcagattgccatccaccaccagcagcagttccagcaccggcagtcccagctccttcacacagctacacacctccagttggcnnnnnnnnnnnnnnnnnnnnnnnnnnnnnnnnnnnnnnnnnnnnnnncgcaagccaccaccctcactgcccctcagccaccacaggtcccacctactcagcaggtcccaccttcccagtcccagcagcaagcccaaaccctggtcgttcagcccatgcttcagtcttcacccttgtctcttccacctgatgcagcccctaagccaccaattcccatccaatccaaaccacctgtagcacctatcaagccgcctcagttatgggccgctaagatgtcagctgcccagcaaccaccaccccatatccctgtgcaagttgtatgcactcgacag

SEQ ID NO: 242893 - DNA, 528 bp, Homo Sapiens
agatgaaatcctctttacaatggttacagtctagtgggaagacagactatcaaagagccttttgggcagttggggaaggtctatagtagccaacttgttctccactcagggcccaaggccttgctgttccctttgctgaaatcctcccaagcgttcttagcatggctctactcacctcacttaatactgctcattcatctggagtctctaacctatttctccgatgtacacccttcacagcatgtacacattgtgtgaaaatatgtttccttgtttctgtgtatcttattcaaggctacttaccctgagattaggagagtgcctagccaattcataggttgattcattcattgattcatgcattagacatgtgtttaaagaacatactacataccatgcacttatctaggtccttgggtctgtctatatgagggagcaaaatctcccttcccacctggagcttactttgatgttgaataatgacaagaattaatgttcatccacgctttctatggataatattcatga

SEQ ID NO: 242894 - DNA, 783 bp, Homo Sapiens
  misc_feature (571)..(582): n is a, c, g, or t
cacatttaaatattaatgaatctaattttctgtcaaacattaattaccatcttttcattgtgttactttataaaactgtgtttatttcaaactctggtgaattttctgaagaaagggaaacagaaaattctaaatgcagcatgtaaaattcacatttacaaacacacacacaagtatagcaatgcattaaagaacaaaaactgaatcacaggcctcacgaagtaaagaaaactttttatccatctccaagctaacatgtgaatttcactagaaatgatgaaatatacaaatatttcaggacctttgacatgtgtggaatagttgagtggcatctagaatcaataggttcagttcctggctccaccaattataaactgtgtgagcttaagcaatttgtttagcacagaacacatgtcactgttgctattttatgtttgttgttgttatccccaactgaaagcaaatagaaagcaattttaatatcatattttaagttctttgtaatagaaaataaagtctaaaagataaggttgggaaagaacaaagagtgctttaaacccaagattaattnnnnnnnnnnnntctctctgcaaacctagtaatgagaagaaaaccaaaaattcaatgacagtagcctcttggtttgtcttcatcctttgctttctgcaaattgtaaagaagataaaagcactacggtcaagcatacctggtgtgtttcgctgtacatcagatcctcctaccttgtcccttcctgtcaatgtgaagtggttagccataagccaa

SEQ ID NO: 242895 - DNA, 905 bp, Homo Sapiens
  misc_feature (481)..(492): n is a, c, g, or t
caagagatgctcacgacggctatggtaaggtgctgtcaggtgacacttgcataaatttggttgccacggcaatagctagtctaaaagtgggctactatatgaggcagagcataagacatgtatgacacaactatttcttaaaaattaagtgagtctcttgacattaacacggatgttttaaaatgacttcagatctgatggtaaacaagggcctccctgaagaaatgatgtttcagttaggaatccaacaacaagaaagcaatcatgtgatggtcttggaggacagctttccagagagaatgagcagttaaagcaaaaatcgtaaggcacagtgtgatcaaggaacagaacaagcagagagtggtgtaggagtaaaaacagaggaaaggtcatggggaaatactcatatttcattccaagcaaaatgggaaggtattttgagagttttaagcagatgagtgacatgaattggtttgtgttnnnnnnnnnnnntggtgagttccaattctggaaaagatggagtaagcacaatctaccctgtctctcccactgaatgcaactataaatcatagaatgcactgagctgaagatgaagactcaaaaaataaatgttagaaggtggatcacagtaggagccagaaactgaagttattctgaactggcagtgagctgcatctctctccagtaccacctggcctcaactgaaaggcagcgtggactccagaggcgtgccctgcgtatagccagacagagctcccagggcagcctctcttcctggtccaacaagtgggaaaaggtactatgaagggccacagaaagtaggagaatccctgagtcttttcccttttttcttcccttttctcccagcccagcctcaaagcaaaccacaggagataatgacccaa

SEQ ID NO: 242896 - DNA, 650 bp, Homo Sapiens
  misc_feature (462)..(475): n is a, c, g, or t
atttgtattaatatcagtctttggcctaaaaattcagcacccctcttccccttatacttgtcccacctacttcacagggataatgaagataaaatgaattcaaggctagaaaaatactttgagggagaaaagcactatataattatacctacaaactatgattttccccaatatatggctcattcctcttctcatctcagcttgtgtgtgaacccagagttgtatattgcctctgtcctgtgctcagtaagcaaataaggcaggcagggggtacagtgtgatcctgtttaaagttacataaattacaatcagggtaactgctattattaggcaaaaagaaaaacagcacagaaaggccagtgtgcaactaggacccactaaagctcagaggaaagcaatgcaagattatcagacaggcatgattgcatagaaggaaaatgtggtgtcagagttcaaactggnnnnnnnnnnnnnngttatctaaggcaaagtggtggcaaagaagttatttgttccatgtcacacaaacaagagcagaagattcatgggaacccgtacaaaagcatcttgtgtcacacagatctctccagctgcctatagggaatatacagaacagtgtcaccttcaaagaatgactgtacctgtgccaa

SEQ ID NO: 242897 - DNA, 1032 bp, Homo Sapiens
ggggtccaatgtgacttttaccaggttctcatttggaatgtgcctggggcaattaaaaagagaagtaatccatgagacataaaaagagaaatcttagggacaatgaggctggcccagtataaagtccagggagattctggactgtctatcatgattagttgtagcggctctagtaagttggctcacataaatactgttgaatggatggtcttagggacactttgcatccaagaggggatttgaaattaatgttttaggacgcttttcaaagaggaaatattttataaagagaagaatggctaccatcataggaatggtacagatattgagaaaggattcaattctaacaaataaataagaaaacaggatagactgcttaatgatggtgcagttaacataccttctggtcttaaaggactacatactgtactatcgtgatgtacattttatgctctaataaatatcataggaaattattaaagtactaggttcccaccatgttgcagcacttctaaaaatgtctctaatggtgtggttaacagaattgctgaaatgttgcttcattattcagaggatacatgcagatgctgatgaaccagataactctctaaggatggaatactgcacatttcacagacattatagtggagattaataaaatgttttctcttcaacaaggtgcatgcatttcagtcacagtatttgttagactcagaagaacagtacatacgctttatgaataatccatattatgatagtaatgatgcaggtagatgttctattatgaatagttttgataaagcagaaaacctcaagcaaggtagaatgttcaatataaaccttaacaaactgtatacttgttgcttaggaacttaaaacttacttacaaagttctgcttaaaagatacccatcctattctaaccaagtatcttcctatatgccaagctgtgactttagatcattctttaagattaatacatatatccagaactagaaaccaaggcgtaccacaaaacgtgcttttatgccaa

SEQ ID NO: 242898 - DNA, 828 bp, Homo Sapiens
ttggctgaggcgtacgggtcgcacgcagcgccatgcgaggcccccctgcctggccgctgcggctgctcgagccaccgagccctgccgagccaggtcggctcctgccggtagcctgcgtgtgggccgcggccagccgcgttcccgggtccctatcgccgttcactggcctgaggccggcgcggctatggggcgcggggcccgcgctgctctggggcgttggagccgcgcgccgctggaggagcggctgccggggcgggggtccgggcgcctcgcggggcgtcctgggcctcgcgcggctcctggggctgtgggctcgcggccccggcagctgcaggtgcggggcttttgccgggccaggcgctcctcggctcccgcgcgcccggttcccgggcggtcccgcagccgctgcctgggcaggggacgaggcctggcggcgcgggccggcggcgcctcccggggacaaggggcggctgcgccccgcagcggccggactcccggaggcccggaagctcctggggctggcgtaccctgagcgccggaggctggcagctgcggttggatttctcacgatgtccagtgttatctccatgtctgcccctttcttcctggggaagatcattgatgtcatctataccaaaccccactgtggactacagcgacaacctgacccgcctctgcctagggctcagtgccgtgtttctgtgtggtgctgccgccaatgccattcgtgtctacctcatgcaaacttcggtcagcgcattgtgaatatgctgagaactttcattattctccttcattctggaggcaggaggtttgctttctttgaca

SEQ ID NO: 242899 - DNA, 900 bp, Homo Sapiens
ctttgtacaaaaaagttggcacctgtgatcttggccaaaaaaccattgcaactcacagtaagagactgggtttcggggaaggaggggctagggacattttggcactggcctgccctattgtctcccatcctagtctgtcctggtccctggcaacaggaacctgggcagcttatcctgcccacaggtaagcccctgggagcatccacaactggggacctgctcagtgccccccctgccttacagctacatgacagtgctgttttatttgaacaacgtcactggtgggggcgagactgttttccctgtagcagataacagaacctacgatgaaatggtaagggtcaactgggctattactcttgtgggctggcaggggcttagacaagtgaagtacacacctctccaggtctaaggatgtgggcccaaattattccttgggcatatctggttggtttccctttggtcacccttggctggcctggccatagagtggggacaggttgaacaccccaccaccctgctgcccacagagtctgattcaggatgacgtggacctccgtgacacacggaggcactgtgacaagggaaacctgcgtgtcaagccccaacagggcacagcagtcttctggtacaactacctgcctgatgggcaaggttgggtgggtgacgtagacgactactcgctgcacgggggctgcctggtcacgcgcggcaccaagtggattgccaacaactggattaatgtggaccccagccgagcgcggcaagcgctgttccacaggagatggcccgccttgcccgagaagggggcaccgactcacagcccgagtgggctctggaccgggcctaccgcgatgcgcgcgtggaactctgagggaagagttagccccggttctcagc

SEQ ID NO: 242900 - DNA, 322 bp, Homo Sapiens
tgatagtagtgagatgagtcagcaacaaaagagaaaataaactgaagtaaccaaaaattataagtgttatgaaggaaacaaagcaggtggcagtatgtataaaggccctaagttggaaaagaagactgttgatggagtatagtgaacaaaggagtgagtggtgggagagctaaataagctaccaggtcatgcggaaagagtccttaaaaggggcaggaagcggggaggaaaaaaaagagttcttactaacttgacagggaacagactgtagctcaaatagaaatccttccttcagctgagccattgcacccagcctccttca

SEQ ID NO: 242901 - DNA, 722 bp, Homo Sapiens
gtacaaaaaagttgggtaataaatcagggtaagttatttttggtgccaagtcgattaattgaatataggttattttgcatcttagattccctctgacgactaaatcttataagcagaggtatgtgagcatgagaactgtgtcgggtggtcctgaagagattagtggattagaaggagatttggagatttttaaaaaagcctctggacagtgagttaaatggtgggttgacactctgtggtcgggactttttggagagtctataaagttctgctgtatttctcaagagctagagagagatgatactatgaccaaatttggtttgaatgtattataatgtactgagtatcactaatttgttgggaaatgactgttaaaaatacttactgacgcttaaaaatatcacctatagcattagtataagtagccaactgatttacatatatttcatgtgtgtgttgggagaggggtgtggattcgttaggccaaagatttcggtaatatatttggaagagataaatgaagataaagagataaattaccttttgaataattccaaaactaaaaatgcttcccttaatttttatttctgattttcttatttctatcagagaaatgtttctcatgtgacaaatataatgctttcatatttacttctgcatgcacaacttttaattaagtattaattgattatttttttagagacaggatcttgctgtgtcat

SEQ ID NO: 242902 - DNA, 681 bp, Homo Sapiens
tttctcaaataaatgtttaatattaatcattcccaaactgacaagaacacaaaaataaaatgcaaatacagagccagctttgtcacccaaatctgtgtctatttctgatagtccatggaatgtggttttcttggaagccagggttggtctccccacagaccccaggctaaggtcaccagttaggaacccaggacttggaaggcagagcctgtgagctcttccatcagggatctgactccgcaaaacgacttgatgaatgcaattggcaaactcccatgttcggacttcatatgcatgagccgttggacagagggtttcttagtatatactttaatgcatgtttatgtgcaatcttgttagtgggtatacaagtttgtgaagaacttctcatttcaataggcagttaatgtaatgcattaaaagcctgggaatttggggctatatttttcctttctgactcaataatcttcaaagaattcataggaaagtcagtacttgcagacaagtggttagcttggctaaaatgtacaaaacacccagaacccacaaaacactcagaggtttaggagaatgttttaatgcttaagaggcaggatcaagtgaagaggttacagaaatcagtgtctctggctgggcagtcaagagagcaggctcaaattctgtgactcacttctctgccaa

SEQ ID NO: 242903 - DNA, 1241 bp, Homo Sapiens
  misc_feature (204)..(237): n is a, c, g, or t
  misc_feature (1058)..(1067): n is a, c, g, or t
ttgacccctttaagtcttacaaatccctgggactctactgacccttgctgtaaagtgaagggagtgaaagtatttggaatataggtaggacctctaatataataaagatgtcactttaaaatcaatttattcaacaaacatttattaaacattcatatgccaaaaactatgctatggagatgcaaaaaataaaaaggttccttnnnnnnnnnnnnnnnnnnnnnnnnnnnnnnnnnnacttttgaaaaataaaacaatacagtacgatttaagtgacatacaatagaggtaggttgtaattacagtggtgacacgaaagtggaagttagatgactctccttgagtggagcaaaggaggtttcacagaggaaatgcttatgtcaggcctgcaagatgcataggaattttccaagtggggaaggatgactagcacacttgatgcaaagagtacagcatttaccaaggcgggaggcctggccaaatgtggcttctgaagaagtgtaagtctgtttcaccagaacattcggtggaggaaacacatcagaagaccttgtacaccaaacagaggagtttggctttctcctgaaagttcctgaagtcactgaaggatattagggagtaacactgtcagagtgcttctagaaagcctgctgtggtaacattgagcaacagagaggagaccagctaggtataggaggcaggttagtactgtaggtatttattaataatagcaatgaagatgaaagagtgatgtatcagagaggtggagataaaatcagtaaaacttagacactaaatgataggggaaggtggaggagaggaatgagcctagaaaacttagaatataatggttctaaaattaaccaaagtaagggacacaggcattagagtaggttttgcagagaatgaatgttttaagacacacacaggtgtctctgggacaaccaagaaaagtgcaacaggcagatggattgaggagtctggctaaagataaggatttaggaactgctgaattaaaattacccaagcgtgagaagtggtgttgtgattaagagagnnnnnnnnnntggaggtctgaggaataacatttaaggaataaatgaagaggccaaaaggtggggggtggttcaggagtgagcaaaatgtaagaagtcaagggaataaatctttaaagtaggggttgtcaaaaatgtcaaatacagaaaaaaagtcaagtactagcttgtgaattaaactgccaa

SEQ ID NO: 242904 - DNA, 1148 bp, Homo Sapiens
  misc_feature (411)..(562): n is a, c, g, or t
cacataaaaattgtgttatttttattccttgtatgctcagctgcccaataacagtctgaggattaacatatttgttaaatgcacaaatacattctttcacaaatattagtttaataattttatgttaaactccctctatacttacaatatgaattagataattcagaataaacattccattggaaaaagctacacaatttgttataaaacatccctaaaagcatcagaaaattaatacagcaatgaagaattacaggaccaaattaagaatggtatgaaagcctgtttgtgacgcttatgtttgggttatctctttatttgagtgactataaatctcaaaagagaactaaagggagaaataaccgtatctactaacatgctaagggtacttaaacatctcttagtaattgnnnnnnnnnnnnnnnnnnnnnnnnnnnnnnnnnnnnnnnnnnnnnnnnnnnnnnnnnnnnnnnnnnnnnnnnnnnnnnnnnnnnnnnnnnnnnnnnnnnnnnnnnnnnnnnnnnnnnnnnnnnnnnnnnnnnnnnnnnnnnnnnnnnnnnnntggtaaactttttaacaacataatttatccttctagaatatgaatgttggtctatttgatgatgtcccacagattcattagtctctgctcattgtttattttttattctttctgtttctcagagtattttccattttcttctcttcaagttcatggcttcctctgtgtgtgcaaatatactcttaaatccctctggtgatttttaaatttttatcattgtagttttccactccagaatttgttatctctttgctgatattcctactttttaatattttttctgattcctttatttctttgtttatgttttccttttgacatttgagtataatgaagagagttgttttaaagtctttgtctggtaagtttgatgtctgggtttccttagggatattttctgtcactttattttgttcctttgaatgagccacactttcccattctttgtatgccttgtaacgttttttgaaaactggacattctaataattataattactatgtggttactctgtaaatcagacctccccctacaaacacagtaatgttttggggttttaaattttctttacttattatattgccaa

SEQ ID NO: 242905 - DNA, 1725 bp, Homo Sapiens
  misc_feature (546)..(578): n is a, c, g, or t
  misc_feature (1511)..(1562): n is a, c, g, or t
ttttaaaaacatttacaaattattgtattaaatgtccattaaaatacaagttaaagaatgtttggtaatacatattactgagaaaatatcagaaattattataataaaagaatccagctacagaaaaaagtcacaatactgaacagaattttaattcatgttttttaagaatataatttaacttgctattttgaataaaggcacagagcagtggctaaaagacgtctttgatagcagaaaatgctggtatactatgctgatcaaatactatataggaaatggcatatttagggggctagagtaagagtagggatagtttatcagtacataatttgatttaaaaactatcaacaagaataatcccatagtgatgtgaaattctttttggtaactccccctctccccaaatgtatactgagaagaaaaattaaaatctaatgtggtttctggtatttaaaataacaagacaaataagagagttgttgactactaaaaaaaggattattggctgggcacggtggctcacacctgtaatcccagcacttnnnnnnnnnnnnnnnnnnnnnnnnnnnnnnnnnatattctatttctgtataatttttattatgaccataaaaataacaatgtagtcaataacaatttaattgtacattttaaaataattaaagtatataattacactgtttgtaataaaaagtataaatgttagaggtgatggataccttatttaccctaatgtaattactacacattgtaggcctgaatgaaaatatgccatataaggcataaatatatacacatactatatacccacaaataccaataataaatttcaataagaaaaaagaataaaaatctaacctatggaaacaatattcttaaattcatttgctgtttaaagccactcgcaaagtgattactagagatgttatttcactatgtaccaaatagtatattgctaccatcttttacctacacccttgagtaaggtgggataggttaaagttagtggaataatgcttcattaaatgcacaatagtcttaacatgttaaaaaaataaaattaagtttgcacataatctaatgatttttaaatatactgcattttattacataaaagtacaattaataatatacttattttaatatacttttaactataattaacaattccaccataatgtagaaaatagtctgaacacctagcttatacattacttaatataggttaactacaatgagcctctccacttatcttttcatcacgcatcttacattttagtgtccttacttttatagaaaaggttataaataatgcccaataaaaaaagaatctctggtatctctgatgcagcaaaaattgctcatatgttttcacatgtgaataggaataaaataacagcataaagtaatttgaaagctgtatgacatcattattcacttttgaaaaactttttttcaagaaaacaagtatacttttaatgtaattacaatgcttccaaaaatctccnnnnnnnnnnnnnnnnnnnnnnnnnnnnnnnnnnnnnnnnnnnnnnnnnnnncaagtgcggcaaccaaataaaggctttgtcacattttatacttttctacagtttcacactagtataatttttttatgtatagaaacgttggaggtgttgggaacagcactgtcacatctttcaggtttgcagggttcctcttcagcatgaattattgccccaa

SEQ ID NO: 242906 - DNA, 945 bp, Homo Sapiens
  misc_feature (561)..(622): n is a, c, g, or t
tagctttaaaattttattgaaattcaagtttagaatttaacaaattaatacaatattacactgaatactttctaaccagtagtttagctttacataatttctaggcataacttttaagaactgatactttctggttaattttccatgatatgccaattatacattcattaaaatttcagatgctacctgaattattcttatctcaatgacagaatttaaaaaaataagttcaaatactgaaaatctaagacattaacactggggcccttgtaatatagaaaagaagaaaaattgtacaatcttaactgtttaaaactcttaacgtttactgtagtaacagaatatgaatttgtaacataaccatatgaatttctcaagttatttcctactgatgcatgtctgaagttataaaaatctcttttaaacgaacctatactgaattactccaaaaataacagtgatattttagggccttgcaaatttattctagtgcatattttaagtacctaaagtacagcctgtgcactagcaggttactgaaaagaataagtgtggctttcnnnnnnnnnnnnnnnnnnnnnnnnnnnnnnnnnnnnnnnnnnnnnnnnnnnnnnnnnnnnnnaaagtgtgaatttaaggagtgagtcgtttgggatcacgagggaacatggaggtctgacgaacattatgcaatcccagaaacagcatagtaactcgttccaatccaatgcctccaccagcatgaggaggggctccaaagcggaaggaatcaatgtaagccttaattttctccaaatcaattccatgatgtaaagctctctctgttagcagttgaggatcatgtattctttgagctcctgacaatatttcttctcctctcatgaacatatcgtaagagttggactgtttgggatttcttgggtcaggcatggtatagaaaggcca

SEQ ID NO: 242907 - DNA, 1255 bp, Homo Sapiens
  misc_feature (108)..(125): n is a, c, g, or t
ttgggcctgttccactattagacaaggggtagagtttctcatttggatgaaaaccccttcaactggtggtgtacaactgaagctactatatcttttttgaaaatggcnnnnnnnnnnnnnnnnnnttctggagaccacagaactcaagtgtgtgtttctcctcttttgggtcccctttaagtagttgggatattttggacctggagataacaccagttacccatccttaccagggaatgttgccatcaattccagttgaaaataatagaaaagactgaatttttatatgcttcacttaggctttcatttgagtagactctaaaaattctgccttgcttaagttctaacactgcctctcagatttcagttttggacattgcacaactaagaccttttaaacgcatttgcttgctaactcggaagacacatagtctgcagcaagacattcctatattgaagaaatgagagaaaattttatgctgcatcaggtggagagcaaggctcaacggtggttgcattagttccctcggaagtattgaaaaaactttgaaatggaagaaaatttttgcacctatgttctgagtaccagatgtctgggttctttcttctgcattagataaatgatcatgctcagtgtaacaaagggaattaaaagttttcccacagtccccttctaggggagaaactcattgtgtcactgaaatgtttagcttactttaatcttgatatcagcctctacagaccttttattctaagctatcgagcttcttgattgcatttggttgaccacgagtgaccctaaggcattgggggactgtccactgggagttggagtgagcacgtggtgctgcaacaggcattgttttacatactttgtctccagtattctgacaccaagtgtcaactgtggtactttctttgcctaggatatgaattcataattgttgcttttgttgatggttgataccctttccattgatttaaacctaacacattatttctattccacatgcccagtacacatatattccaaagccactggaccacttgagtacataagtgccactgtttaatgcaatatgtatattcaggtctgtaaagctaacagtgtgacttggagtgcttcctgcagatgattctgacttgattatttacatggaccatggtgatatccaaaagaaaaatgctttttatatttatatattatttcattgaactatatatgaaatggctatcaataaatgtatttactcct

SEQ ID NO: 242908 - DNA, 1001 bp, Homo Sapiens
  misc_feature (294)..(310): n is a, c, g, or t
gggttttaaaaaagattcatttgttcaattatcttttaattttctacgttgttgaaagtttaaagccaaccattatataaatctccagtcgtaatcacatttctagtaacaaaacatgtcagtagtagaccttatacagaataaaattctacccatgagttgactcaccccccacataggatgcaccaaactccaccttgcgtcctcttagagtatacaaacaacacctcctaccttggcatgtacccaagcacacaatgccttaataataattcgcagatacaaggctgttgnnnnnnnnnnnnnnnnncaaaaacatacttcatatttcctcttttattatataaatatcagtttaaccttttactgtaagaatataaacgttttaagaggatctttgttattatttatacaaattcacaaacagtacaattaattgataaaggtctctgggtttctttaactccatggtcttgcatgttgctgtggagggttctaaagaaataacaacaaaaatccaacgaaaatatacatcctactcagaagtgatttctttaaagccacaagtcccaacccccaccaaaagaaagaaagtcatctattcctccatttagaaacggaattttttaaaacccacaaactcccattttgttaatagaacagagataagatatgagcttcatcacagccccaggggctctgcaggccagctctgctcctgtttcccacaggaagccgcactgtgtgacctttttggggggaaacttggaagagggtgagggtagggcagaatttgcatatataatcatcattttcaagacacaatctgcatctccaacaaaaacaacggttcaactctcattgctcccacatatttgtgctataaattaagatttagaaataggtcctcaaatcccaatgaacaaggagaaaaaggaaattatagccagaatgtggaagtggggcacactggacggatggaggctgggaagaagccccaa

SEQ ID NO: 242909 - DNA, 1414 bp, Homo Sapiens
aatacaagtaaaagggggtgatgcaaacaccccccaggtcagaaccaggaggatctgctgggctgtccctggaccaaaggcggaaagggcgacaagacgccgaagcaaggtagcgcatcacgctgggaggggagggtggcagcttctcctggattcttttcatttatacaaaaaaggaaaaccaattttttcgaccaagaatcccattcctcacagcaggggtcagaagagcagcagcaccgagtgggacaggggctcctcctggcctcacaagctgggcagtgttggcagcagtggcagcagcagaggggcctgcctcctggcatccccggtactgggcagtgtgtgaagcctccctgtgggtgtggggacctggggcacacccacctgcccctcactaggagagggtttctgttggcagtcaggctttgggggtctctgtctggactcctgaggcctgggagcactaccctcctcccagaagaggggacatccgtgtctgcttggctcagcagagctgcccacacccacctaacacaattcccaatttctctgctctgaggaaggcagaaaagttattgcaccagtgacttgggcaagtgggggttggctggcagaggaagcgcatgcccaggaaacagggcccctataaggctctcttgcagcccgggcactgggaaattcgtttctccttaatggctttcagcaggatcagaccattccctctgccacatctgtgctgagtggccatctggctgtgcatgcatgcgtgtgtacatgcgtgtacacatgcctgcgcgtgggtgtgttggaggtgtgagtgtgtccactgtgggcacacgtactgggtctgaggtggtcgcacttgcaggcctgtgttcacctactctgtgctgctgcttttcagacccttctgataaaaggggactcggctggttctattacacattagaacaatatcaaaatctgtaaggaaacaggggcatgggtgtggggtggggggcaaggacagggagggcaacaagaggcaggatgacaactggggaggccttggcacaattcataccaagtttatttcatttccagcaaagcagaagctcagctcatgctgtgggcatgaaggagaagcaaaatgtcctcatctctctgctgggctagacctcccttttgccagctggctgtgtctgtgggcccagcagtagtgcccaccttcccacaaacttggggcacagaaaacctcacatccctaggtccaagtgctgactcctgcctcatgcccaccctcagcccaggctggcagctgctcggtgggtatgctgaggctgggcccctggcaagtcaggagcctcctacgtggcccatgctacatggaccccaaaagtggttgtgctttgcccaacttttttgtacaaag

SEQ ID NO: 242910 - DNA, 2141 bp, Homo Sapiens
  misc_feature (801)..(861): n is a, c, g, or t
ttggagaaaagaaggaaaacatggctaaagagaatcctcccatgaattctccttgccaaataaccgtgaaaggactcagtaatttgggaaacacatgtttcttcaatgcagttatgcagaacttgtcacaaacaccagtgcttagagaactactaaaagaagtgaaaatgtctggaacaattgtaaaaattgaaccacctgatttggcattaacagaaccattagaaataaaccttgagcctccaggccctcttactttagccatgagccagtttcttaatgagatgcaagagaccaaaaagggggttgtgacaccgaaagaactcttttctcaggtctgtaaaaaagcagtgcggtttaaaggctatcagcagcaagacagccaggagctgcttcgctacttattggatgggatgagagcagaagaacaccaaagagtgagtaaaggaatacttaaagcatttggtaattctactgaaaagttggatgaagaactaaaaaataaagttaaagattatgagaagaaaaaatcaatgccaagttttgttgaccgcatctttggtggtgaactaactagtatgatcatgtgtgatcaatgcagaactgtctccttggttcatgaatctttccttgatttgtccctcccagttttagatgatcagagtggtaagaaaagtgtaaatgataaaaatctgaaaaagacagtggaggatgaagatcaagatagtgaggaagaaaaagataacgacagttacataaaagagagaagtgatattccttctggaacaagtaagcacttannnnnnnnnnnnnnnnnnnnnnnnnnnnnnnnnnnnnnnnnnnnnnnnnnnnnnnnnnnnnttcaaggaaaagttcttcatttaaatgatatttgtactattgaccatcctgaagacagtgaatatgaagctgaaatgtcacttcaaggagaagtaaatattaaatccaaccatatttcacaagagggtgttatgcataaagaatattgtgtcaaccagaaagatttgaatggccaagcaaaaatgatcgaaagtgtaactgacaatcaaaaatccacagaggaagtagatatgaaaaatatcaacatggataatgatctggaggttttaacatcttctcccactaggaatttaaatggtgcctacctaacggaagggagcaatggagaagtggacatttccaatggtttcaaaaacctaaatttgaatgctgctcttcatcctgatgaaataaatatagagattctgaatgatagtcatactcctggaacaaaggtgtatgaggttgtaaatgaagatccagaaactgctttctgtactcttgcaaacagggaagttttcaatactgatgagtgttcaatccaacattgtttatatcagttcacccgtaatgagaaacttcgagatgcgaataaactgctttgtgaagtatgcacacggagacagtgtaatggaccaaaggcaaatataaaaggtgaaaggaagcatgtttacaccaatgccaaaaagcagatgctaatttctcttgctcctcctgttcttactcttcatttaaagagatttcagcaggctggttttaacctacgcaaagttaacaaacacataaagtttccggaaatcttagatttggctcctttttgcacccttaaatgtaagaatgttgcagaagaaaatacaagggtactctattccttatatggagttgttgaacacagtggtactatgaggtcggggcattacactgcctatgccaaggcaagaaccgcaaatagtcatctctctaatcttgttcttcacggtgatattccacaagattttgaaatggaatcaaaagggcagtggtttcacatcagcgacacacatgtgcaagctgtgcctacaactaaagtactaaactcacaagcgtacctcctattttatgagagaatactgtaataatatcaaaagcactttttctggaaacacatttatggcttttataatggctgaaataacgataaaaaaagactaattaaaatcatgttcacttaacattaatacatgccagaagaaatcatgtttatttaaatattgaagggaaaaatacctaaaatgtacaaaggttttatattgtcatagtgg

SEQ ID NO: 242911 - DNA, 224 bp, Homo Sapiens
ttaggagagaattaggtttagatgaggtcatgagaatagagcccctatggtggcattacttcctttataagaagagacactagagctgcttttctccctaccatgtgaggataccgagagaagatggccatttccaatctaggaagcaggccctctttaagaaacacaatttgccaacactttgatcttgcacttccagtctccagaactgtgagaaatatctg

SEQ ID NO: 242912 - DNA, 1050 bp, Homo Sapiens
  misc_feature (543)..(738): n is a, c, g, or t
  misc_feature (750)..(809): n is a, c, g, or t
gaaggcagataacaggatgaaaggatatcttgggaagtgatttttcagcttaaggtcagtcactgctcagtgggcactgggctagtgttgctttaccttcatcagtgcagtttgcaacaaagatcaacagctgtctcctgttgtactgaattaggaacttctgacatgttcttattgtacctggcatatgagttactgtggtcaacagcttgtgaaaggtctcgaccttacagacttcagaggtagggggaagtgtcttgttagcgggacagcagcaagacccacccaccagtttagactgaactgtgaacgtgtcaccaattgaaaatcagtagccataccacctcactcctacctcccacatgtaatgtgttgaaaaagcatgggtaacggtgtcctttgttctccaagtatgtgatgaagggaagagctgaccacacaagctgatagaattcttttctgcatcgaagtagcactattccagtataggcattgagatatcgaactacaacaggaaagaaaaatcattttggaaaacttttnnnnnnnnnnnnnnnnnnnnnnnnnnnnnnnnnnnnnnnnnnnnnnnnnnnnnnnnnnnnnnnnnnnnnnnnnnnnnnnnnnnnnnnnnnnnnnnnnnnnnnnnnnnnnnnnnnnnnnnnnnnnnnnnnnnnnnnnnnnnnnnnnnnnnnnnnnnnnnnnnnnnnnnnnnnnnnnnnnnnnnnnnnnnnnnnnnnngcctgaacccannnnnnnnnnnnnnnnnnnnnnnnnnnnnnnnnnnnnnnnnnnnnnnnnnnnnnnnnnnngccagactgtctcgaaaaaaggaaaactttagagtaacagagcctactatgtgccaaaagtatgttgtaggcaagtggcacgtagatctatcagcgagtaaaagagaaaagccaaaacacccactgtgttgcacaccactcagaactggtgaatgaatttagaattgaaaatgctttctaattcaagtagttaattcccaactttttttgtacaaagttggcttttataaggaaagcattg

SEQ ID NO: 242913 - DNA, 1272 bp, Homo Sapiens
gctaagaaagcctataaaaaggtttctgaataaagactgaacagtagtcacagtaagtaaacacaattttaatttacaaaatatgattttgctgttgcagttttgatacgtatttccagtgtgtagatccgttcatcgcacacatctttgggttgaacaagctccacccgtcctcaagtgctgaacaccccaagctgtggccccgccttggaaggcagtgcttctgaaggttcccagcagatctcttaacagaccacagttggaagttagcgtttctgccttgaccagcaacatactcatcctattttaacacggcgaaaggtcaccaattaatcttctcccttcccttgggtagtagctccttgtgggaggcagaggacggattttaaaacccatggtgcaaaaaacacaagagctgtggtttgcagtccttcatcagaccacttgagaaaacaaagggactgttgtcaggaacgggattacttactggccagaaatggaaaaaggctaacaaaaaggtatgatggaaataatttctccaaaccttccttgtagcccccgaaaagaagaaaaagaagccacacatatatgagatgtaacttgtctagtagttagattgattctacaagccacgcctaaagccagctttttgttacagtacagggatgccttctctcatctttgatgactggctggtctttggtggaacagggatttatcccagagggcctctcctatctctaggtttagcgtttcagtgtgatgtgacatgaataccttggacagggtagtcaggaaattcgggttctaggcagggccccagccacggaggggttaacgggctctgggcaaccgcttaccctcattcatcctcagtttcccgggtgggactgagtagcctctacaataacttttagctcttaacattctgtgctttgccaaatccagggctaggggaaggcactggaactgctagtggacaggtgtgaaccccgggtttggtgatgtgtagtccaaattgttctcatgccaatttttggcctttgggtcaagtggcgaagattcaatgcaatttgctttatacaataaatgaagtgtaaatgcagtgtttctaaataacacagtgttttaaattcaccatcttattagagccaagaaatctggaggtaaatatttctataaaacaaataccttcatggcaagatatctttttaaaataaatccagattttcataaattagttttatataaagtggagccaacttttttgta

SEQ ID NO: 242914 - DNA, 1353 bp, Homo Sapiens
tttaaagttactcttcatataagttttatttctgtatgaagtaatgatgatgaggcagcatgtatcactgaaatcctcgtgtattcactgccatctgaaacttgttctccagtatgaaatatatctgccaactgttaaggtattatttctgggcaaaggctttcccatgataatgctgctagtatgtgtaagttcattgatgatctattatgatcactgaagagatagggtctttcttcccatagaaggctttcctagcctactcctttgtaagatttatctcagtaaatacttttcaagacatagttacttagaaaattttcaagacttttctgcattggatgtatcaagtttatttcctacatgtttattgtgacataaaatatgaggtaattaatcaccgaaggcactagtgcattctctgcattcattaaaattcgctcctggaaattgcattgtcttccaagggtgaaaatctagcaacaggctgctctacactgcctatatgcatgtatgctaggagcacactgctgtttaatcagttcacattactaacgtggttttctctctgcatgaatttgtttgtatgtaatcagttcagattctctgcaaaaggactatgtaccttacacatttgtcatgtggacgttgtcatagttttaatgaaggttgacaaatgaaaggttacccccaatccacagactctctctcagatgagtaattttctatacattggtacatcaaagaattcagagcctgaattcatgttgaagcctttctgacattgatagcattcatcctagtgaataacactggattttgaaatatgatttttcatactcagtacacatgtagaaaatctatactgtgaaatctctgatgttgtacaaggcagattttcttcccaaaggcatgaacatgtccactgcattgtcagggtttgtttccattatgagttcgctgatgtacaatgagatttctctttgaggagaaggcttttctacattcactgcatacaaagggtttctctcctgtatgagttcgttgatgaacaattagacggctcttcatagtgaagcctttaccacattcattacatccataaggtttttctccagtatgaacttgcttatgtaaagcaagctctgtttccttggcaaagcctcttccacattcactacatatacaagatttctcttctgtatgaatttgctgatgtacaatgagatagcgtttcatggtgaagccttttccacattcactgcacataaagggtttctctccagtatgagttcgctggtgtacaacaagattgctcttaaagggaaaacctttccaacttttttgtacaaa

SEQ ID NO: 242915 - DNA, 929 bp, Homo Sapiens
ctcattttaccacatcttccctctgtgcacatccaaacacgcttccagagtctgctcacagagggtgacacacacaaacaagtggcccctgtggctctcactcccatagaatgtcaccaagtgactgttctctcggctgctttgcagacaagagacttcccgctgtgcacgtgggctgccctcacagaacgtcttcacagctacttcttgcttctcatagaaccccaggtagatgcctccttctgaagtatcagcaattttgtatttttcatcaataaagaacttgagtttgccaatcatagggcggtatattctgtggagatccttcagggctgccccccagtgtgagctctgaggcttccagtcttcagcaggagggtgaaaatcttctttggctccatgagagagaagaaccttcacaagggaatggtcataattccgcctcgctgtcataacaagatccccacaatctgtactggctccacgtttgcacagcaactcggcgattttcttcagtttgagttcaacagcaagcagcagtgctgttttgccatcactgtctgtgtcattaatctctatgtgctcttgctccagaagcctctgcaccaaacccaagtgcttcttctccactgccaggatcaggggagtcttccctctttctcccctcacattgacatcagccccatggtccagcagcagatgcgtaatagcctccacatcactatcgtcagagctcaggagagcatggatcaaggcatttctgcccatattgtcacaggcgtttacatctgcccccatctcatcaaggagaatcttcaagacctctacgtgtcctttttcagcagcgtccatgagagctgtggcccctcctttcctcagccgctcttgatcctcctttgtctttcgcctcaaattcacatttgctccaa

SEQ ID NO: 242916 - DNA, 790 bp, Homo Sapiens
ttttacattttaacatctctgaaactgggatgccaactcatatagtttctgttgctttttctttcttaatggattctaaaataagggtacatctcacaacagataagccctgccttgaatgaaataccgcagtagcttagattctttacttcccttgcaaagaggctgaaacgcctgtgagatgggatcaaagaccaagaacacaaatcgttaagggacaagggtctattgaggcctagcattcaccctggatctccagagcttcacggaatttgaaggctcaggcccttccccggcctggcgcccctctggatctgtctcagctgtcctagtcttgctcagaaagcggcccagcttcagcaggaccctcacctctgcctccaaccctctgttgctactgatgtggtaggttccacagttggacagtttggtcacaatgctactgtgcttgcagccacccaaaaccccaagtctttgtcccaagaaaagagtcctagttcccaccttcagaaacccccacagacatctcctccagtgtgactccatcaagccatccttggactctgctcccaactgttccgaaggccagcactggggatgtcatccaggccttaccaaagtccttatgctgtgagtgctgacttcatccctgcagcctgctgatgtcagaccggcctgagtattttattatctaaatatcattataacttgtattgcatacatagttggccctctgtatctgtgggtcctgcatctgtagattcaaccaacctcagatggaaaatattcg

SEQ ID NO: 242917 - DNA, 707 bp, Homo Sapiens
ctttgtacaaaaaagttggcttcactaaccttatctcttgaacatttacctgtgtcatttagtataaactgaaaaataaatatccgtgaagactctagatcattacattatgtggattatattttatttaatgaataccttatcgttgtgtatttaagtgttttgctgtgataaatgatgctgccatgaatatgtttgcacacaaatctttgtacacatctgcgtttatttccttagtatataattctagcagtcaaggtgttttgatatttttaaggcacttaatacacaatgccaaattctacaccagcactatatgaatgcccagtttctggaacccactccaatactgaatgcgatctttgcgtatttgatagtttaaaattatacctcactttaaaagttgtttccttttcttgctcatttggttgaatgttttcatgtgtctatcagccatttaaattatcctgctaaatttttttctgtggcttttagtcttccttccattaggatatttgggtttttcttagtgatttttaagaactctaggattctattattttaaaatataaattgagttaccaaaatagtttaaattttaacaaaactgctgtagctggcctccttttataaggtaaccttgttattgtttgccagctgttgtgcctggcacagagctatgcatacccaaggggctacataaatgc

SEQ ID NO: 242918 - DNA, 822 bp, Homo Sapiens
ggaagagacatagatcactcttccctccactcatggaggtctcaggtcgcggccaggacaattttcagttccccggggggtggaaggggagctgctgggagggatgagattgaactggttggaggggaaagagaagagagcaggagcattagaacccaagcagctgtcccttcctccaatgccgtccagtgggggcgtgggggtgtgtctgggaaggagcggcctcctcaaggtgtctcgggggctgtcagaagcacaggtcaatcgctgtttcccagtaagccagagccctcactcatgtgcccagctcagccccccacaccccagtctggccctgtctgctgcactgaccttacctcggctaagtcaggagacagtcggggtcactgagagctggggaggcagtggggaggggggctgctggatcacaactgagcgaggacggagggaagcaaaggacagagccaggagcaagcccctggcggcggcgactgtggcttctgcccaccctacatacttcacagacaggtgcaggtcggcgggcgccctgtgggacagccctgcctccaagacccctcactccccacccagaacccgtgcatcctgccccacctgcagcccctcagctcttccatgccaaattcccccagctaatgagaactcacgaatcctgtcatcggctcctcctggaaatccaggcgcctggccaggctgctcaccttgggggtgtccgatgtaggggtagggtgagggtgtggaagctgagagtgcaggcaccccactctggggcaccgcgccttgggccaacttttttgtacaaag

SEQ ID NO: 242919 - DNA, 906 bp, Homo Sapiens
ttggggtcaataatgaaggtggctgcggcgcggcggcaggctcagctgcgccgggcgggggcggcgctggggccgcgcctgtaggactcggggccgacgccgcgggatggggacgcggcgcggggagtgaggcagtggcggcggcggcggtaagcggaacttcggcccgaggggctcgcccgctcccgcctctgtcttgtcggcctccacctgcagccccgcggcccccgcgccccgcgggacccggacggcgacgacgggggaatgtggcgctggatccggcagcagctgggttttgacccaccacatcagagtgacacaagaaccatctacgtagccaacaggtttcctcagaatggcctttacacacctcagaaatttatagataacaggatcatttcatctaagtacactgtgtggaattttgttccaaaaaatttatttgaacagttcagaagagtggcaaacttttattttcttattatatttttggttcagcttatgattgatacacctaccagtccagttaccagtggacttccattattctttgtgataacagtaactgccataaagcagggatatgaagattggttacggcataactcagataatgaagtaaatggagctcctgtttatgttgttcgaagtggtggccttgtaaaaactagatcaaaaaacattcgggtgggtgatattgttcgaatagccaaagatgaaatttttcctgcagacttggtgcttctgtcctcagatcgactggatggttcctgtcacgttacaactgctagtttggacggagaaactaacctgaagacacatgtggcagttccagaaacagcattattacaaacagttgccaatttggacactctagtagctgtaatagaatgccagcaaccagaa

SEQ ID NO: 242920 - DNA, 385 bp, Homo Sapiens
cagtaacctctctctaaaatggctgcggaatctgctggctcttcgtcagattgggcagaggacgataagcactgcttcccgcaggcattttaaaaataaagttccggagaagcaaaaactgttccaggaggatgatgaaattccactgtatctaaagggtggggtagctgatgccctcctgtatagagccaccatgattcttacagttggtggaacagcatatgccatatatgagctggctgtggcttcatttcccaagaagcaggagtgacttcagtcatcccagcaatcgcttggttcagtttcattcagctctctatggaccagtaatctgataaataaccgagctcttctttggggatcaatatttattgacttgtagtaa

SEQ ID NO: 242921 - DNA, 3068 bp, Homo Sapiens
  misc_feature (1589)..(1843): n is a, c, g, or t
  misc_feature (1845)..(1874): n is a, c, g, or t
  misc_feature (2323)..(2361): n is a, c, g, or t
  misc_feature (2522)..(2617): n is a, c, g, or t
gaataagttatacttttatttttcagaaacaaaaatgacaagtggcaacttgcctttgtaaaagattaaagagtatcagagtaataagctatctctcatagagacagaagcccgagaaacactattatacagctttcaaaggaagtcctattaaataaatctcacaataatatactttaactcaacaaaacaaaaaccacaaaaaattatacagaactcataaaatggtatatgaatgaaaaagagaaatctttaaatccatacactagaagttctctattaaaatcaaggaggctcaaatcctaaaacagaaagaagaaatacgttaaaacacaatattttttaagagtccaatgaggttattgcagatgtacattttaacatttcatttgctcaatgtatttttttctcattcttggagcacttctgtataatgtagagagattacatgaatgataatgcagatactggccttctcaatgggcctttcaggttttaagtttcaaatctgaatctggaatcccacctaaatgtttacataataggctaccaagaatgagattcctcttaaaattacatttgcttaatttttacacactatggtttagaaacaatctacttttgaaagagacacaatttacagtatgaataataaaagttacatgaaactacacaatccttctcataaaataggagaaacaatttccaaaacaaaaatgcctaatacaaaatgatacagttgactggagctggggtaggatgggaggaagagaacaaccatgtgacagaatgtatggaagacctagattctagtttcagttttgcactaattagttgcgtatcttactctcaacttccttaggtcttgatttttttcctggtaagaagaggtagatggatctctaagctttattctaattttaaggctcaatgacttacagtttataagatttggaaaaccttttggacaatcagttgaataaattccttacatcttgagggtgtgtcactgttcaatcccatgacaataactacaaggcatatccataattttactgttagaaaagaaaaaaatccacctaaagggcaaaagtatacttcatatcctgtttctgttctacaagacagaaaacaaatgtctattctcttgctggcctctagaagcagtcctttgagatagagttgactgaaaaccctagaacaaggataatggttaagacatctaccctgtctttctctctacctgtctgtgtctatgaaagcttctagacagctgctagacagctcaaagtgaactattacataaaaactacccttcaccctacatgatatataggatttctctattacagagaatcattataccaggaaatggttttcctgatattctaccaaaatcctgagtaaaagtttgcattattggaagattattagaatagactaatgtatggtaattgaaatttaaaaaaccttgtagtagcagagtcctagaaaaccagagagttgaaccaggaaaaaggatggtatctctgacttcagcaggtttatcacttatttaaagctgaggccagccaggcacagtggctcannnnnnnnnnnnnnnnnnnnnnnnnnnnnnnnnnnnnnnnnnnnnnnnnnnnnnnnnnnnnnnnnnnnnnnnnnnnnnnnnnnnnnnnnnnnnnnnnnnnnnnnnnnnnnnnnnnnnnnnnnnnnnnnnnnnnnnnnnnnnnnnnnnnnnnnnnnnnnnnnnnnnnnnnnnnnnnnnnnnnnnnnnnnnnnnnnnnnnnnnnnnnnnnnnnnnnnnnnnnnnnnnnnnnnnnnnnnnnnnnnnnnnnnnnnnnnncnnnnnnnnnnnnnnnnnnnnnnnnnnnnnngataaagctgaggccaataattcttacagccagagccaaactttaggttagaagaagcacttacagggaattcaggctttggactctttcagtatctattttcagtttcagggaaggagaagcaaagaaggaagttaaagattatactgacccttagagggatgggcagcagaaatatctgctatattgagctatttacggcacatactttcatcataaccatcaaataataaatgcctttttgctttgatgttacttttttcttgtgaactttgtcctttaaccatatgcactgcaaagagtctgaagtgggaaccgaaggagccatgagcatggactaaaatgcttttcaaaggattggagatgtttcaggcataggggtacctgagaggtttatacggtttcttaaaattttctatggtcctaaaattctcataattttatatgannnnnnnnnnnnnnnnnnnnnnnnnnnnnnnnnnnnnnncacttactgtttcttttaaaaaatatttatggatataattgcgtttttctaaatgtttcattagtaatactcagtcttgtaagtctggttccatagtaatctataatgtaactacttccatctgaaggtccaacaatcttttaaaatatcccatactggannnnnnnnnnnnnnnnnnnnnnnnnnnnnnnnnnnnnnnnnnnnnnnnnnnnnnnnnnnnnnnnnnnnnnnnnnnnnnnnnnnnnnnnnnnnnnnnagaccctgtctctgcattgaaataagaatgaaatcaattaggctcccaattccacaaaaccctacagtgcaaaactttaacaaacccaaagcagggtatccaaggtaaaatcgatctgctcccaaccatccaagaaaaagagacaatgcgactgccactttgtaggaatagccatttacatttcggcaagatatgggcttgaaaaaaccaacttcgttcccagtaaaatgtgtttcattgccactggaatccttacaagttatgttgggtgctggaaaacaggaaacatgagctgtgtagtttgtacagttaactggttcttgcgtagcgtcatttatttttggatctttacaaatatattgtcccactttgaggtcctcgcacttaagcgactcctcgcccccggcggaggtggcaacagccccccagggtcctgtagtgactgagccaa

SEQ ID NO: 242922 - DNA, 852 bp, Homo Sapiens
aggtgaggcggaaccaaccctcctggccatgggaggggccgtggtggacgagggccccacaggcgtcaaggcccctgacggcggctggggctgggccgtgctcttcggctgtttcgtcatcactggcttctcctacgccttccccaaggccgtcagtgtcttcttcaaggagctcatacaggagtttgggatcggctacagcgacacagcctggatctcctccatcctgctggccatgctctacgggacaggtccgctctgcagtgtgtgcgtgaaccgctttggctgccggcccgtcatgcttgtggggggtctctttgcgtcgctgggcatggtggctgcgtccttttgccggagcatcatccaggtctacctcaccactggggtcatcacggggttgggtttggcactcaacttccagccctcgctcatcatgctgaaccgctacttcagcaagcggcgccccatggccaacgggctggcggcagcaggtagccctgtcttcctgtgtgccctgagcccgctggggcagctgctgcaggaccgctacggctggcggggcggcttcctcatcctgggcggcctgctgctcaactgctgcgtgtgtgccgcactcatgaggcccctggtggtcacggcccagccgggctcggggccgccgcgaccctcccggcgcctgctagacctgagcgtcttccgggaccgcggctttgtgctttacgccgtggccgcctcggtcatggtgctggggctcttcgtcccgcccgtgttcgtggtgagctacgccaaggacctgggcgtgcccgacaccaagccgccttcctgctcaccatcctgggcttcattgacatc

SEQ ID NO: 242923 - DNA, 1109 bp, Homo Sapiens
ttggcttcaggatggaggaccctgaccctaagcctccttcagatctctggcccaggctcaagccctagagatgggcagggcctaggggctgggagctgcctgctgccatagcagcacctttagctaggttggcccgagtgaggcctctgtgctgtcctgccctggtgcatggccttagctttctaggccactgggagttgtggctgggcttcccatcttccacagagacatctccctgtgggatgggcagatgggcctggccttgagaaaggcattggccattggttgccatggtgaccagggaccacgttgctgcctgtgaatgctgagtgagcgagtaagggaggaggggcgattgagggttcacctctgccttggggaggctgatttctcacacactggctggccctctcattctcactcctcctttggctgaggctgctggatccagtctgcctgcctccctgtgcagtccagccctgccttgctgcagccccagcccagatggcactcagcgctctcccctgagggagtccctgggcctagccatcccctcactattcccgacccaaagggtgacttttcatctgaacttaaggtgggagatatttttaacttttttccactttggaaaatgtcactgtgacaaaagccagcatactttccctgcacccatctgctcaccagatctcaggcaggaaagcccctctctgttgaagtcaggggctatcttttggtatacttgtgtgaaagtggctggttgggagcagagctaagtggcttcccattaacctgaggtctctttctttactctgggtcagacctgaggttggggaaggcgactgagccatgctcagaatgtctggtcctggcttgggcctgagtagggcagagagggcctttcatggctgatcagagcttaccagccccaccccaccatggtagccttagggtgctgagtgcctgatactgcctgacaagtgcctgacacgcagcctagttccttcctggcccctctctcactggctgggaaaccctagaccatgtcagataggacaacactgctgggttttacatccagatagtaataaacaccatttcatcatttt

SEQ ID NO: 242924 - DNA, 874 bp, Homo Sapiens
cacactgaaaaattgaatagtatatcctttgaataaagatttcaaggtaagtcatgaaggaaactttactgtttgttgatgaactgtatatgctatataaaaagtaatctatggtttatatctaggctgtagagtttttgttgaatgctaagatttaaaaatgttgaagattcactgagggaaaaaaatgggattcaacattgagagaatccatgcacctcatttcccagcactgctttcaaatactctattactggtataaatagtataccaaaagtaaggactctcaaccaaataaaacatcaatttggttcagagaatactttgatgttccaatttcttctgattcaatacttctaaaaaacaaaaatacataggtttattttcagttcatacctgcttgccaaatcattttaagtgaatttaatttagttgataggtctaaaaatattaatttatgaattcaactgttctatggacactaacaccatacagtgtgactctttactattgaagagtccactgaaaaggatgttttcctagaaaattctgagtataatagctttttgcaaatagaaacattttaaatactctagatgaaggcaaaatttcaagaatcctccaggcaaacacttccacatgaaaatcatagtcctgaaattaacccttttagtcaacagatgtttttctttactgtatttcccttacagtgagataacccaatactaaaaggtgataactatatgagtttcatagatataagatctttaaagcttgattaccaaaggaattacattatggaatgataatataatacacattccccaagtaaagctcaaatttacttcaaccacaccaaccaataccaccaaaa

SEQ ID NO: 242925 - DNA, 520 bp, Homo Sapiens
ctttgtacaaaaaagttgggtaactttctgtggttttcctgtgcgaaatttctattacataacacgtgtacccatagaaacagtaatagttttgtcagaataaaggcattatattgacactgtataatcagatggtagtatttcagggtttattttcattccttctttctttgaacaagtatttatcaagtgtctgccatattccaggtactattttaggtgctattagtttattttggctacagtaataagttactacaaacttggtggcttaaagcaacaaagtttttctctcacagctttggaggccagagatgtgttgaagtgttagcaggggccatactccctctgggggctctaggagataatctgttattttcctcttccagcttctggtggctactctgatatccctgggcttgtggccacatcattacaacctctgcctctgtcttcatatcatcttctctgtgggactgcattcagtctccttctgtgtccctcttataaggatacatgg

SEQ ID NO: 242926 - DNA, 983 bp, Homo Sapiens
aaatgatgcttttaaaaatagcactttggttttatacatataattttccaatatttctcgtgagatgcttaacatcctgacaagctttattaacaactgccaacactaccaaattatggcctcaagagcatgcaacatcttgttcagttttagtcttcattgtaaaacaactaccctttagttaaattctgatcagatcttaattcctaaaggcttgaagcagaaatattttgctatgcaaacattattacgtgaagcttaaaattttaggagacttattcctcaaatatgtattgacttttatgctcagtgaatctggttttgaaatcggtggatgaaattactttcctgattacaagcattatttcaagtcagttttcattgcggttcttataaatgtgctatttatccaaaattgtacctgtcctatatttagtctgaaaatttaatcaacaactactctttcttataatcacaaaagaaaatggcctgcctgggtgaaatgtaaatatatacttagtaaaataaaattgagcaggtattttatcctcagttttaacgacagatttttttgcaaaaatattgcaagttcagtttatttttgtaggtttgtgtacaatataccaaaacagatatggggttttatcactttaatcacgactggccatttcagtgagagaaaaccagccaaacccccttaaaagaagtctctagttatttgcctgcatttattttttcaactttatgtcagtgacatatagatgcagcttcagtgtaataaagcctatttacccttttagcctaataaaatgaaatcacagattttcaaaagcatgtgctaacttttctaaagtggaaataaattagctttggcctttggactagtaaacgtttccttaaacgatgttttacaggatgttttgttaatttccttgaatataacatataaggcagatatccccaagacccgtacatcttagtac

SEQ ID NO: 242927 - DNA, 882 bp, Homo Sapiens
ttggcagaaatatatacttctacataatgctattgttctcatacttggaaacatttttgtttttgaatagcacagttgataacatcctaactctttggtgcagcatacaagatcctcaacagttcttatccaaacttgccttcctagctatatttactactcgtttcttcctaaatttccccaatgctcaagcttccctgaatccatgatattttttgatacttttatacccttaacacttgctgtttcctttgcctgaaacaagtttcattataccttacttgtttccgagatccagcccccatttcccttctgttgtgaatcccattgctagtgtttttagacagtcagccccttgttccttagcacactcagttgtgcttttcttgcttgctagattcttcttctagatggagggttcttgaggccacggacctgtcttgtcttttattctctttttgtgctcaatacaaggcctaatgccctgcatcatcatttttgaaatgaaaacaactaaagtttttaaaagctcaagtgactaagtagatgctgatagtattaactgatacacagagggatagattggtttttgagcatgttgagtttgagatatttatgttgcatttagaaaatgttcaggacatagttgagaataggaggaggcaagaaaaacagttacaagcattactagtatgtaggtaatattccaaatcatggaagtttttgagactatgtgcagaatgagaagagaagatagagaagaagataagttgcactagtgactagtgggcaggaaacagaaaaaaatgaaatgggtagcagttaattttctccctcttttataggatataatggtctgaaaaaaatttagactagaggttg

SEQ ID NO: 242928 - DNA, 387 bp, Homo Sapiens
ccaaatgattgacaacgacgatacccaattacagtataatttttctttcttattaagtgtactaagatacaggcaccctctattctttaaaagtatgtaaaaatacctctagcacaaaatgtaaaactaaagaccatctcagacctttattcccaccccttccccttgtattggcttacttaaattatttcatggaaatggaatggttccagccttgtgatcccatgttctgctagtgagcctatcaaattcacctatgtcataaagaagcatggcatggctccctgacagcttgttgaagtaggattgcctgaggctacctgacacagtccacctatcaagtactcctattaatcagctgaatatataataattagaacagcccaa

SEQ ID NO: 242929 - DNA, 623 bp, Homo Sapiens
cagtcagcaaattctttttacatgaataaatatgaaaattaatttcctttaacaaaaattaattctagccatggtttaatttgtgtgcaccacaaaaactgcaaatagtgggtctttgatggctttagggagagtaaattaagacaacagatccaatgacagcccagtggctaagagggtattacaggctaacacctaagctcccttgtggaaatgcagagttcagggtaggcttaactgcactgcagaggcatttaagtataagaacatttcaggatggtaggaatccttctctttcttaaagaaacattaaaaatacagattgagagctagacattcctttatcagtattttagaagtgaagaggcacagtatactttcaattttcctaacctggagagtcctgccactgaactggcccaagtcctgtaatcctgctaggcctacctgtttctgtctttacctcagctcctcaaacatgattaccaggtgggtaggaacacaagacaacagaggacagcgaggaaaggacagcaatggcacaacacatttcctcccaacatctggctgggtatttcattaaagaatttactagattatatgagccaacttttttgtacaaa

SEQ ID NO: 242930 - DNA, 134 bp, Homo Sapiens
gaagagatgtctttctaattcactcacagatgctatataggctagctggggctctgcacatgacctccagaagtggacagtccggaagaggaaatgcacagggagcagggaaatgtgtaaatgtctaatataaa

SEQ ID NO: 242931 - DNA, 1567 bp, Homo Sapiens
ttggcacttgtgccaggcatacctgcgtgggtctcacctgtgtaggtctcacctgtgccaggtgtacctgtgtgggtcttacctgtgcaggtctcctgatgcaggtctcacctgtgccgagtgtacctacctgtgcgggtctcacctgtgtcaggcgtacgtgtaggggtctcacctgtgaacgtctcacctgtgccaggtgtatacctgtgtggctctcacttgtgtgggtctggtatgtgacaaaggcctgggaattggcagctgtcatctgccaggagcagaccctgagccaagttccctgtgccttaggctcatttcatgccctcagctctgggaggccaatccctttactgccacattttataaatggaagactgaggttaagcagtggtcccagggccatagaacagctgagctgtggagctggacatcgaccttgggcaggtgctgccaggggcctgagcccaggccctccactcccgcatcctctgatgacccatcctgggtgagtggaggcatctgcccgcgccagtcaggcccagtggtgatggcccccatgcccacaggacagaagctgctggactcactggcagagacctgggacttcttcttcagtgacgtgctgcccatgctgcaggccatcttctacccggtgcagggcaaggagccatcggtgcgccagctggccctgctgcacttccggaatgccatcaccctcagtgtgaagctagaggatgcgctggcccgggcccatgcccgtgtgccccctgccatcgtgcagatgctgctggtgctgcagggggtacatgagtccaggggcgtgactgaggactacctgcgcctggagacgctggtccagaaggtggtgtcgccatacctgggcacctacggcctccactccagcgaggggcccttcacccattcctgcatcctggaaaagcgcctcctccgccgctcccgctcgggggacgtgctggccaagaaccctgtggtgcgctccaagagctacaacacgcctctgctgaaccccgtgcaggagcacgaggcggagggcgcggcggccggcggtaccagcatccgcaggcactctgtgtcggagatgacgtcctgccccgagcctcagggcttctccgacccgcccggccagggccccaccgggaccttcaggtcctccccggcgccccactcagggccctgccccagcagactgtaccccacgacccagccccctgagcagggcttggatcccacccgcagctccctgccccgctccagcccggagaacctggtggaccagatcctggagtccgtggactcggattctgaagggattttcattgactttggccggggccggggctctggcatgtccgacttggagggctctgggggccggcagagtgtcgtgtgaggcctcacagctggccttgagtttttactgacacgtccctgtgtgcgggggtgtccatgtggcgtgtgtgtgagtgagacttttttactgcgtcccgtcccgccagccctatcggcctcgtcactgggcttggtcactttgtatttctgtctt

SEQ ID NO: 242932 - DNA, 213 bp, Homo Sapiens
cacctttatctaaatccagtgttctccgcagccttttgtctatttatatgtgtaccaagtgttaaacataattattattgggcatttgaactttgtttttctttaaagaaatgctgctattaaacatatttgtaaatggtttgtttttcttcttttgaattatttccttaggagagtaggtcaaagagtaggaagtatccaacttttttgtac

SEQ ID NO: 242933 - DNA, 864 bp, Homo Sapiens
tacctgtaaaatatataagccaataaaatctgccaaagtcctgtggtttacttctccatatttaaaaattgaaagccaccaatgggccaaggttatgttttcctattttaaagttgagttgcaatattctgaaaatgggtctgaaatagatgcagtgagagcattaaaccagatgtgttgctctgtggggaacatgggagcatgcaacgctgctagcacagaggtagctagagtaaactgaggcagagtcccccaaatgagcattctgaatagaacaaggcatgatgaatttcctcaagagccaaatagttaaaccgacagggatacttaagtgggagaaataaaacaagggacacaaagtacagaaggaaattatcaaaaaggaaaaataaacttattttctaaaacttgggtaactgattttaacacataccccaaacctacacgccttgcgattatcatccacatgctactcatggctgcccccttgcactgtggccctctctacctttctctgcgtctttacgtccaccattggtttcacaagctctgacatcaatgcacaggagttcgaatcgacagcctggttcccttattaaaataaaaattctcacaaaatcagtatcagtagaatttgttctaaaaaactgaacctaagaattaattcaataaaatactatcttatgtctataattccccaacaaagggcacagctttatttagacatgaaattcaaaataactcatggtaggtcagcagccattagctgtgtactagggccacagctgggctattcaataagagcagccattttcccccagctaactgatccttttcacactgtgatgtatttttattttccaa

SEQ ID NO: 242934 - DNA, 946 bp, Homo Sapiens
ttggaggcgatggacgagaggagatttcaagatgcggttcgactccgagggaggagctttgcgggcaacctgaacacctacaagcgacttgccatcaagctgccggatgatcagatcccaaagaccaattgcaacgtagctgtcatcaacgtgggggcacccgcggctgggatgaacgcggccgtacgctcagctgtgcgcgtgggcattgccgacggccacaggatgctcgccatctatgatggctttgacggcttcgccaagggccagatcaaagaaatcggctggacagatgtcgggggctggaccggccaaggaggctccattcttgggacaaaacgcgttctcccggggaagtacttggaagagatcgccacacagatgcgcacgcacagcatcaacgcgctgctgatcatcggtggattcgaggcctacctgggactcctggagctgtcagccgcccgggagaagcacgaggagttctgtgtccccatggtcatggttcccgctactgtgtccaacaatgtgccgggttccgatttcagcatcggggcagacaccgccctgaacactatcaccgacacctgcgaccgcatcaagcagtccgccagcggaaccaagcggcgcgtgttcatcatcgagaccatgggcggctactgtggctacctggccaacatgggggggctcgcggccggagctgatgccgcatacattttcgaagagcccttcgacatcagggatctgcagtccaacgtggagcacctgacggagaaaatgaagaccaccatccagagaggccttgtgctcagaaatgagagctgcagtgaaaactacaccaccgacttcatttaccagctgtattcagaagagggccaaaggcgtgttttgactgcggaagatgtgctgggtcacatgcagcaggttggggcaccctctccatttgata

SEQ ID NO: 242935 - DNA, 1362 bp, Homo Sapiens
ttggcgtcaacattaaatgcgagtgatgcttccccctctgtgaatgtggctttgggtatggctaatccacaccctgcactctggccttcagaagcccagggagagaagcctcccagaagcaaccttccagaaccttctccatcctcccaccgacctccccagcccctgtcctctctttgaatctcgttgtcaagttcttcccgcagacacctggctccttgaggggaggtgcagctttcatctgaccatgcaggcgtgctttgcagtgggtagagcagtgctttcctcctcccagctgcacactggaatcacctggagagtccagaaacttcccgcctcagtgaaagaacatcagtgtatcagcacagcaaatattccaaatgccaggctggattccctccaattaccaggacctccaggcttctcctcctttcaagaactttctgaccctggatccagtctaaatgttggttataaactcacctgacatccacagggcccttccaaaatactgtcaaggctgactgctggtgcctggaacctgcacaccctcctgggactctgcatctctgctggggctggtttctcctctgagccaccttaaggaatcccaccctgacccggtcagagctcaccatgcctccctctcctacttgctcagcattttgtgtctatctagactgaagcctttgctttctctctgtgattgtggtgaaagttcagtttgctttcctatctctagaatgtcagcacgaaggcagaggcatggtctcctgagttccataaccccaaagcctaactccctgcctgccacactgaggggcttagtagacattgacttactaaattgaatagttgagtaataatgctctttgaaataatttggagttagatcttgagccttgtgtggccagaggatgggtgaggacacatcataaaaactaaaggtaactgagcatgccagtggttggggtgagaaatttgcatggagcactccagacacagaggcagcaaaacccaagtgctgggaagtcagagtgagagagtgaaggggcagtgagtgcttctttaggagctggatcaaaacctaagatgatctggccacatggtgcagactgagcacacacttgggagagaaatgggccaggaggagaggagagaggttcaccacacgacagtggatgactgggaatagaagctctccccatggtggaccaagaagtctgtgaagctgagagaaagacaaaagaaatcacgacttctgtagtagctgggatggaaacctcacgggtgacagggtctttaaaaggaaatctcaagaagcatcatgttctgggtgtgctccacgatgctgagtagaaa

SEQ ID NO: 242936 - DNA, 1687 bp, Homo Sapiens
ttagcctttaaaactgtgaattgatttcaatgcatattttagaatatacatatctatgtcattgcaatttaaactgtttagaagaagttcttattgtttgccatctttttttaagagagcaaaatgataaatcagtaaaagaaatatttcctagagaggaaagggaacttgctgttgtatagagctgaagttatttcacatagcattgattaaggttggactctggaaacaccagtttcctttgcatcttagcgtagcaattcaataaacaaacagcattattttattttaaatagaccagatagcatccattcctattatagattcttaaaaaatgctgggaaactggagaagggaaggaaaggattccttggtggttatttatgtagggaatatttaagcttgtacatgtacagatgttgctggggaaggagagagaattcccgagagcactgcacacagagcagtttgctgagggctcatcgtcagtcttcaaacgagttctgttgtaagctgaggcactaattttggtttacacaacgcacacacacaagtctgtctattcactcattcgctgttaatcacctactatgccaggccttggggagatataaagaaatatgatgtccagcccggcctttccagaaacctgcttctatcttggaaacagttttgtagtgtagctgatcagtgtggcagatcgcagcctgcgggaggctttctagagtgggtgaggcctaaactaactctttgaggagccagtgttagacaaaggtgtgggagtgggatgtaggggttggaattccaggggacagtgaagctggagaaaaggtgtctggggaggtgggtgcaagggcatggaaagcctcacttttttgagatgacttggaacttgatcccaaagtctggaagagtaacattaaacatatccacaatacacagggcgttgtgaacagtaggataaggcataaacagggtttaggacagtgcctgggtcagcataaaattcaatgtctgtttactatttttattattactaaaatctataggcatgagaaagcagaagaactgggctaaacacaagagactgacccaagttcaaggataggggatgttatataacatggtctcccatcagggttactcctgaaacacccaatgagtagtggaaggatataaatgagacatgcctgacagtggctggacaaggctcccatgacctcttatctcaaagattcctgaagttcagcatccttagtacctgccaatgtgggaggaacacagggctgtggcttgctgcctctcacactcccagccacatgggcacccgcaaacaactaacactcagaaggcgacacttcagcttgccagtgggttctaagccttgaatgggtcgctgcaccccgcacctgctatgtgcaccgcagcacctgggagtctgactgtcctgttgagtaggggcttcctgggtacagcctcctgcagaggagtcagtgacaccctcaggtttctagctgtgaggtgggcaggggtgggtgcggaggccattcatgagatgaggaagaagctgagttgggagggttcattctctggcacatggggaaatttgagatgtctcggaaaatgctgagggttatagaagtaggatcagcagaggtagtggtgaaagccatagaatttgatccaa

SEQ ID NO: 242937 - DNA, 807 bp, Homo Sapiens
gattctaggcaaacaaatcttttttctagccagcttatgcaaaccacagaggtaaatggtgttttataaaaggcacacaaaaagtaccggcagaattttattattactttattcaaatgaccaaaaaattagtcaaattgctatattttctaaatgcttactctcagttactatagttatctagttgaggaccagaaacaaatgcacttaaccagacacagctggccctctcacctctaacttgtgttttcttgtttctattaatttgctcattataatactattaacacaaagtacagccttgacctaagccttaacctaaactctattttgtcagaaaattactatgtgattggctcacttttatagtcagtcaacagagcccaaactaagccacagtcctattttttctctttcctttatattcctctctccataaggactagctgatctatagtttctctttaatcctttcatctctaatagataacccagaagcctttctctgttgttaaataatcagaatccccttctctaacaattctgcctccttaacacacagaaaagcaataaagttccacaatttaagataatttcagaatgcctttacaatgaacaaagttccatatagaaacacttcttgattgctctaatccagaacagggaataaagttcaattagaatataatctcaatgcagcatatacttgctatggaataagccttcagatacggagatgatactaagtaacattaaagtcacagatttacagacaaacccaagattcatctggtaaagcaaagccaa

SEQ ID NO: 242938 - DNA, 170 bp, Homo Sapiens
gtagaaaaattttaaaaggcccttctttaatacaattctatttttccccaaaaatatgtttaaaaagtctttaaaatttacttaaattaaaatatttgcttttgcctatttcttatttttaattcattctaagttttcccttcaactttttcttttgaaaatttccccaa

SEQ ID NO: 242939 - DNA, 848 bp, Homo Sapiens
  misc_feature (708)..(718): n is a, c, g, or t
atgagctaccgcgcccagcctgtttgttagttattattcgtttggtacggcatctgtcttttctcccctatcttactgatatgtgtaccctttaatagctttctaagaggaattcaaattactgatttttaaacgtgttacaagtatttctcccagtttgttgtctcttttgccttctttatggtattgtttgcctttgtggtaggatgttttgttttgttttaatactgtgattctttaagctgcttgcttacctccccagaggtggagaaatttgttataactctgcaatagcctccctgtagcagtctactgacccagtccctttatctcattttaaagtctttgccccttctacccttgaaatccttttgattgtaactagctaaccctaggatgctgagtcactaagacttttgaagagaagatatggttaggtatttcggtcaatgttgtctgtgtttacagaatacaagttgctctagcttttatgtgaaagtttccctctaaagagaaaggattgttcgatcttttatattagaaagagaaggaactgacagttacctatggaccttattaaagtttctattttatttattgtttgcaaacatcatcttcatatgttcaaggaaaaaaataggagtgtgacacagttgaaatgcagaggaaataacacattaatcactgtatagtagacacatgccattnnnnnnnnnnnctaactcttggctttactgccaaaatcctcctagcccagagtctcacaaatcgttatttatgtataatatataaaaagtgtcatttaaatttcacaacctaaatagttcctttattccaacatttattta

SEQ ID NO: 242940 - DNA, 899 bp, Homo Sapiens
tacaaaaaagttggcaatctttcctgtctgaacacagactgttgatgataaaatagcatctcaaattatgagggagaaagagctgcttcggcgttcctccccggttctctgcctggattgggctcccgtgggttgctgaggccctcgcggaggcctaggaagcccggcagcgcgggcggcagcagcgggttggggagcaaggccggcttggaacgcgggctcctgcccactgccacccgcaggctgccccgggctcccgggcgggcgctcggccaggggctctgctcgctccatggacagctgggtggaaaggacgccccgtgaaggacacccggccgtcggaccgcgcccacccctgggcctcccaggggctccctccgcagactcccagggacttcctgggagccaccgcggagggcgctgcgcgcgtccggagccgacgccgggcttcaaacagaaaccaaagcccgctccaacgccgcgaaggaggggggctccaagcatcctagaaaagaaagctggagggagcgcatcagagacacaagtgcggataagacttaacacatttcctgaagaggattccttgtcgcgagttgtcttggttatgacagaggaagaagacttcaaagtgaataagcaagggggtgcccttaatcagggcagaaatgtggtggctttgggatttacctatttcgtacaagttgcgttcttttcagtggcgtatttcccaggtcccttgcaagagctgttggacccactcccctcttgcccacaagttggaatattatttcattaatcacaacaggaggcagatgttacttaagatttagaaagagaaataaaggcatagatgaagggggcttgcatcaagttcaaaaaagagtattatgtttatagct

SEQ ID NO: 242941 - DNA, 538 bp, Homo Sapiens
ttgtccccgacaaaaagcagtggcgactcaaccagctcaacaacgcacccaccatcttggtcttcttcactgtggtcatgaatgttttcattacagccttcggggcacataaaacagggttcctggctgcccgggcctcaaggaatcctctctgaatgcagcctgggacccaggttctgggcctggaacttctgcctccttcctccttgatctgccaggctcgtgggcactttccacagcccaagatagcttctgaaaggaaaatatagctgcccttgctccctacccacaccacctgaattaaaaagtgatttttatgttattggtctaagggacttccatcttggtctgaactcctgaactcagacgcacggactgccatccctaccttcctggtaccatcggctggacctaaggaaggcatgtctgtctaaggcccagtctgcccggcttaaggaggctggttctgactctccccgactgcttccttctgctcccggactcaattttcccttcatgtagaatggaatctatatct

SEQ ID NO: 242942 - DNA, 863 bp, Homo Sapiens
  misc_feature (56)..(84): n is a, c, g, or t
actttgtacaaaaaagttggcttgtttaatcgcaaaattatgagtaagataagtcnnnnnnnnnnnnnnnnnnnnnnnnnnnnnggaagtttattaaagcccttcatatacacatactttttaaaaaaagattcttaataaagaaattattggtttgtctggttaaagtccatatagaatgctgagaaataatttataaaataagaactatagaaatttgttctcagctgaaaagttggcagctgctctgtttctttaaaaaagtacaacatgaaaatttaattacattagccttaatattacttgactgaatttctactatttattcacttgtgtttgagattcacccagctattctaatgatagaaataaaaagtggagaaatgactaaagttgacttaagttaagaattggagtgggaattttgaaatgccatgtcctatatattctggcatatttgttggcacatttgcaagtatgttgatcccagcattgtttatatctgttggaataataactaaggaaaaattgaaaatgtataatagatgtataaagatttatatttagttagtatataatagataatacttgcaggttttttatgtgttttgggtttctgtgtattattttaggtaatctttataagggcatcttggaagttataaatatgtgccatttactgaaaagtgggaagcatttttatatgagtaaagctaatgaaataaaactagttttattgccaaaattcaaaaagtggggttcatgctatgtcgaatttaagcaaatgatctgtctgaggattttgtttgccattgaattccatttctgtccactttaaatttactaaaagctatttaacctga

SEQ ID NO: 242943 - DNA, 899 bp, Homo Sapiens
aaagtgcagtcaagtttctctctttttttcttctaggaatgataccatgccagtaaatccctacagaacatttccagtttggcaacaagcagtcagtcgatcattcacatttgtactcaagacagcaggcctgggcaaaactcgcctgaatttcaccctgaaaagtgctccccatcatctgaagaagcagcacctggtaacaggcatggccattcagagggtacttagcattttcatttcacctggggtcttgaagcacttcctgaaaactgattgtgccttgacatttacctgtaaaaagaagtgtaattctacccctttggcagatgtgtaaactaagacggtgcaaggcccacagaagtaaggagaggaccaggaaagctgacagtgaatctcctgctttgtccatcaggtcctaaaagtgtctctcacttgtaattccacagaagtgaataaagcataacttctttgactgggattggctggtagggatgacaggacttaatgatgaagcagggagctgctttaatggcttttccctctattgcaagtttttccttgaaaggacagtcaacaccacacctagaatcagaggatgttggcagagtgtcagagctaagcggggcttcaggtaccagctaattcatccctccagccctcactggaaggaaaacttaacccctgcaaacaatgcagatgcctaaggccacctatgacttaactcagtctctgcctctgagtggaggactttctctgccacagtccactggctgagtttcctgacaaaagagaacacgtgtttggggggaggaagaagggagtagactgactttcctcaatagtgtcatttttacttaaagactagaatgatggaaactactaaacagactcaatcccaa

SEQ ID NO: 242944 - DNA, 1692 bp, Homo Sapiens
aaagagagttttcaccttttaaaatttattacataagctatacacacaaaatgaaatcctagttataaaagatgcatctagaagaataatttataataaaccaacaaaaatgagaatgtgtatctccaggaatataaatatatttaaatgttctcagtgactggcattgctttatgcattacataagatagtatgtactaattaaggtattgaattcactgggttttagaaggctttaaaaaaaatccagataaatcaacaacaaaaatacagctcaactttgaactgcattaaaatccagaatctctcattttagatgaccattccttattcccctcaaaaggtttccaacagaagctatttcacaaactgattattagaatgtcttctccccactctccccaaaagcaagtatgcatggaagtgcatgcttttaaccttaagaaatgtatttttggtaccattaatataaaattataatatttatatttataaaattgtatataaaaagtatcaatagactataacctaaacagttttagaaagatatcaacagcttgcaaatataaaaaccttgtgctattaaaaggtgtttaacaaggtagttattaatacatttgttgtgtatataattacaaaagtaaaccaagaaatatttaaaatctttattaacccaaattagaattataaaaatgtttgtctcaaaaacaatgactgtgatactcaagtacagaattgtggtgcagccagaagtggttcaagagccctcccgcaaatcatgacttgcactctggcttttaagtgaagacgagggaatctcaaggcagatgggaggagggcatttgaagaaaacaaagatgacaaaaaagatgggaaggacacaatggttaagtaagtttcttgtcagatacaataaactatttttaggaaggataaaattaaaagtgcttaatacaaacaaaatttaacgctgctaattattcttaagtgccataaaacattagttccaaaataactttattaagagttggccaaacttcaactattattactattactacagggtcttgttctagcaaagttccaatatttatcagttatcttacacatgacatttatcttaatatgtacataaatatcaggaaagtttaaatacttttattttactattttaatcttttccttaaagatgcagggtttcatactacatcaattaggcggacatgacaaaaatgacttaaataggaactgaatataaagaatactcgataccatgacatcatcatctggaacaactgaagttttctacctcttgctccattttctagataaaggggaggaagagcaaatagtaagtttcaatatggaataagctaaagaaacatttcattactttttcagtaaacaaccttaagaatattaatattcaggtatatatttgatagtgaaaataaacattcagttcagtatttaagactgccacatagattttacctgtaggacttcattatttaaataactttgaaatgagtctggggtgcattcatcttatgttaaattcaaatagtattaatcaaggtactgatgtagttagagtttagtattttacactttgtaggtatcaatattatatatatactacatagtacactttagtaggtatacgtaaatactatatccaacttttttgta

SEQ ID NO: 242945 - DNA, 1016 bp, Homo Sapiens
ttggcgggggccccttgcctggactcagcgacctgtcttccagcctggaaggggtttggagtcccagctctggctttagatttcttcatcataaggagtttttctagttaacatttttgttttgttacgagcaatgctggaaaaggtcgctcctgttctgttagtaccaaagttacattgtttcaataagcatagaaatctaaacaacatctgtacattagcatggtgagagcaaggaataaagcaggaaataggagaaaagtaaacaactttagggagcccaggcagtgtcatttaaactcactgagtactaagacataattctcctaggccagagttaaagaaagtgccttaactcttcttgtgagggcagccactgccctccgtggccaaggcaggacctccaagactcagtggttgagttgtctcctaccaccatgcccgccctccccaggtactgggtccatgccccctgtgcccaccctccccaggtgctgggtccatgctgtttgaaccaaagccttatttaaaggtggtcactggagatgctctcaggccagaactcaacagctatttttgggaatagggatctcccgtgtgcctaacgcagtagctattggtttgaacaatgtccagacaagacctgtacctttgagaatataactgtgtttggcacctgcatagcaccatgaggaagaccagccaccagtggaagcggggtcactgccccacagactggatgcaatgaggggctcacaggaggcccagccagcccgattgtgggctgaggggtctgcattcaagcacgatgttctagaataggagtttaacgtgtctacgtaacctagaatgtggttattaggaaaggggctgtgcatgtgggtgcagctggcggcacacctggtcaccagatggccagaagctgcccatcagctctgcccagatgtcagcctgagagctcaactgctgccgctggctggatgccctttggtgaaatgcctgttttcagctaagaa

SEQ ID NO: 242946 - DNA, 1163 bp, Homo Sapiens
tcaaaaagtgtcccaaaagtgggagtaagagttatatagtcactgtgactcagccagtgcaagagctggagctccttgaagcccacagattttcagtctcaggcatccttgtgtggttgccatggccaccaggtgtccaataataggcttgttctcccagctccggcccacggagtgtccataccttcccccaccaccctgcccgctgctgactgcagccagtgggggccctggggcctgtcccaggcatgagcaaggtccttgggcgctgtcccaggcatgaacaggggctttgaggccgtcgccagcgtggtgggcagcgccctctgcctgtgtcttagacgcatggccagagcagtgcctggtagcgccagctccacacttgcagggagggatccatttggaagttcgcatctggtgtcagtttccctgtgagacacggtggtcgggctttcactccagtttggcgccaggtctgggggaaggaccgtctgcttgggtggggcgcagtcgggccagcctttgtcccagcgccactcgcctgccctggaggtggctgtcaggagcaccccatggaggagaggggctttgaggtcgcaggtgagtgggcagtggagccgtcaccctgacgcctcagccctccccgggggcaccctcagctgggtggcctcttagaaaatttaggttgttttgctgccctagaagactggatgctctagaatcatctctccttttgctgtgggcccaccttcatagggtcctgttgtcccgtgacggcctcgcctccttccaactcctctgccttcatcccagggtggacggtgtcctggagggactcatcggatccgccaggagctcagcgtcctgggtagaggtttctggcctctcagcttctctgttttgtctcacaactttctcttgctaatcactttcatgcatcagtttgcgaatggattctccagctcttcactcataaataactccttccagaaatctagtgaggagggaaagtgaaggattaaaacaaaatcctcacttctggatttctgctttaatgttagagttggcagccctccgtcacataggcctgaagcaccaaggatgtctcagaagcactcagcctccctccttgcatatcagccccttcagtttctctctccttt

SEQ ID NO: 242947 - DNA, 348 bp, Homo Sapiens
gtacaaaaaaagttggctggacatggagagtgacgatgcccgggctgccagggtcaaggagctgctggttgactgttacaaacccacagaggccttcatttctggcctgctggacaacatccggggcatgcagaatctgagcacaccccaaaagaactgagggtccccgacccaggagaacggtggctcccacaggacaatcgctgccccccaacctcgtagcaacatcaataccgggggaccctgcggccaggcctggtgccatgagcaaggctcctcgtgcccctggcccaggggtctcttcccctgccccctcagttttccacttttggggttttttattgttat

SEQ ID NO: 242948 - DNA, 939 bp, Homo Sapiens
  misc_feature (478)..(701): n is a, c, g, or t
  misc_feature (733)..(758): n is a, c, g, or t
gaaacttacatatcatctagttctgaaaacttcccaaggaaattaggaaatagggtttctgctctgaatccatagtcaacgaactatgaaaagactaaacaccacacatacagggaaaagcagcagaaatgttaaatcccaagagcttttgcaaaattgaggtgttttctcacaacaggaagggaaagtgagtttgaactgggctttgactagctggattaaactacacgttcaagagataagtgaacaatggcaattctctatattagcaagaaataatcaggaattgacattaaagatgttcattctctccaaatgcatccacagatccaaggcaatctcaataaaaatttcaggacagcttttgttgaaatttgccagatttcactctaaaatttttatggaacagcaaaaaaccaacaatagccaaaccttttagaaacaaagttggggagctgggtgcggtagctcacacatnnnnnnnnnnnnnnnnnnnnnnnnnnnnnnnnnnnnnnnnnnnnnnnnnnnnnnnnnnnnnnnnnnnnnnnnnnnnnnnnnnnnnnnnnnnnnnnnnnnnnnnnnnnnnnnnnnnnnnnnnnnnnnnnnnnnnnnnnnnnnnnnnnnnnnnnnnnnnnnnnnnnnnnnnnnnnnnnnnnnnnnnnnnnnnnnnnnnnnnnnnnnnnnnnnnnnnnnnnnnnnnnagcagcctgggcgacaatgtgagactatctcnnnnnnnnnnnnnnnnnnnnnnnnnntcgatcttttgaaagatggtcaataaaatagtgatctgctctctttacttacacaagggtatacaggatattgttactactgttctctcaatgaaatattaataagaacaatgccacatggaagacaaacagctaacaataattctaaagcaggagttaagccaacttttttgtacaaagt

SEQ ID NO: 242949 - DNA, 760 bp, Homo Sapiens
gctgacatccttcagttcctttttgtgtccttgtcctttacaggaagatgaagatccctttcctcctactgttctttctgtgggaagccgagagccacgcagcatcaaggccgaacatcatcctggtgatggctgacgacctcggcattggagatcctgggtgctatgggaacaaaactatcaggactcccaatatcgaccggttggccagtgggggagtgaaactcactcagcacctggcagcatcaccgctgtgcacaccaagcagggcagccttcatgactggccggtaccctgtccgatcaggaatggcatcttggtcccgcactggagttttcctcttcacagcctcttcgggaggacttcccaccgatgagattacctttgctaagcttctgaaggatcaaggttattcaacagcactgatagggaaatggcaccttgggatgagctgtcacagcaagactgacttctgtcaccaccctttacatcacggcttcaattatttctatgggatctctttgaccaatctgagagactgcaagcccggagagggcagtgtcttcaccacgggcttcaagaggctggtcttcctccccctgcagatcgtcggggtcaccctccttacccttgctgcactcaattgtctggggctactccacgtgcctctaggcgtttttttcagccttctcttcctagcagccctaatcctgacccttttcttgggcttccttcattacttccggcccctgaactgctt

SEQ ID NO: 242950 - DNA, 442 bp, Homo Sapiens
caacattaatcaagaaattcctccatctgcaaaaggaacagataaatatataagtaaaacagaatagagagtccaggtatagacccacagagtcaattgatcttagacaaaggagcagaaacaattcagtagaaaaagaatagtgtttttcatcattatttgttgttttaacacaacacaaccaattgttatgtaaaaaagaaaggcctgacactacacgcaggccttattagttttcacaataattaactcaaattgtattatagacctaaatgcaaaatgcaaaatcagaaacctactagaagaaaacataggaggaatctgtctgaacttgtagcccacgatgggttgtcaggtatagcactaaaatcactagtgcaacatgaccttacataccaggatgagtttgtagagacagcactaaaattccaacttttttgta

SEQ ID NO: 242951 - DNA, 654 bp, Homo Sapiens
ctttgtacaaaaaagttggcttaagatttaaatacaaactgttgttactccttaagcttcaggctttctgcgaaagctctaagaatatcttcattactatgcttggtcaactggaagatggtattaataaggtcagaattaagaattggattgctctgtgggtcctccggtattgtgcagaggaaagaaaaatgtctttcacaccacaaactgtgtgtctgaaccccagccaaacaaatgtgttccattggtccaatatataagcattaacaacaacaacaaaaaatttaaaacaagtaaattaatgcattcacatgatcacttcttgaaaatggttcaaagcatgttttcctgatggtgggattgtttaaatgacatgttttaaagtttttaatactttattagttatgaagtgcttcttttatatgttaagtttaggttgccagtactcataatttttatttctgcaattatgttataatgagttgtttgcatgcctacttaacccaagtaaaacgatgctgtttgctctggaatgttcatcttttagacaggttttggctcatttccaatcatggtgcaatatagtgtaacattcatttgttttcattcaacagttttatttttgtcataataaataattacttttccaat

SEQ ID NO: 242952 - DNA, 906 bp, Homo Sapiens
ttggtgctattagtggcatttagtacacagagccagttctgtgtgcagtgcaggttgcaacaacttttgtttggtgaaggccacagtggggttctcattagatcatttctatggtgtgattttgagcatagtttttggtgcaaagccctgtccctaattgtctaggattcctaatgattctatgaactacccccaaatccttgtaataatgtcctattctgcttcatcagttgaacttggttattttttgtttctagctaaaaatcctgactcttataaattggtatcaggaatgggctggaggtgttgtttctaaagatgctgaacagctaaataaaaaaggaatgacattctcaaaattctaatttagggcatagattgaaaaccagctaaaagaatatctcctttcttgcagccacagggttgagatagtcaaagatcaaattcaaagtttaattatataggtttccaaattccaaactcagctgaattcacagtcttgtgtagtatgtgaaagtaagagtttgataatgaaagagtagtgtccccccaaactaaaatgggatacatgaaaggatttaatttgattgactcagaaaatactgattcctcttcatagagactcccttgcctccaggagcgcttaccttcatttgactcatgagattgttcttaccttgctttacaaccctgtcacaactttacgtaaggaagtcatattgcagaggaagccagtcctcttcttgctctactcttaacacttattatgtctagaccaataatgaaaaccagatcctcagcttgaacttgtattaggggagtgatattatagcataacccccaggatgataaagcttgtactttaaatagtttaagaaaaatattattttagttcagtgatgaaaa

SEQ ID NO: 242953 - DNA, 903 bp, Homo Sapiens
tcacttgtgtgcatcacattccagtcacacagtgggtctgcaacaaaggttgctttacagggcactgagatggccctagggtaggttaggcaaatgggacatgggggtaatggctggagtggggtagggtaaatcttgagatttatggtaagtagatactggaaaatatctgtccatcgtgaagcatacacttttcacatgctgggcaagagccagctctattattttaaggtgtaatactgctcaaatttggggtaaattggatagaaataaaatagccttacttgctattatcagactcacacttggttatttttctgatgtcacgaccaaaaaaaagttcaacagcaatggagcagaagctgaaagagaaggataatctgctcttagggagtttgaacaagaggcaattaataaaggattaagctaagtaaaaccacagcagaacacgtaactgcagcatgttgaacactgaaaaccagaggggcaattaggtaggaaaaacccacagtgggtaaaacactcactgggtcaatgaacaacagtaggaacttcgcgaggctaatcccttgtggacagacctctttctagaagagaagcaaggaaagcagactccagcccttagacagagcatgcagggacgtctggtaattcgactgaccgcacagtcctaagaatcacccagcgaattccattttactaatgtgtaaaggtgggatgaggtgacctgcagacaactcacctccaaatactgacagctcagaagaaaccacagcctccacactgaccaaaatcacgatcaggaggtccttcaggacacccccaggaagactgcctggagactccctcacacagaccctcctaagtctccggggtctgcttttttctcccatttcttcccaa

SEQ ID NO: 242954 - DNA, 877 bp, Homo Sapiens
tacgtaaatttgatatcagatggtgttctgctgatcaaatcaatgggctaaactgcaccctacaaggatgctttgtggcattctgtctctggacagtagcatgaagttctatgattataatctactttttcaaaagatgacgtcttttcaaaattctctctttctcttgtcatttcctatgcccagggtatgcatgagaaaaccatgaatctcttaatatcatctccaaatataggcggtcaagtacctgtatatgtggtatcatataccatataggtatacaaatacttgtatacttggtatcatgtaaagagggtatatgaaggcgatacatagcagtatacatttcgtgaactcttttgttcccaaagctgttgactatgccctctacacctggatctccagcatgagctaaaaggaaatctttaatatttgcaccaaaaaataagatatgcatgaagtcttttaaaatcagtaacaagtataaattttgacatggtaagtcaaacttactgtttagctacttacgcgttttttaaatagtatgaaattaaacagtataacacaaaacaagttagtttctggaggacagaaaagcagtcccatcagaatttaatcttacagtataatccaaaagaagtaacaaagcttgtttaccttcacaaattgtgacaccatttcctgaaaatcccatgttgcaatagcaggcttcaattccattgcgtatttcacattttgcatttgggagacaaggtgtcttggtgcaattttgagtataggaacaattcaacaaagtggaaaaaaccactaggagcgggaggcgtttcattggcggtggccgcagtggtggcggtggcggagagcgcggcggagccaa

SEQ ID NO: 242955 - DNA, 904 bp, Homo Sapiens
ttggcaacccaccacactggggggctgagcgccccttctacaaccacctgggtggcaaccaggtgtccaaggagatgaagcggatgggctttgaagaccccaaggacaagaacgcccaggagagtgcgaaccctgaggatgaagtggatgagtttctgggccgtgccattgacgccaggagcattgataggcttcggtctgagcacgtccgcaagttcctcctgaccttcagggagcctgacttagagaagaagtactccaagcaggtagacgaccgatttggtgcctatgtggcgtgtgcctcgctcgtcttcctcttcatctgctttgtccagatcaccatcgtgccccactccatattcatgctcagcttctacctgacctgttccctgctgctgaccttggtggtgtttgtgtctgtgatctactcctgcgtaaagctcttcccctccccactgcagaccctctccaggaagatcgtgcggtccaagatgaacagcaccctggttggggtgttcaccatcaccctggtgttcctggcggcttttgtcaacatgttcacgtgcaactccagggacctgctgggctgcttggcacaggagcacaacatcagcgcgagccaggtcaacgcgtgtcacgtggcggagtcggccgtcaactacagcctgggcgatgagcagggcttctgtggcagcccctggcccaactgcaacttccccgagtacttcacctacagcgtgctgctcagcctgctggcctgctccgtgttcctgcagatcagctgcatcgggaagctggtgctcatgctggccatcgagctcatctacgtgctcatcgtggagtgccaggtgtcacgctcttcgacaacgccgacctgctggtcaccgccaacgccatagacttc

SEQ ID NO: 242956 - DNA, 1414 bp, Homo Sapiens
  misc_feature (874)..(910): n is a, c, g, or t
  misc_feature (1045)..(1145): n is a, c, g, or t
taaaaagtaaaagaatatataaaattttaccccatggaaggcaagaattctaaatgctaaataccttaaaataaaattttcacaaccaggtagtttgttttttaatttgtttatagaaataaaacagtactttcagcataaatgagtaaaagaccattcagaaatatcaagtttatatagaaaatcctaatggatagattgtatgtttttacatttgatttaggaaaatctcagaattttaatttctttcaatgtagcttttacaaaatatatatattcaaaatgtgacaaattttttacaatctaaaaattaaaattgtataactgcataagctgagctttatgtcattataaatatataggtaaaggaaaactagtatagaaattcatattaatccctccctgtctagtccacatttatatataatctgtttatatataaaacaatttctaaactattataaaactgactttataaccaaatatatacctgcatgaacacaaaaaacatgttgatacacagtactttctcaacatacaatgtatacttgtttatttgcaatggtccacatacagattcagggtcaatttaaaaaggtaaataatcatatgagaactcattattcttctctataaccgtattttatcttcagtggttccttttacttacaaaaaatgagcaccttattagttttatccctggtatgacaattagttacatgacctcccactgagtactaaaaactaaatataaaacactgactatagttattaatacatatgagaagaaaaagagtaaaagacaagtttaagaaagacagattcaaagctaaaaggagaaaaagaggttaaaatgccagtttagtaactaggnnnnnnnnnnnnnnnnnnnnnnnnnnnnnnnnnnnnntgctctgtacagaaatgaaaccctggttcttggcaatttattgcaagaagaatcatatccaaaagagccacctaaagactttagaatgcaaaaggacaaaacatccatccatgaacaacatcagatcttttaagnnnnnnnnnnnnnnnnnnnnnnnnnnnnnnnnnnnnnnnnnnnnnnnnnnnnnnnnnnnnnnnnnnnnnnnnnnnnnnnnnnnnnnnnnnnnnnnnnnnnncccttgatcataatgcaaataaaaacagctttgcatcttaaaatttacagctgaactggaaaataaagtcaactaaaacacgtagcatacctgagctactaagacagcaatcaataaacagcagctggtacagaatatacacttagtgccaacaatcatcacaaggagtgtattcatgaataagcagacacttggctttttaccaaggatcgatggccaagggtggaaggtggaaaggtctgctcagttccaccttcgcagtctcccaa

SEQ ID NO: 242957 - DNA, 960 bp, Homo Sapiens
ttgggaagaagctgcacagggtaaaccaggtgaaatgtcaactacctgaaagtattttccaagtagacgaactcttgcaccgtctcaatttttttgtagaagtatgcagaaggtacttgtggaaaatgactgtggacgcttcagaaaatgtacaatgctgcgtcatattcagtcactttccatttatctttaataatctgtcgaaaattaaactactacatacagacacacttttaaaaatagagagtaaaaaacataaagcttatcttaggtcggcagcaattgaggaagaaagagagtctgaattcgctttgaggcccacgtttgatctaacagtcagaaggaatcacttgattgaggatgttttgaatcagctaagtcaatttgagaatgaagacctgaggaaagagttatgggtttcatttagtggagaaattgggtatgacctcggaggagtcaagaaagagttcttctactgtctgtttgcagagatgatccagccggaatatgggatgttcatgtatcctgaaggggcttcctgcatgtggtttcctgtcaagcctaaatttgagaagaaaagatacttcttttttggggttctatgtggactttccctgttcaattgcaatgttgccaacctccctttcccactggcactgtttaagaaacttttggaccaaatgccatcattggaagacttgaaagaactcagtcctgatttgggaaagaatttgcaaacacttctggatgatgaaggtgataactttgaggaagtattttacatccattttaatgtgcactgggacagaaacgacacaaacttaattcctaatggaagtagcataactgtcaaccagactaacaagagagactatgtttctaagtatatcaattacattttcaacgactctgtaaaggcggttatgaagaatttcggagaggattttataaaatgtgcga

SEQ ID NO: 242958 - DNA, 676 bp, Homo Sapiens
  misc_feature (452)..(530): n is a, c, g, or t
  misc_feature (537)..(591): n is a, c, g, or t
tttgataaaatgcaggctaccaaaagacttgcatggattaattattaattaattttgtttcacatcaattgtaatgaattcgtatggactatttcacctatacacatttttattgaactaaatcaaactaatgaggtttccgaccaaagtaaagaggcctctcctcagctctaaagaaagaaacatggaagtaggatgtactgcattcttagggttagactcagattttctactggcattttgtaatgtagtatttcaaacatatataaaaatgaatctaccgtctacttctgtcacttgatgccaatcttctatatcacccttgtgtccacgtcacacacacttctcaccccattcctgctttaccttgaagccaatttcagttcttagataattttatttgtaagacattcagcatgtatctccagaagataagggtcgttcttccgtgnnnnnnnnnnnnnnnnnnnnnnnnnnnnnnnnnnnnnnnnnnnnnnnnnnnnnnnnnnnnnnnnnnnnnnnnnnnnnnntgtctcnnnnnnnnnnnnnnnnnnnnnnnnnnnnnnnnnnnnnnnnnnnnnnnnnnnnnnnttgtgctattttgtagcccaaaatacatgctgaatattttaaaactaaaatgtgactttaacccttcccctgctgctgtccaact

SEQ ID NO: 242959 - DNA, 872 bp, Homo Sapiens
tacaaaaaagttggatttatttcactcggattccgacttgggtggtctggggagcaagggatttgtgtgtttgcaaccgggtgtggcggcgagggaggggcccggccacccaggtgggccagcgggatgcctgggaggccggtgggtttggctgaccacttcttcccattcctcagtgggagacttgggccctcccggtcatccgagtctgtcccgaaggtttaactgcgcgcggcaaggggaggccttgtaggtttccaaagggcggagctccagtgggaaaacttgaaacttgtcgtctgcggatatttatttccacttcttgtatggcctgaagaatctaggaggagaaaaagccagataccaaacttacggccaggcagacgggtctcgcgggtgttgacagggtcctgagggagtttgaagccttattctcgagccgcctcctcttctctacccacacttgcaccgaggtcaccccggcaccctccgcaccggttcggttttggtctctgcttgtcctctcagtccttggtactttcgtctccctcagccggaggtggcaaactcagacatctacgggcgcccgaggccctcgcagccctgagccccagctttcacttccctgggctgcccctctccgggagcaggcagacgccccgttctcggagcccagcgctcacttagagcgactgaggttggtcgaagatctttccccacatcccataatcagggccctaggacactcgcagtccctttaactctgcttctgtcattacactagaacaagtagtgtttctgtttagagtcccatttcacaaattggttagtggaggcacccgtgacctgacagcttgcacagtggcctgtcc

SEQ ID NO: 242960 - DNA, 524 bp, Homo Sapiens
  misc_feature (150)..(187): n is a, c, g, or t
gatcagaggcatgaaagtgagtaagtgtgaatgcttaggtacctggggtatggaaaggtggtaattaggacagcgggataattgatgtgtagattgcagcatgaacaaatgctttgacttgtttgttcttctcactcttccacattcatnnnnnnnnnnnnnnnnnnnnnnnnnnnnnnnnnnnnnntgaaaaccctgcctagctaatgaacaccttacctgcttagttaagctgattacagatacacatttatctaaaggaagcaccctagtctcacagaagatgcttaggtggtaccttttgctctcagttgcaaaccaagaatgcctttcctccctccagagcttccatttcacaacccctaactgagacgcaacaataccacccaaccacacacaaaatgacagaaatgcacccctcattttttgggggaaaatggtgaagatgatcgaaaattttagaaatagaaatcagaatcagagaaaattcctaaagaattttacctgaacagcaaatgcaccaa

SEQ ID NO: 242961 - DNA, 522 bp, Homo Sapiens
  misc_feature (111)..(146): n is a, c, g, or t
gttttatatgcttcctagaagcatgcaaatctagaggatttagctatttacaaactttatgacaaaaaatgtgtaaaaccatgcaataatctgataaaatctgttaacagnnnnnnnnnnnnnnnnnnnnnnnnnnnnnnnnnnnntagatatgaattaggttctgtaatagaatggaaaattagcttaatgtaaaaatcgggttaattgcaatgttcagaagcactgtaaatcatatctcaaaacatgtctatgcaaattagtttctgcaaatccttactatctattagtgttccttaaggataattgctcctgtgattaaaatgaaaatcatattatggcaaatttaaattttcttcatgtcttctaatggggttcaggacactcaaccccaaaatatggcactgtagcatttgagcagaagcaggtctctctgaccttctcccactcttttccccttaagcaggctataaaagaattgtctaggccagaagtatcctctctctacctggaagaaaccaa

SEQ ID NO: 242962 - DNA, 757 bp, Homo Sapiens
ttggctgagtagctgggaccaagtagcagcctcaggtgtaggggggcttgagcctctcctcactcctctctgattggtccaaatttgctcagtctgggccaatcagagtctttctcctgggatgcagagagattagcccaggtggatgatgagggagtggcaaaccgaagtctatgcataagcagagaaagccagtctttgaagggaaagaggacagagcgtctgcctcaagaataacaagagagacagtgtcctttgaaagcagagaaggaactcagccatgacattcccattgcagtccagatgaactgggtagtccataagatgttgcaccttgttcaaccctgcgcatcctttctccagacccttggagaaatacctcccaccccgtgttgccaccgcctagggaaatccaaaatccagctgtacaatgtctgtacatttccaggggcttccatcctcaagtcttctctgctcctaggcttggttccttgagtcctgtacctccatccaactgaatatgaaactcagatgcttcactggtttccataacaacagaataaaacaatgccctatcctactcccacaggtcatttgaggagcaatacaatgaggatcacaaaaagggtgtcattgatctcttcacagcagacagcttaaaaaccataaccagtgacaatcgtctcctggctcaccatgtaactgtccctccagccccagaggactagccccagccacagccctgcaaagaccttga

SEQ ID NO: 242963 - DNA, 957 bp, Homo Sapiens
accccattaccaatgtgagccaagggaggctactggagcccgggaaccctgccaagctccagctggcagagaagtcagtaatcaggagttaatctgctgccgacctcagcttcaacttcaggaagagtcaggtggtgcagagaggttgccatggaacctgagtgttcagaggacagcaggaggatccaggtaccccttcagctctccatccctccctcaggtgcccaaatgccatcttcaaagaggaatctgagaggctaagcaattacctaaagacattaagtccaataataaggtgatcttgaaaagacagtatttctaaactgaaaggaagttattcaaactggaagaggctgatagattattaattatggagaggatcactataattgggagaaaaaataaataacatattcatcacacatctgagggagcatgggaaatattgtgtcccatttatttccaaggtcaggaatttattttgccaaatggcagggataaaaatctagccaggattctgggcagaagtctctaaggatatgctgtacacacaggctagtgaggtttaactgtattttacagtatggaaatccctaaatattcctaccttcagattcctctggaatctttaccaagccttgctttatgtaccattctaaaaacagtatgcttttaactttcaaatgtttctaatgatgtaactaatgtaccaagcatgaaggcagctttagtagtctgctgagaaataggtccacagaggccttgttttattgccagaattaaaatctatcagttttgaaataggcatcccaaagttcaactcactttataaatatgtaggagggtctggacctaacatacatccaaaactggggttgagaagtgtaagtgaagctattccacaaaaagtcccaacttttttgtacaaagttggcttttaaaggaaaagcattgctc

SEQ ID NO: 242964 - DNA, 937 bp, Homo Sapiens
ttcatttccagacaccttatgacaaaaaggaaaataacactctgaaggtatggtattaagtttgttaaaagaatggttttattgacttcatttattctattgtccagactgtccaagtttctcatatacataaagttgagctggatcaataacgacatatcctaggaaagtaaaggaaggtatgaatatcatgcacaaaattaagttgggtttttcttacttagttgataccagaattgtggatacacatattaagacaataaaaaagccaaaagaccaaaagccattattttttctccacttgcaaaagatgaatgaaagcacgtacatgaggaatataagagaagctgcacaaccaattatgcataccaccaaaacaaacatgagttcccatggaagctggaatcccagaaatgagaagtagtaaattaaatgtattgaaaggagaatcaagaagtgtaatggaatgtccaccagagcctgtccacaccattatgctgaaggccagaggcctgaaatccataactgagattgaactttttttaataatcactgatgctgcttatgccaatataaggagaaatgcagtttgtgatcaacaacaaaaatatggacccatctataaaaccaagatccagcactatgtcatcacgaaaaaataaggtgctctccatttgaataagctctgtgaagttaaaaattccaataagggcattgctaacaattcccataagaacggaaaacaattcgatttcttggtattacatgcaactgaaaatctaatccttctggtcaccagacactatgatggctccattgtaggagggatcatctgagccatttctgtttctgaggtcatctatttccaaaactgtatcctgacgcttcagtgaatgcacaaagtcttcaatatttgatcctggagcaaagatgccaa

SEQ ID NO: 242965 - DNA, 824 bp, Homo Sapiens
ccagtttattacaaacattattagaaaaggatacaaataagtaaacagccagatgaagatacacacagggtgaggtctggacgggtcctgggcaaatgctggagcttctgtccccatggagtgggggtgcgccaccctcttggcacatggacaagttctcgttcccctccctccacatgttcagctcttcagaagctcccgtgttcctgggccttttatggagacgtcattggataggcatggctgaagcatggcagctgtgttgagatgaaactggacaaaaagcataaggtctaaacccagcaaggcctgtctgtccagatgcttcttggcctctctgtgcagcgttcctccttccgggtatggggcagcaccctctctggaatgagggtcttatgagctacagtcagattaaagtctggtgttgagcaagtgaaatggggcaggagaaggtcacagacagagattccgttttctgaggcctgcagtgtcccaacattataacaaagggttatgggagtgatgaaccaggaactgtggacaaaaacatctacacacgtataaaatatcacagtgccctgggctgcagctggagtgtgtgggtcataattcttgcagatgaaacagaaacagcaagactgtaggtactgcccaaggtctcctagccagtcaaggctgaccaggagtccacagaccatggcacagttctgggcctgacatggaaggtgggagcatccagatcagagaccattcccactgagcggtggccaaggacggaatgacagaagaggtgattagtaaccacatatggctgtttattccaa

SEQ ID NO: 242966 - DNA, 903 bp, Homo Sapiens
cctttcataagcaatgtgatgctttttttcacattattcaacatggtttaaaaattggtatacaggcctatggtgtttgtcgtgaacttttgccagagtagaatggttcatgtttttcctcatagattttcactcctcactaaacttcatgacatctaacatgaacttattagaaaaggctatgcttgagaataaggatatcttttttctatgcctatgttgttaatgagtatgaagcacttacaggcttttatgtacttgaggttccaaagacatttccaaattttcccattttcagtcttcaacttaacattttggtccttgcagtggagacctgagtcctatctgacattgggactacagttagggcagaatttcctaaactgccattttttaaagaaataagggtaaccaaatgttccccttaaaagcactctggtaccctctagtattgggagataactatcttcccctaattagatttgtaaaatctttctcaatatttatttacatttttttcccctcaaatatattgactttttcattcccagtaacaatatgtctggtctgtaactaagtcattccatgttcagattacagatttatttccccatcttttcacattcttttagtccaggagacccactttgaaggttaaaaccaaggtcacacaatgaataggtggcagtgtcacatataactcagctccaggccttatgaatcctgcttatagcccactgcctattctagtcaccagattgaaaaacaccatactagggaagaagacggcaaactattgcccactacatatttgtatcagtcttgtcaaatttttattgtagtatgtaatagaattaaagctatgatgaatcaagtaaaaaatgccaacttttttgtacaaag

SEQ ID NO: 242967 - DNA, 409 bp, Homo Sapiens
cccaccagcttattttaataaaatgaacaatattaaactaaccttatttaccaaagatgtacccagtcatgagaacttgaaacacattttgggttactttctataattccaagagtttaagaaaagtattgatgtgctgcaaaatgacatttcagtaaatgagggactgtgtataaaaagtggtctcataagattataatgaggttgaaaaagtactgttgcttaatggctttgtagcatagtttttagtgcaatgcattattcacatgcttatatgatactcacatgtttatgtgtttttttaaaccaactgaactaccagtcatgtaaattatagcacaaacaattatgtgcagtacataatgcatgatactgatcataaatggaaactgacccaatagttccatag

SEQ ID NO: 242968 - DNA, 353 bp, Homo Sapiens
tttttgtgcttcaaagaacttattaagaaagaaatgatatagatgggagaaaatatttgcaattatctgataaggaacttatatacagaatatataaagaactctcataatgcaacagtaaaaagacaacccaatcaaaaaataggtaaaggatttgaatagatatttgtccaaagaagatatactaacagccaataaacacataaagtcaccatataacacagcaattacactcctagatatataatcaagagaaatgaaaatgtatgtccacaaaaaaaacttgtacacaaatgctcatagcagcattattgttgctatgagcaacaacagttgaaacagtagaaacccaa

SEQ ID NO: 242969 - DNA, 910 bp, Homo Sapiens
tatacatataaatatatcagactgaaaaaacattattgcaacaaaaagtacccaaaagccccacagccaattgcaccccaggaccccccagaagagcactgctcatgaagctgaggccctggcacgcagagtgctggagccaagataactctgcctgtgctgcaaatcacccctcaggtaacaggcacagtgagggtcgtggtgggggtgacagttgtagctggaatgagggttggtcttagaacacccttctccctgcattgatgatcaaatgtctccttgttctccttcctcacaggacgtgcacaaggacccggacctgcaaagtgtaactgaagagtgggctacgcaccccggttctgaagtaggcggtgggatcacagagtcattgtgcaccaaagataccaaatctcacatattcctgatgtatagattcatgacataacagtttacgcttgtcataatttggaattgaaatggcctggccttcgtgtgcacacggccacaccgtgtggcagacgtgagctccgctttgaggctgtcagacagacccaggcagcagccctgctccctgctcactggggagctcaacatggcagccacacagcactcccttgggtgccagccttcatctttgtaaaatgaagaaagtgaaagtgcccatctcacgtagtcattctgaagattagatgatgtacggcatttaatgaacctgtcatagtgaccttcagaattaaatgctcaagaaaatattggaaagtgtgcttggaaatatgattcacaattgtaactaacagaaaagatgagatcatctgtcaatgatttaagtagcatagatttccatcatatgatggagtcaacaactatgaacagtataagccaacttttttgtacaaagttgtcttttatg

SEQ ID NO: 242970 - DNA, 163 bp, Homo Sapiens
gtcagtaacagtttagttgtacattttaaactaacaaaaagtgtaaaattaaattttctgtaatacaaaggataaatgctagaggtgaggcagtcagtaacagtttagtcgtacattttaaagtaacaaaaagtgtaaaattaaatccaacttttttgtacaa

SEQ ID NO: 242971 - DNA, 698 bp, Homo Sapiens
gccagaaaggagaccccgcgcccgttcaacacccatccccccaccctcagtccccgacagtcactgccctgcttcccactcaagtcaccgacactttgaaaatgtgctatgttataaaacttttttcccagtatacattttgtcttttatcactcctgggttttaagtcatatttaagaagattttgcccactccccggtgatgaaggaattcactttttcctagtacttttgacccatttggaatttgtcttagtgtatggtatgaagtgcagattcattttcgtctttctccaagtggttaacgtttaaccacttgtattaacaagtccatcctttcctcaccggtatcatatgctaccttatagactgaatgttctaggcactggggtctgtccccgggttttcatgtccctgggcctgcttgcctacatgggtcctggtgtcatgtggttccattacggaggccaggagatggttcgggggcagaggacctctccatttcttttgcagagttttcctggctatttttacactcctgtgcacttcctctctcacatgaactttataattagttttctagatctggggaaaagcatgcggcgtttttataaggattacattacatttataaatttacttttgtagaattgtcttgcttaggagagttttcttatccaggaacatggtctttctttc

SEQ ID NO: 242972 - DNA, 464 bp, Homo Sapiens
tgagccaccacacgctgctcagggtgttcacttttttatagtcttcaacaaagtctagatttttttagaatgcacaattaataagtagaagaattaggagataaaaaagaacagttttactggctggcaggtagctggctccaaggccgtgctccagatccaccatttgtggggcggacagcacatgtgatgccaggatctggggctggccaagggagcatatcctccaaggggccccacctgcaagctcggcctgctggatgccctggatctcaaatctcacctgagcccacagccctcactcgggcaagactggcctcggccacccatgaagcagctttcagggtggggctgcttcagctcttaccaggacacttatggcttccagagacaccttcctgaaagaagggcttatgctgatgtgttcctcctgccttccactgcgtggatggctctacaaaggg

SEQ ID NO: 242973 - DNA, 747 bp, Homo Sapiens
agagttcacttgtgtaatgtattatttaagaaagaaataagccaagcacaaataagggacatacttaacttcagctgtaaaacagatgaactacatcagtttaggactagagtgaccttatgatgaggtgcaaatatgtaaatatgcataaatattactttattgtgcttgaaatttgctttattacgaagaattcccagaaatattctgatttccaattatttgtttttttcttgcatttacaagttgttcttagttgcatgttattatgtattatttgtggtctgaaagaactatattatctttagaaatcattggtagtttcctattttatactatgtctaaagtttatataattcggatgttagaaaattttacagctacctttcctcattttacaaatgagatatgcaaagcctacagacatttgccttcctcaaggtaacaaacagaagggttcttgcagcaaaggcaggattagcatccagactctcgactccactctttgaaccacatctcacagcctctgtgaattgatattgcaaagaagcaatatgactatctgggcaacagggtctagctttagtttgtatgtctaaaacaaggggcgctaacctttgtttcatttttcttaagaaatcaaaacattccatgtaaggatttatgtgacaaatagatacaataaagatgagtttgtttggcatgaacaatgttccatgtaagtgcccaacttttttgtacaaagtt

SEQ ID NO: 242974 - DNA, 292 bp, Homo Sapiens
gcaaataacttctgtactgatcctacacagttagccccttgctgtaagttcttttatatttcctatgtagacaattagatcacctgtaaaattgatttttagttcctcttttatactcctttagcctaggaattacaatttaaggttgaatataaaatactttttttggaaatctactgatccatgatctactaagccatgatcatatggctcttctttaatatattaatgtagcaactaacattagtggattttctagctgggtgcgggggctcacacctgtaattcccaa

SEQ ID NO: 242975 - DNA, 741 bp, Homo Sapiens
cccgtctctaagtaaataaatacaaattttaaatgacaattaatacatttgtattagactggttgagtttgttttcacatgatatttaagtgctacggtaggttttaaagctttatatagaaatcaagaaagcatcaaatagcatggggggaaatgatcaatagctgttagcactgatttcggtgcaagacaaatctttccaagacacaaatcccaatccataagagatgagaatcttaatgagggatcctgacaaaaatagtaaaaaagaaaagtccatcagtatactgaatggtgttctgcttgttaggcagtagatggggtaaggaaaaccagataacacctgtggaatccaaggctgaagcaggagaaagaaacctggtgcccaggtaaagtctgctgaagccagcccaatgtcagtggctggcttgctgccccacccacagggcaggtcggctgttgagcccctgaacaatgaggagctcacctttagagggtccagtgctccgcctgggtcacagaggctcagaattacaaaatcctctggtagctttcatggcactctcactttaagactgcaagactgatggtttcttaataggaatgcctttccagcctgccttcaggggaaattacatacctctccaagtcctgtggcatttacagtttctactaccagcctggataatgatgcatgttctaaagttgacagttcaaaagtcacccaacttttttgtacaa

SEQ ID NO: 242976 - DNA, 901 bp, Homo Sapiens
gcaaatcaaactcacgcgtgtctctatggtgggaggtggctctccaaaggcatgacacacatccctacgtaggctagacactgggttctaaaacttgcagaacctatacaagacctgaagcccttgtggaagtggctgtatcttctgaactaaaaatcagaccacaggcacattgatgggaacaggtttttaaagtgggactgtcctgaaaatgcactttatctagtcactacatccatgatggtccctccaaagcactacaccaaaaagagttagtctgaaatagttagcctttcccatttctaacatcttgctaatctggattcaaaattcacatacatggaatgaagacccaattccttccctaaagttcatgacaactttaggaaagcacatgaactaacctgcaaagacaagtcaaagaatccactgtatggtggtgacttcgtgttaatcaagtccttgtttctatgcaaatcattttaagtttcagaagagacaaggccagaatattttatgaaatataaataagctaacattgctattattttgataaagcattattcagacagcctctctaacaatcactccttcttgtcccctcttttccccatttttatttgtctcaggtctcccttggcccacataagggacaggcatcgggtaccaaggtaccttttcccctacttccttccctcactttcaagaatttatcaatatcaaggttgaacagggcttaaggtttttttctaccaacatagccaagcctttcactattttaaattgagtgtgtaagcttatttatgttatcttctgaaaatagaacaggggaaagagataaagtgggatccagaaaaagattttttgaaagattattctgaaaaattgtgtgttgacccaa

SEQ ID NO: 242977 - DNA, 272 bp, Homo Sapiens
gtacaaaaaagttgggtcaagtatccttgtcagtttgtccttgtagttgtgtttgcttgttatatatttttctgtccttcaagttcaagctgaaggtgtgtttacatcatagacatttaaatacccaaatattctgagaagcttaaaaaaatggtagtttcctgtccacccctcttcactcccttagtcaccttcctcaacatcagccatttccaactctttccaccatttattttgacatttatatttatattatctttgtttctaaatag

SEQ ID NO: 242978 - DNA, 373 bp, Homo Sapiens
actttgtacaaaaaagttggctcaaatcatttctggtattaagtttccttcaggacatccttttttttgaaaaatgagttaagatatgcaaaagaactttgtactttgtcttcactataaaagtgcctggagtgaacttctctactcaagctaaattgttaattagttcaaggtacaccagagatgtgatcttggaatcttctgatagccaacatttattaaaacagtagtcattggtcttgattagatttatgtgtgtatgtgggtgggcggtgggcagcttagagtaattttaattataaaaaattaaaattacttagagtaattttaattataaaaaattataaaatttttagtgttataaagactcccg

SEQ ID NO: 242979 - DNA, 429 bp, Homo Sapiens
ttggctattatttaaaaattcaaagtcttagaaccaagaatttggtcatgaaccattaaagaatttagagagaacttagctctttttagactctttttaggagtcagggatctgggataaagccacactgtcttgctgtatggagaaattcttcaaggggagtcagggtccctcaggcttcccttgtgtctccctggacctgcctgacaggccacaggagcagacagcacacccaagcccgggcctccggcacactctttccactctgtatttgctaaatgatgctaactgctaccaaaaggcccttgggacatcagaggagccggcaggcgaaggtagaggatgtgttccagaaacattagaaggcaggattaattcagttagttagttctcttgttaaatggaaatgggaattggaaattcctgata

SEQ ID NO: 242980 - DNA, 507 bp, Homo Sapiens
tttatagaggagactgaaaaagataatttattccatcagaggcatcacaattacagattacagacatttgcaagtaaataatatgcagggttagagcgctgcgttttaacatttaacattcatgagtaaacagagatggccggtgggtaaatatcttgccaaggtggttcctggtattaagccttttgagtcttaagatgacaaatccctagggatcaggtggttttcccgcacgaactcttgtcaatgagaaatccctcagccccttttgtcttgggtctcacagctccagaagtgagccgggccagaacgaagccatcctagagtccccaaggacagccctcccgtggaccccggctagggcccccagagtctcatcctcaggagtgcgccagctctgggcctgcgtgccggcggggtctgcagccacaggtcccgcgagtcccggacacttccaggacgtggtctcctggtgagacagctcctccgggtaccagtctcgaccca

SEQ ID NO: 242981 - DNA, 491 bp, Homo Sapiens
ttgggtttttcaaatcatgattttgatatcattattctaaggagttatctcaaaggcacaaaatatgaattctgcaagaaggctattttttattgtagtttgaatgggttaggaaaagcctcaatttttcactcttaagtccttcagtacatttttctttcatcttattacttatgcaagttaaggttctttggtaacagaattcttgcaactgtaaaataaaactacatagatgtaagaagtcatgtaaacggttaacaagcttaccaaggttagcaaaactttcattgtaaatcagtctgtactgagcaaataaaaatcattattagttgtataaacacaaattccattttgactttcaggatgtcatactacttctgtacctagcattttcagtccttatatttgcaatgttacacaaactgtactattttcttttatgtgcagtttgcatgagtaaaccatcagagaataaattctatctttaaatt

SEQ ID NO: 242982 - DNA, 502 bp, Homo Sapiens
ttggctgtctttatcaccaaaagccagtttctctctacttttatagtcttaagaatcaaaataaagaacttttcaataaagacttacatagagtgttagtatagaggttttaacagtataaacctgtcataggttaccctgataattaagctttctaagctgtaaaaattctttaagacttctcagaaaataggcatgttccatcaatctccatcttctccaccccttaaatagagaagttgaagtgtataactatcctaaatatttaaggattttataatgctctttttttatgaaaaatgttttgctatactgctttaggcatattaataacagttgtaaaaattgtttgatttgtgtttgcccaaagaacattaaaagatgagcattaccaaaagcttagctgaaaagaaatcattagtaaccttgtaatttttcttctttatcatttccttcctccatatatgcgatacaactatttatttatttatttaagacagga

SEQ ID NO: 242983 - DNA, 575 bp, Homo Sapiens
  misc_feature (382)..(456): n is a, c, g, or t
gccacgcccgggcctgtccagccctgcgctcccgcgcttccgcccggcccgacggagccactgcggcaggtgcggcccaggcacggggtcggggctgcccagcgggaccccggtgcctcccagccgagcgcgggccagcggcggggctggtgggtccaagcaggagcggggaggcagtgcttcccagttccctccagccccggtctccgtaggaagagctccctgtgactgtgaacacacaggaaagcagaacaaaaccccacaacctcttcattatggaaaatgtcaaacatgcaggaaagaattgaacagagtaagccagcgcttctcacacttcagtgtgctcaggaatcccctgggcattttatttgattaaaatacnnnnnnnnnnnnnnnnnnnnnnnnnnnnnnnnnnnnnnnnnnnnnnnnnnnnnnnnnnnnnnnnnnnnnnnnnnnaaccacatctgataggaggttctaatgaacccccgtgaccccaattccccagcaaccacaactcataatcaattttatttcatccacattcctctcccaccatcgttttgaagcaccaa

SEQ ID NO: 242984 - DNA, 648 bp, Homo Sapiens
accttttcataatgcatcccccaagttgggggattaaatcgctgaaatgtttatttagcactagagaagtaaattcaaagttgcctgtgggtagacgtacaatagaattggttgacaaagtttggtttataaaatatacttacatattgtttcttaggcaaaaatcggcagcaatctggaataattcagattttttatgagattaattgccaatctttttatctgtgacgataatgccaaaaatgactcagagccaataaccttcatctgtcatatggaagaaacaatcctagggcaatagttttttcaaaagcggaactgacaaagataagcgtttaaaagggtcttgatcaattagttacaggaacatgaaagaaagtgttccacagagaactgtgtctcctaaaatctctttcttctatcatctaccttacccaaaatttctcaatccaaccacatctacctgctggtccatcagataccagatgcctttacatccaaaattctcttaatgctttttttcccccaccaaagttctcattacaaataatatagattggaagtttggaggatggaggggaataaaaaggaaaagtaaaacaaagtcactttccccaatccatatataaaacccaacttttttgtaca

SEQ ID NO: 242985 - DNA, 882 bp, Homo Sapiens
tgtacaaaaaagttggctacagacacaaagccggggggtccacgctggcgctggaggcgagccccggcggccgcaagcgagcccgaggcgcggcggggcgcggggcgtggggacgctagcgggcgccggacgggcgcggcgccccgtcacgggcagcgccccgaaccggggccggacacctcggccgctcgggccgcggcggcggggaccatgccgaagaaagtctcctgagcccggcaacttcggcccctccccgcccccacccggctgccctccgcgcggccctccccatgtgcagccggccagccgggctctcctcctcgcggcggatgggtgaccttttcctggcacgggcaggctgtgggaggcagcggagcaggcgatgaagaagaagcagcagcatcccggcggcggcgcggatccctggccccatggggcccctatggggggcgcccctccgggcctgggcagctggaagcgtcgggtgcccctgctgcctttcctgcgcttctccctccgggactacggcttctgcatggccaccctgctggtcttctgcctgggctccctcctctatcagctcagcgggggaccccctcgcttcctgctcgacctgcggcagtacttgggaaattccacttacttggatgaccatggacccacctcctagtaaggtactacctttcccaagctaggtggtgtacaacagggtaggcaagtgtgggagccgtactgtggtcttgcttctgaaaatcttgtcggagattcacggatttaatttggtcccatcagacattcacacacaactatgcttacttttatgaccaaatggaactgaataaaaatataagtactgccgaacaaccctatttattcactcca

SEQ ID NO: 242986 - DNA, 912 bp, Homo Sapiens
tccctttctgcccacaagataaaggacacacaccatagcagagcacacatggctttacatactctggcacttctagcctcatctactgacatttaccccatgtatcctgtattccagccacaatgaactgcagttctcaaacactccgtgcattcttaattcatcattgtatccctagcaccctagagtaagagataagaaatctctgagaaataaaagagtgtcattcacagcatatcttctgggaggaatacaaaagctgagtctctacaaaaaaggcaatgtgtgatcttaatcactgtgaaaatgcaaacttcctcagctagaaattggcaacagcagtggacacaaaaaggttttagccattgtacctctctgggagaaatatataatcatttaaggaaaataaaggtactctgttcttccaaaaaaggtgtgttacataaccaccatcttatggatgtttagaaagggctacccaacatttccatgatgaactatttctgataataaatagctcttcgagagccaaaataaacagaaataatttgtctgtggtattccctgagtattaaccttgagttttcaatttcatttggaaaagcaggaaagtaaacaatcctgtagaaaactcggtgttacttcctttaattgcaatgctaagcccaagactcataatgagctttaaaacccccaagaacatattatattcttctaagatcttctcctccccacgcccccaaaaaagcatacaatttacagaacagtcacattatgtacctatatttatgtctatcaattaatttaattcctattattgggagtaaggtaatttcaaagacaatcaagatagtttctactaagtctcttcctaatttgtttccaacttttttgtacaaagttgtctttatg

SEQ ID NO: 242987 - DNA, 617 bp, Homo Sapiens
ttggcatgaatgttctcaatgacatccagcatggtgaatcctttccagaaggttttcattttactttgcccagatcaatctgataaatcactatgtatagtcttacaaatgtatttcttaaataatgagacttgaaagtcaaaattactccttcacccatgggctgcagaatggatgctgtgttggcaggcatgaaaacaacattcatttccttttacatctccatcagaactcttgggtgaccaggtacattttcagtgagcagtaatattttgaaaggaatcttttttctgagcaataggtctcaagagagggcttaaaatattcagtaaaccatactataaacagatgtactgtcatctaggctttcctgtttcttttcagagaacatgaagagttggtgtagtatcattcttaagggccttagcattttcagaatggtcaatgagcattggcttcaacttaaagtcaccagctgcgttagcagctaacaaaagaatcagcctgttctttgaagatttgaagccaggtatcgacttctcctctctagctaggaaaatcctagatggcatcttcttccaacagagggctgtttcatctctcttgaaaatctgcct

SEQ ID NO: 242988 - DNA, 912 bp, Homo Sapiens
tcaccccacaaataagggctctttttcccccagaggctctgtataagctcctccacaagtttcattctcttctaagcctcagtttccccatctgtgcaatggggaggttggattccatagtctcaaaactccaggctctgctcaatagaggaaaagggaatgagagaatgcaagagcacagagagaacaggagaacccacaccagggtggaaaggaagggaggagggaaacaggcagagaaggaggagagcgcctgcagctgcctgcctgggagagaggagagagcaggtgtgcacagcacaggatgcttccagaccctgctcgggctatgtggggccacttcctgtccacttaacggcctgcagcccctgcagtggtaaagatcaggccctggagacagaaggatgaaggtttgaatctcacctatggcattagttagctggggccctggaaggagattttcagaacttcagtttcctcttttataaaacggggataaaatatagagctgtcacataggggcagacacaaggcttggattcaaatccacatctgccaagctgggtgcaaaacagaaccagatatctaaggttttagctcctggctcagcagccaaggtggggctgcgatggagaagtggggctgggcagggacggtgcttagagcagcactggggtcagggtatgcaacatgagagtgccaggaagggagagggcaagtccagagcaggagacggaatggtccagtgctgggctggaccccttaaccagaccctgctggagccgccgtggcccacctaacaacaccagatccgagacacactcgtacagctccaattctctcttctggtcctaagcttttcattttcagagagactgaaagtcattctcagccaacttttttgtacaaagt

SEQ ID NO: 242989 - DNA, 900 bp, Homo Sapiens
ttaactctcatgttataaaaacagtagtaaaatacagtacacaggaatgtcaattgaatgacaacaatgaaagtacaatagcaaatgaaaaatagtaacttttaactttaaatacaaagtgaagcaatttaatatgaaattttgttaataagaaaaatatatgtcccatgtctttattacatactgtacaaaataaaatattgcacctttcatataataaatatatacaaagagtatgttacaaatgatctttcttttaatttaataaccttcaacaatcagatgtgattgatgattaacaactaatgggctggtgtgtcctcctcactgtcccccatccattcccaatcaccaaaccctccacatacagtagtgctcaacccagtgtcagtgaagctgaagttagaacaaaagagaccgtgtgctcagaatatggtagagaaactcagcaagcttgtccacagacacatccaaagccaaaatgcactgttcagttattactgaccaggaactaggctcagcagagcctgtggcaggtaactttgttgccaagaagatgtaggcagcaggtgtacaggcagctgagaccctgaataaagaagtatgaccacttatttggacttgtgtgccatctaaagacacaactggtagtatacaggggaaagaccccataaccaaatcagcttcagaacttacaatttaatgctagcctgaactcacttcagcaacaacgcttactccaaacctaacctccatcctgacactatcactaacaccagcactggccccaatctaaacccaatccaaccctgacctaacctggtcctaaccctaacccttaaagacaactctagccttaaccttaactttctttctcacctaacccaattctagctccaa

SEQ ID NO: 242990 - DNA, 401 bp, Homo Sapiens
ctccatattagaaatatacaaaaaaaggcaagcactcttccaactactctggatacatttttacaaagaaacagcacttgaactctcaatgtttctaatgctttgaattgtagtgcacaaataaatatttatttcattatattttcattgtcctctacatttgtaactgagagtgtgagagtttctaatattttgacaaaaaatggtaaaggtcacagaatgatcattgtttttctgattgactatggagactgctttcctgggtttcaggttgcacagtcatttttgcaatcttgcactgccatgaaaagtgagggctgcctgtattcggcataatactcatcaaaataagggctaaagaaaaattaattaggataagagccaacttttttgtacaaagt

SEQ ID NO: 242991 - DNA, 933 bp, Homo Sapiens
cattatcatccttttagagtgaaaggtataatttcagctagtaacactgggtttcagctcttcactcctgtaatttcaggttcttgttactctcctaacatttctaaatgccttactttcgaagttctccatcaccaagacatctctttagtaataatcaaagagataaaatcagcccaatacacttactactttaaattcaatatagaaaaatgacctaagtattttaacaatcaaaacaaaggtcttttttaaagataaaaatgctgttcttatttcaccactttctttcttgccatttaaatagtatctaatattactatttaaagtaccacttagtacccaatagtaacaaaaccatgcacaagcacttacctttgagctaccaaataatttttgtaacattatatgcccacagaatgagcaagacagtatcgtaggaaaaaaaagtgagaaaagagtaagtcatagcagatgctctttgtagctagcagacattttgtctactcaataaaccatcttactcatgaattccttttcccttactccaaatcatgtgactgtagtcctgggtcagccatcattaaccaattatttggacatgactaaccacagaattttgttccctcagctgggacccaactattagtccattgtccatcccaacctaagagtttccaaatcaaagggacattcttccttctataatcaagagctataagaatgtgacccatagctgttgacaggcacgtgtcatggacttacatggtaaagtcaaaagctaaagagaccatattcaacagcagcaataacaaagagctgactttccatacagatgtgcaattttggttcctgaggttgtagcttgctctggttcctacacctattccattcattgttaactatcccagtttccttctaataaatccccaa

SEQ ID NO: 242992 - DNA, 95 bp, Homo Sapiens
gtgacagagtgagatcctatctcaaaaataaataaatagactgcactttaagaggttggtggtgggaactaaaagccaacttttttgtacaaagt

SEQ ID NO: 242993 - DNA, 640 bp, Homo Sapiens
  misc_feature (498)..(513): n is a, c, g, or t
ttggcacttcctgtatctgcattatttttatagcattagtggggttgatccccaggctcacctttccttaccaaataccatcccatcagactgggattaatgggaggagaagctttgaagtcacatgctcaatttcttgagttgattttccccgacctcatcctttgatgctaagcaagaagggctctgaaattctcattcctatttcttacatgaatgagtagtgaagaggggagatgctggttttggtgcagggcaaaattagtctttctggtttaaacacgaatcacgataacccaaacccaggaaggtccatgctgcgattccctggcacttcttctttgtagtcacttcggtgaccggcttgtgctgcaccctccattgactagccttggcatattgacaagagcaggatgcccctccatccatcccatcctcaccatctctccttccaaccttctcactacggggtgggggaggggaaagccccaaatcttnnnnnnnnnnnnnnnntcaagtttgaatcttaatttaatccacaacctgcaggccatacaaccagttattctcgttcctttgaatcattttctgtttttcttattcttccccctcccccacctttgtttatcctcttctacct

SEQ ID NO: 242994 - DNA, 906 bp, Homo Sapiens
ctttgtacaaaaaagttggcttcccggacagtcctggcctcaacagaaccgtggttaacatctcgtccctctgtgccctgcaacctttcaaaggctgggcgctgtactgtgcaggaaaggctgctcgtgatatgctgttccaggtcctggcgctggaggaacctaatgtgagggtgctgaactatgccccaggtcctctggacacagacatgcagcagttggcccgggagacctccgtggacccagacatgcgaaaagggctgcaggagctgaaggcaaaggggaagctggtggattgcaaggtgtcagcccagaaactgctgagcttactggaaaaggacgagttcaagtctggagcccacgtggacttctatgacaaataagcccatgtttttggcttcctgaacctttttgcccccacttttagacataccccagagccctgtggctccccacaccctgccataggggcagtcctgccttacacatagaagcattcatgcctgctgccctgccctcaggcacagccagctgtgagctcccaggtcattggccttaccagttgtcaggagtctgtgctgtgcaccctgggttataaggaggcttaggagagaggttatgggtattggtgtctctatccccaggaatagaacttaaggggtgggaagaacaggaaaagaagctggaacacagaagagaggaggttgtgtctcttgctcatagcaagcctgtgggtagaggaaagagtgatctggtgtcgaataggaggacccatgtatattcgcagatggcctggatgggaggaagggcagacggtacatgtcccagcccacatagatgccccttgctgagggtagcaggaccttctgttgaactttgtgtcctcactctgatgtctccttcctt

SEQ ID NO: 242995 - DNA, 679 bp, Homo Sapiens
ctttgtacaaaaaagttggagaaattccttgatttttaaatgagcgaaatgattatattcatatataaaagtatttaggaaactgaaagttatgtgtcaaaaagtctctgtaccttctgagagtagaaatcgaggtttcacttaaatagatatctaagcatttatgagtattaatttgagttgctaacagcactgtactataaagttaaccagatgtgaaattcattctctgaaaagtttactgcatggaactagaagtagcattagcaataattttaagagtagcattcataggtattgatacagtaacatgaaagtaaagctaacagttccagtaaagtacatttgtattctgcttttcttattcttatcgcattttccatattgctacatcgtatcacatgactatcaacaattatttatcattgaatggttatatattatcccactgaatggatgtgtacctgtaatttatttaatcagtcttattaacataggctaccattttatactttcaaatgtgtcttctatataagaatatggaacacaatttaccactggtcaatattcgtaaccttcaaactttttctatcatctcaactgacattcaaaagggtattaaccaggccaggtgcggtggctcatgcctgtaatcccaactctgtggcagcagtgttga

SEQ ID NO: 242996 - DNA, 616 bp, Homo Sapiens
aaataatgatcaaggaatttttttattcattaggtttcagtatcattacagaaaatgttatggtacagaattgtttaacattattttgtctttgctcttgatttccacatgaatgctggtaacactaatatctgtacaagatcagtctttgattttatttttttgttctgtacaattttaaatgtattggttaaaaaggctgtcagcacttaaggaagcattttttcttcagtttgtttcttcaaataaaaggtgtccagttactgcccaagagtactgtgccgtgaggctattggggcgagaaacctccctggatgctctgcaggggatggttcttgaggcaaggcagagcctccacccagtcagtcttcttttggcactgtgcacataaacacgagatacatgagaaagaacaagcaaaagctctctgtaaagcagttatgaagcatactaagaagggaaatccaagtgttgcctacgctagtataaataagcagacagccttgatttaagagcataagtagttgtattttaaagatgagaaaaacacaagttctgcaggcacctaccgctgtctactaaaagctatcgctatcagacctagcattgaacccaa

SEQ ID NO: 242997 - DNA, 932 bp, Homo Sapiens
ttggggatggccggcctggcggcgcggttggtcctgctagctggggcagcggcgctggcgagcggctcccagggcgaccgtgagccggtgtaccgcgactgcgtactgcagtgcgaagagcagaactgctctgggggcgctctgaatcacttccgctcccgccagccaatctacatgagtctagcaggctggacctgtcgggacgactgtaagtatgagtgtatgtgggtcaccgttgggctctacctccaggaaggtcacaaagtgcctcagttccatggcaagtggcccttctcccggttcctgttctttcaagagccggcatcggccgtggcctcgcttctcaatggcctggccagcctggtgatgctctgccgctaccgcaccttcgtgccagcctcctcccccatgtaccacacctgtgtggccttcgcctggatgagaaaactgaggcacagcaaggctaaataacttgcccaaggacacacaggaaatgcagagccaggaactgaaccctggcagtctggctgtagggcttgcattcttaatgataccactacctcccaaatctgaggaaagggtgtccctcaatgcatggttctggtccacagtcttccacaccagggacactgacctcacagagaaaatggactacttctgtgcctccactgtcatcctacactcaatctacctgtgctgcgtcaggtgagcctgcctgggtggctgcaggggcaaaatcgaaccctgggggcagaaaggggtcacccagccttcccctgggggccttcttcactagtctcccaacacctacgccccccaacccccaacacatcagctgtcctgggtgaggactctggggtaggactgggggccctggctcctgacaaggagctgtaacacttgctgcccagctgtggcctgtttggtgggga

SEQ ID NO: 242998 - DNA, 663 bp, Homo Sapiens
actttgtacaaaaaagttggagaacaacgagtgctgtgcaggacgctggatgcccacgaggacaaggtctgggggctgcactgcagccggctggacgaccacgccctcctcggggccagtgactcccgagtcatcctctggaaggatgtgaccgaggcggagcaggcagaggagcaggccaggcaagaggagcaggtggtcaggcagcaagagctggacaacctgctgcatgagaagcggtacctgcgggcgctgggcctggccatctccctggatcggccccacaccgtgctgactgtcatccaggccatccggagggaccctgaggcctgcgagaagctggaagccaccatgctccgactgcggcgcgaccagaaagaggccctgctgcgcttctgcgtcacgtggaacaccaactcgcggcactgccacgaggcccaggccgtgctgggtgtgctcttgaggcgagaggcccccgaggagctgctggcctacgaaggcgtgcgggcagcgcttgaggccctgctgccctacactgagcggcactttcagcggctcagcaggaccctccaggccgccgctttcttggacttcctgtggcacaacatgaagctccctgtgccggccgccgcccccaccccctgggaaaccccataaaggcgc

SEQ ID NO: 242999 - DNA, 982 bp, Homo Sapiens
caggaccatttaattgagctttgtgatatgaacactgaaagaaagatatgtattagagttcattttcatataaaaagataactatacaagatatatactttcaaaacatagtattttaaattagataagatttagtaacaaaaggtaattaaaaaaatatcactttccaggtgattaaattaccctaaagccactcaactataaaacaaaacattatcactttattacaaaaacaatgaatactttgtttacaagtaactagaagctacccagaatacatccaagaaaacagaatgttgcgatttatacttaatttctctaaaatgtctccatcattttcctttataaatccccttctatttttgtttctagttagtacaaagttttgaatgttggcatgtgtgtatttcatccctatatttttctgtttactcaatgcttagagaattaaagggaaaatgtataattctgtcattgttaggtaattatattattggaaaatatgacacaagggagacatggttcgtacaaattttaaaactcacaaaattcattaatctaatttacaactataatttgtcccttataataataccctgtagaaaaagatcactatatttttaccaaaaaattactagttatagccccactttgttaagctttcaggctttgtagtgctcaattaacatatatctaattgttatacactaatatctagtattttattcctaaatatgattaaaattcattgcccatgccatcacttaactgtgattaaggtttttcaagaggacactgttaaatttaaatcactgctttcactcacctaaaattttatttttattgttaactataaaatcagagattacatattttacatcaacaaacaaagaatattcaagtccaccaaaagagttttagtttacgcctggacttctcaaaattatgagcatgaagtcaacagaactaatatggctgccaa

SEQ ID NO: 243000 - DNA, 651 bp, Homo Sapiens
cggctcccaggttttagtagtcactatatactctgttggttactacaacacagattgtaaatatcttctaacattctgtctcttaggaattttactctctcaaaaaatagactgttcaatgtttttaaaccatgtttaattcacaaatacaaaaaacgtacatgctgatcactgtgtatgtttagggctcccaaatctacagttctatcttaagttctttataataatgtcagacagttcttctgacattattacaaaggtctgctgaaaaaatccgcctggatattccaatagactacttactcataaaatatccaaaaatgagtcagtctcctccatcatcatattccaggagtctgctccatctccaggctccctctgttggtaattggcaccattagcctcttgctggccaccaggccaggctctgccaatgcttcagagctctgcacaggtttcaccccttctgatgttattatacttccctggcactgtgacacctttcttatctcatttggaggagagtgagggctggcgagagaaaatccaaaccactgttatttttgaattgttgctattattactaccattattattagttttcaaacaagcacatttgtggtgatcttcttagcattctaatatctccaa

SEQ ID NO: 243001 - DNA, 532 bp, Homo Sapiens
catatggtaattaattttattgattaaagtattacaaagttctacttttcattttttcatgtacaatgtattgaaatgaactaaactcaatcacttataatataaaaagacattattatgtattagcagggtgatgcttcataatcatgtattattcctacctctaagacaccagtctgtattatagaatcacagctgtcacctgtgactgtcagaaacagaaggtgcaattgggattcttaggttggtgacagaatagcactggatccacaggccagagactaggagtgcttatcaaatgaggttttaggctctgaaaggaaggaatgagaaggtgtgccgggacaaggaatagccagttcccataaaacttgggaaacgtagatttctcaaaagtagggtccgacacaattttttagttactttttgagaacatttaaaaataaatacattgaaatgctgattagagagcgaaagtaatttaggttgctttttcaatctgaggtttttttaaaaaagttattgtatccaa

SEQ ID NO: 243002 - DNA, 300 bp, Homo Sapiens
acacctggctctggatatgttattaatgtattctaaaaattatatgaaatttataaaagtctgatggccctgatgtgacactggtagtcaccattctggttgctatcttaacatgctgcatgtaatggaagtaactaagtttccttgtcacttgggaactgtcatcagatttttaactgtggctattttaagtttttatcattcacaatggttttctgaaagcatttggaataaggtacagtccaaaattggttttcatggaaaagactctaacaagtactcttgaacacagatttccaa

SEQ ID NO: 243003 - DNA, 914 bp, Homo Sapiens
tttccttaacaaaaggcctcattccctgttgcctgaatgattgcaaagctcctaactggtctccttctaacagctgtcccttctcaaattcatctcacacactggagccagagtaatctgccaaaacaacagagagctcattggtttaaaaacccaagcttacctaacattgtctgttacatttttcttttaagtgtatgaagttttctttttctttctcaatcttctccttgaagccttatacaattttgtgaagttggtattattcttcctatttaacagatgatgaaccaggccgtatgacattaagtaatgtttagtagataatttaaaaacttataaattctgttatgtaaaaatgtaacttcattttcttataagtagataatccgggtaaacacagtcaagtccagtaatttctcaattatttgaaattccaactcagttaaattcaggtccatcccctcctttccactgctttcttcctaggtgacattcacaatgagcatttacccagcattttgtgctggcatcttccaggatgtacaagcatcccaacatagtctcagattcttggtccctggcactggcagagctgaaatggtcatattcccactggcctctggttacatgatccatgctgccttctgtagtcacatattatttgtgataacaaacaaggtaaggatttgtaaggatcagaggtaaggcaggcataacgtagaaaactgactagcacaaggtctcttatttacaattctgaaagcccaaagttctgaaaaccaagggtattcttttttaatttagtgcctgaacttatttggtagtaaaacctgatttgatatgaaagttttagactttatatcatctagaatgaacattcctaggttttgctgcacatatattaatgccaa

SEQ ID NO: 243004 - DNA, 594 bp, Homo Sapiens
gaacacccaatgttatttaggcatccacccctttaaaaaaatgatacaacaaaaaacctggagataaactgatttgtgtaaacccatcccctaggtaattcataaccccactctcttcaccagtaatcattcaggaggtggggatgtgactcagtcaatctgttaggaagggaagtatgctagaaggcttctgggagagatttctttgttcttaacaagaaactcaggttaagagatagatgcttttctttgtttttctggatgctgttttgactggatttgaagactgcaactgcagcagtcaccttgtgaccataaggttacctagtctgaagacaacgactacctctttgaggatagcagagtggaacaatagagatatgaattttgatgaagtcactgaacatctgaaataaccaatttgggagctgtccaactttgaaacttattagagaaacgttttccaaatatttaagtaattttgagttaaattaatcatggctgaagttacccatattttttacttactaggtatctggcattgtgctaagtgttctacctgtgccatttaatacaataaacatgtaagattgt

SEQ ID NO: 243005 - DNA, 525 bp, Homo Sapiens
ttggctttcttatttcaggatctaaaggcaaaatggaaaaacgtcacattttgtggttattaccagggactgaagtgagttgcccggtggcccctggtggctttagctcccctggtcacctgaagggctgcagtgacccctcctggccagcagaggtattggcccagccaggctgggggaggctgaaactgcttcccttctctgcagccacaaagggctggattccttgggcgccaggaggggaggatttttcttttccctccgatagccctactgggcgctaagattgttgtgaatcattaccctcagaatttggactttctagatgcttcttaacccatgatttaggtgagtaaacttggaaaaatgtttttgcaaaacttgatgatcaagctgaacgtagaacgatattcctaatgggtgtgtttgccttttttcccccttttgagacggggtctcactctgtcacccaggctggagtgagtggcatgatcatgcctcgctgcgtacttgacctcatgggct

SEQ ID NO: 243006 - DNA, 774 bp, Homo Sapiens
gccttagtcaggagattattcgaggaacagtaaagaactgaactaaggaagtagctactggcttccaaagccacacacacacaaaagtaagtttcaaactgttgtcctctctcagtgcaaacgagcaattggcggacctgtcacgtttcatcaatcgatacgaacacagcattcagtctgtggaacaatgtgatgcggcaaaaatctgatctaatgcaaattcaagcccattaaataaaaccacagaaaggagagccagcccggctcagtgtcctcgcgcacggacgctgactcgtagcacaaaagcagctgaaaggcacgaggctcagatctcactgatcgtcctctctgaagggcagtactccgaggggcctggcgaggacatgtagaaagactgcgttttccttttcaatcgggcccttttgttggccaacaccagactgcgccggcttgaactgatgatttccgaaatgaacttcttgcagtccacacacacctccatggtgctccagtcctccatcaactctttgggaaactggagttcttcatctgatttgtccatagacttagattttgaggagaacctggggtgaaaacaaaacagaagcccagcattgttacttataggtctgctgcaatattaagaaaatatgtataaaaaaaagtaaatttgttgtcaaaacatcatggaatggatgagtgatttaatcatatgtccttctaaaaaaatttcttattggtgacaaggctaaaaaatattacttagaaaaccaa

SEQ ID NO: 243007 - DNA, 587 bp, Homo Sapiens
gatatcatcaatcttttatttaattaagcactgcccttcattttgaaggaaatgatacaatttcaaatcggaacttccttctcaagaagtgatataagaatgtaacattgatttaacatacaaccttcaacaaaaataaagtttatacaactcactgggaaataaaatgcatgtggaatttatcctgtttgtcaacataattcttcatgagtcacaagtattatagccaagaacaaaacaacaaaaagctgaatcagttgatagttactctgatttaaaaaacatttcacaaataagatgtagctttccaaacaaatccattcgatgaccattatcacaactatattttattctaatttataaaacaaaaaatggttagacaagcacatgatatcaagagtcttcaacacagtggattccattttattaagaaaaaaaatagaaaacaagtagtccttaaattgtcttagctctccatagcatacgttatataaaattaaagttttgcttccaaaaatatgtttccatgtggtcgtggtgttgtccagtgctattagggccaaagcacccaacttttttgtacaaag

SEQ ID NO: 243008 - DNA, 680 bp, Homo Sapiens
ccaaaacaaaagttctttattaattcttcaagaaatctgttttttacttagtcgattaatgtccatttcatgttgcctcaatagcccatgtatgaatcactcttcttgcagattttgttcagttttgttgtatgtagacccatctttctttgattgagttggtttctttgattgagttgatttgtctgtattatataccagtcagtattaaaacccaaacaatacctaagccaaaaaagcaatgtaggcacctgtaaactaacacacttggttgcaattgcttcagtaaaaaggacagtttacactcaaattgaagcaaccattatgtttccacaaacaacattccttattatcccacctcaccttttcattcttcctatgctgtctaatctgattctgtacaagagataaggcaggtactgctaaatgataacttagatgcaggggccatcatgaaaatattcatcccatatcttacattaagcaaactactagcaactgtttgttaaaaagtataaatgaataaatgaaaataggacagataggcagtgtgggaagctaaaatatggaagtgttattgctttgctttatgtggtataatgatctgattttatcttcccagctctcccaggaagtatgcagaataatatttatctcatattgtgggtgtggcaatcaag

SEQ ID NO: 243009 - DNA, 490 bp, Homo Sapiens
tgctattttcttaggcaaatgaaatgaccactccatgtctcagtttcatcactataaacgagggacaaaaataacaatgcctgccttctggtgactggcccagagtaagggctatgtaaatatcagctatcataattattctgcacagtgtctaaaaagagtcttgtgcttcagtagagatcattcacataagatcactgccagaagcttagggctgcattcttgtcaatttttcgatgcgacaaaacatacaaagtgtccagtatatgttcaataaaggacagtaactcttcttctagaagaaggcatcaatatattattaattacttctaactttttcctaacactgctaaatatctgtagttcatataagtaactgatgctaacgataacaatcatattactggcatcttagtggtttagaagagcctttgcgtacttgatctcagttcatctacactgtacaaagcaagagttacagagtgcttac

SEQ ID NO: 243010 - DNA, 1047 bp, Homo Sapiens
ttggtgcttcttcaccttttgttcctattcacctacacatcacttcctggaagtggaccagctttataaccaacctagaaagatcaggttgaatttggctttagagatctgaagctcctcaattttcttccctctgtggaagttttattagaataatctcttccctttgttgtcctcttcctaactaacctaatctcaaggctcaaagctttaaaggcaaatcttaaaatgtgctgcatcagaaagccaaggcagaaagccgatcacctaacaggctattgtaatttaaggcttcaaataactgttaatagtgtgtatcttctgttttgcctaaaagaaagaggctgaaatgtcaattatcatttagagttgtgagtgaattgcatttttatttacgtttaagagtctctctccctccttgtgttctagtctgtgaatggctcacacttggacttagtgtaggctcctatgggaggagcgggcggtagtgagaatcttcatcaaatggagtaacatgacccaaatctctagaggtttcataattttgctcttgcttctaaaaacataatcatctcttatggggtgttatgtgctttgtatcctgaaattttccacttgctgcttcttggtgtgaggcgagaaatgccaccacgtggcactgcaggaggagactggtggaagccacagggctaggccttcacttcccagtgacactgttcccaattccctccaggataagctgagactcctcaggatgtggttctgcagcagatgaggtgcgaacaaagcctgctctgccctgggcacccaggatggcactgagttctaaaaggcaaagggtatgtggtgaggggccaggctgaggccctggtgtggtaccatcatgggcagcagcaccatttgaggccgggtaggagagacgtgcagggcctggccccccaagagaccagcagacaaactgaggcggcagagagagagattccagtgtcaccaggaagactgcagatcataacaacaatggttgctgatttggcatcaaagagccaa

SEQ ID NO: 243011 - DNA, 1787 bp, Homo Sapiens
  misc_feature (1355)..(1376): n is a, c, g, or t
  misc_feature (1644)..(1672): n is a, c, g, or t
ttatcaaattatttttaaatgttggcatttaagtattcatgtgtatacaggttacatggaacctttcaggtcagtggggcacaaatgtggtatacacacgatgagcctggcagggaagcaaatgagaccaggcttggagctacagggatttaaaaaaattggatgtctttctgagggtctgagaagaatagggcagaagaggaaagggtcactttaggggtctggcttaacccactgcctagatctccaactgaagagctcctttcccatcctcaggggaagagtgcctgttttcaaacggcatccctactacacatataccccccttccctaaaatcttgatgtggcaaacacacccaagaacccacaggaatatgtccttataaatatgtttgtatcagagaaaacaaggcactttgggagcattatggcttactctactacatgtacatcattctagacagaaagtaaaaactggttagttcctcaagtgaattaactgaataaacttaatacaataacaaaattgttccctaacccacactgaggcacagttaaagggaacatggtaggaggcacagaaggaggcacagaatgaggcacatctctgcgcgacacctggtcccaggtcagttggaccccagcagggctcaaagcctgatgcctccaggaagcctgacatctctcatgagcaaagccccctggccttggagcactggctccctccctccccataccctgaagtcaggtgaggggccgcagtgggaggcagtcctagagcagagctgggacacggtgggaatgcttaagcagggtcaccaaagccacagagacctcaatctgtccaagctggcactgcagagtcagaggatgggcgccacgggaagagatttcacattagccgtgacaacaccgcctcggctctgcgttgacattggccagggtcgtttctgagggcgctcgggcttccactggaggcgagctggagcctgggccagctgcttgagcctccaagggctggctgagcctgccccctcccccaggctgctcctttggaatgtacccatctcacaaccaaggcaaagccacaagttgcttctgacactattggaagctgggccccagggccacaggaatgggggcaggtcccttgggcggggtgaaccaggaagggaggaggctccttggcttcggcgcttaggagtccttatgggccattgttccatactctcactagcttaggcccagattaaataatcactaaactttgcattctacattacgtgagtccaaaaacaggattacctgcattgggtcctttatcatcttaaagggctctgggtctaaagaagccnnnnnnnnnnnnnnnnnnnnnnggtgcatatgcaagtggagcccagagggcctctcggctcactgggtccccggccccccgagctgaggaggcttcgcaaggccggctgctacaaagtgccgagcttggctgcatagattttaatgagagcgtcaggcagagctgtgctgttgctctccgggacttgcagatcattaccaaaccaactgtaggatgagaacatagcacatcgaaaccctaggaggtcactgagctaatgatctaatcctaccttccgcaggcagtgcccnnnnnnnnnnnnnnnnnnnnnnnnnnnnntccacgatggactcagtccattccagaagccaggccaacaccgcccccttcaaggtcagagcagaatgacagtgagtggctctagctctcccttttccgggcaaggaggatccaa

SEQ ID NO: 243012 - DNA, 1445 bp, Homo Sapiens
  misc_feature (807)..(1062): n is a, c, g, or t
  misc_feature (1071)..(1081): n is a, c, g, or t
  misc_feature (1183)..(1225): n is a, c, g, or t
ttttggtggttaagccactcacgttgattcgaccacttggcagcaggtagatgtgcttttcattgaccagatactcaacttgcttggctgtgaaaaccaaaagaagacataatcagagcagaggggatccttaaagcagtggaggctcagcaattatatgacaattacagctttacttctttccccttaacagagagaagcaaaacaaaaggcgctattttgtccaactgacaaacagaaaaatatgctcactagattctggaaagtactcttactagttcacctttgaatccccagaaaattcaatatggctactactgatgggaattttaatctgagattgccttccaaccaagccttatacattatatccaccaggacacccctatcacctaaaaacaaccatcagacggacagcgatatgaaatgctggctatgaagtgcttcctttagttcttccctaacctggacttgcattgagtacccgcggcagcctccctttgacatttcatttttacaatacattgggtaaggccccatgcatgaggtacctgatcaatcctgtgtgaattaaccaatgagctgagaaatgacacagacctctctgacctggcaccatcagacttctgttcatttctcagctttctctcagatgcagtagtttttccatgttttcagaaatgcatcacatgtgggtaagaagagactacctgtacttcctttatacagcagtctctaaagcagttttgctatttggcaaatccattgatagaattttagtgaatttggctgggcacagtggttcannnnnnnnnnnnnnnnnnnnnnnnnnnnnnnnnnnnnnnnnnnnnnnnnnnnnnnnnnnnnnnnnnnnnnnnnnnnnnnnnnnnnnnnnnnnnnnnnnnnnnnnnnnnnnnnnnnnnnnnnnnnnnnnnnnnnnnnnnnnnnnnnnnnnnnnnnnnnnnnnnnnnnnnnnnnnnnnnnnnnnnnnnnnnnnnnnnnnnnnnnnnnnnnnnnnnnnnnnnnnnnnnnnnnnnnnnnnnnnnnnnnnnnnnnnnnnnntctgtctcnnnnnnnnnnngaattttagtgaattattgcttaagtaattagtacctttaagataccaccaacctgaggaaatggaataataatagaatcatcataatcagaggagtaaacnnnnnnnnnnnnnnnnnnnnnnnnnnnnnnnnnnnnnnnnnnncctgataataactttatcatgcccattttacagataggccataaagacattaaatggccttccgagattgcacagctggtcaatggtggatgtgggattttcaggcaggatttcaagtctgggctgtacactgcccccgtgatgctacagtgcctctctaaggaagtgaaaaatctggaccctggactcagtgctccttgaaggaaaccaaaatagccaa

SEQ ID NO: 243013 - DNA, 2177 bp, Homo Sapiens
aaaatcagatctctcagctagactgctggtcaagtaacaaggtgggtcacttttcttgactatgcttttctagtccactatcagtattcactcagctggggctcaaaaggacaaataggtgtccttttaagacactttgactacttggatcaatacactagctattctcaaaccaacataatgcatgaatacagcagccaagtagaaggatctccaatgctcaagtcactctgagtctttgctggtgtcaacctacaatgccaccctcaaggaaagcacagtggttcacagacagggatgattcatcattttcctctgaaaatgaattctgcaggaagaaaccagagttgtggtaagatgttggagtcaagttttctcttcatctgatattcaagggttgtgatctttatgaataccattttacatgctaatcacaaagacaaatggagggaagatacagtgataacaccaagttggacattcaaatgctaagggagccaagtaccagccctaccctgcttatttttaataatgcagagattacttactacactttctgaagccttattttgaaatttatttcacatttcagacatgtccataatttactgttgaggaaataaaacagcatgtagaacataattctatttatattaaaattacataggtatgtgtgtatacatacatgacagttcttttctccttctgagtatggtagggttgtagatgatttttactttttatttatacttcttaatgttctaactgcttacagtgtcacttttgttataatcataaaatgaagctcttttcattttagaggaaaaagagaaaaaaggctctatagattctgaaggcagttccaagtaagtctctcaaatgctcttacgagactactttgcaggtcaaaatcccagaaaaatgtaaaatcttgtgatcagagaaaatggctttgctcactactctagctcggttagcagagtacgcagcaccttggcaggtgtgacacacacactctgaatgaagaaatgcggctgacttggatgttgagtttctagagatttcagttttaaaatcattgttttatgatcctttttattctagttagctgaggatattttcaaatttttgtcaaaattcagtacattttagaggaaagtttaaaattagcaacaggattcaaactaccatgttttataacatggcttttaagaaacgatgaaccaaaacagaaaaatgggcaaagtggggactaaaaacggcttgctggccaaatagctggtagcagaagaggggatcagctgacaaagagggcacaagaaaataaccctcctgtttttcatctgtttcccagacagctcgactatagctaagaagggacatgtctgactgtctcctgtacccagcacagtgttgccaccttgacaggtgggcaaaggactcagcaaaagaaagtgagggaaggaggggcctggcctctgctctgagttactaagggtggcagaagccaccctgactgtgactctcaaatcaaaggacaagaaatggattgttctagctcttgtcctggaacagaggtcggaatgattccttcttcaatgtgatttgtggcataactatgaaagtaatcacatactaatttccattaataaccaaagacaaatgtcctgagttgtaagataaaaaactagtgactatttatctcctttggatgagacttagatcaaggcaggaaccaacatttttctttaaaaaaattcaatttcttacatttttagaagtaaagcaaataatataactagagtaattatgtattttattgtccaaactgggatattttttagagtaaaagggagtactatattctaggggaaaaaactatgccaagacaacagacatgaacaggactgtcctgaacaaatggatacctgatgctaacacaagctccattttaatgttttattttttcaagttctctattaaactacataacatttggcagcaatttcacattgaacactgagttgtaacagcacagttttgttcttgagaagacatattttctaagtgatgaaatgaactttctaccttccccatacttaaggtttcctagcataagttcagtttaaaatgggcctgaggaaacagtctgttttaatttctctaacagaacccaa

SEQ ID NO: 243014 - DNA, 1483 bp, Homo Sapiens
ttgggtcatccttaggttttgatctgcctttgctgtgagatgactagcaccttttatacttatccagagacttggaggaggccttggagatgggggtggactggtccttaagagaagggtatgcctgggctgaagacaaggagcactgcgaggagtacggaaggatgctgcaggctgaccccaataaagtttctgcaagggcgaagaaaagaggccttcctcagttggggaccctgggagcaggcaaccattatgcagaaatccaggttgtggatgagattttcaatgagtatgctgctaaaaaaatgggcatcgaccataagggacaggtgtgtgtgatgatccacagtggaagcagaggcttgggccaccaagtagccacagatgcgctggtagctatggagaaggccatgaagagagacaagattatagtcaatgatcggcagttggcttgtgctcgaatcgcttccccagagggtcaagactatctgaagggaatggcagctgctgggaactatgcctgggtcaaccgctcttccatgaccttcttaacccgtcaggctttcgccaaggtcttcaacacaacccctgatgacttggacctacatgtgatctatgatgtttctcacaacattgccaaagtggagcagcatgtggtggacggaaaggaacggacactgttagtacacaggaagggatccacccgcgctttccctcctcaccatcccctcattgctgttgattaccaactcactggacagccagtgctcattggtggcaccatgggaacctgtagttatgttcttactggcactgaacagggcatgactgagacctttggaacaacctgtcatggagcgggccgtgcattgtcccgagcaaaatctcgacgtaatttagatttccaggatgtcttagacaaattggcagatatgggaattgcgatccgtgttgcctcacccaaactggttatggaagaggctcctgagtcctataagaatgtgacagatgtggtaaatacctgccatgatgctggaatcagcaagaaagccattaaactgagaccaattgctgtgatcaaaggatagaaccttggacagcagggctgcctgacaccaccaaccctctctgaagtggaagtggactgacatgctcttctgacatcagactcaaggcgggacaagttgcaaagtgtgcagctgtaactgctcacgccaaaatggctgatggggaggctgctgctttcaggggcccgtgcttgtaaaataaccttccaggaagaggcacattgctccacctttggaaagggaggaatatgcccttctccttggttgttccacagagttttaggaaaatctgttagggatgggtagatgtcaaactgccttacgcagtcatactgatctttagccatcagattgatcttcttcacaccaagctctgtttacattccgagaggtgtcatgaagaaagttctgttcat

SEQ ID NO: 243015 - DNA, 1363 bp, Homo Sapiens
ttggcaataactcagatattttttatttaatttcctattttcacataagttatatttaagggaggagggaattttttttaaacaagcttaggtcctttcccgagctgcattttctaagttgggtcatcgtgtcggctggttgtctgacgagcatcgttacaaacaccatgatgaggggtttggggttttattttgatgtcttttcttttggtcggaagtgagtgaaggagccaggtcgccctgaaggttttccaaagggcttggctccagagccacctggcagactgcccgtggccctgctgtcgggccccaggccgttgtcctgctctgaccacagagttttaatgttttggttttcacttcttttaaactggacaacaaatccagcatttcaagtgccagaagtataactttctaaggagagaagggttgtcacattataaaatctttaggaaaatgtgaactggaaaacgcttcggtcagttttagtgacatagcctgtgatgatgggtctggtgactattattgcggaccgtggtacccagttttaggaatgtggagaaaggaattctgttgattccgttgaggaatctgtagcgtatgcattcgttctgttaagagcaaatctaggagaagtgcttcagctgcccagtgcgccgtggggagtgttttaacggatcgtgtcgcaggagagcacagcccagcgttggggccgggaccgctggcgcccgacgtcggaagcatacaggtatactatgcaagtgtattctgccacaacaaccactgtctttgttacctttttttgaacaagaatatatccatcctgcctaaccctgagtttttggagcaccacagttgtcctgggagttggttgcatcttgtaggccatctgacttcctgtttttaaaacgggggtctggtcttgctaaacactacaggtaggttggtctttgaagtccactagtggagaatgtcaagacaagatacttattaccatgacatctgatgcatgtgcagcagtggggagttctagattgatctctgaatgtgatcgacgcccagcaaggacaagctttaaaatgtctgcggtctgcccttttgaagcaggactggctcactctgtcattgggagctgtcagctgcgactgcaggttctctaggaggcattccagaatagagtagcacactgtgtctgcagttctcgatgaccgaaagttatccaaaatatttaaaatatttaaattgtgaacctattgataaagaatattataaaaactgatctgtaggcctgtactaatctcctacgcatagcaatattgactgtaacccactttaaggaaaaccactacgggtctggcagtgc

SEQ ID NO: 243016 - DNA, 939 bp, Homo Sapiens
ttgggtcagcgcccgtgtcaccgccacgtcgcggacatggtgatttcagaaagtatggatatactcttcagaataagaggaggccttgatttggcttttcagctagctactcctaatgaaatttttctcaagaaggcactgaaacatgtgttgagtgacctgtcaactaagctgtcttcaaacgcccttgtgttcagaatttgccacagttcagtgtatatatggcctagcagtgacataaacaccattcctggagaactgactgatgcttctgcttgtaagaacatactgcgctttattcaatttgagccagaagaagatataaaaagaaaattcatgagaaagaaggacaaaaagttatcagacatgcatcaaatagtaaatatagatcttatgctggaaatgtcaacctccctggcagctgtaacgcccatcattgaaagggaaagcggaggacaccattatgttaatatgactttacctgtcgatgcagttatatctgttgctccagaagaaacatggggaaaagttcgtaaactcctggttgatgcaattcataatcaactaactgacatggaaaaatgtattttgaaatatatgaaaggaacatctattgtggtccctgaaccactgcactttttattaccagggaaaaaaaatcttgtaacaatttcatatccttcaggaataccagatggccagctgcaggcctataggaaggagttacatgatcttttcaatctgcctcacgacagaccctatttcaaaaggtctaatgcttatcactttccagatgagccatacaaagatggttacattagaaatccacatacttaccttaatccacctaacatggagactggtatgatttatgtggtccagggcatatatggctatcatcattatatgcagggatcgcatagatgacatgggctgggg

SEQ ID NO: 243017 - DNA, 1257 bp, Homo Sapiens
actttgtacaaaaaagttggcatggcctccctcagcctctcttggtttgggcaggcatggcctcctcttctctccagtccccacccagactgctctcctcctctgtcccctgcgatcttcagccaacccgcatgctgaaaggggtgccgacctgggccctggggggaggcatggagggaggggtccccagtggcttggcctgaagaaggttgacgtctgccgtggcccagagctgagtcaccgaccttgcgtctgtcctgtgcagctgccaaggctgtcagctttcctcagcaacatgaagtctcggtaagggttcttctgtgtctagctgccggcccctgcctgtcctgatccgagtctgggtctgggtagtttctgacaggaaaggacttgagggaagtagcctctgaggctggaagtggcccaggcaggggggcaacctttgtggccttcagatgggactttgaagttgtcttggcaaggtccagttctggctggagagcaaaggcctgagggggacaagaggatgggggagttggaggggaggaggttgacctggctggggcatgagtggaaaggaccaggaagtgggggttggcctgggccaagggtggggcacccgggagagatgccactgttagagatctgagctgacctgagctgcgccaggccctacttgccccttagtggctggggctggaaaagcagggcgtaaacctccctgtttcatgccctgacgtcccatggactcactccttcccttaccaccaggcttcaggactggcagcagctatggcctctcccgtgtcctgagggtagcgaggaatcgggcctgggctagtcctggctctgctgtggagtcaccaagtgccagcctgtgcccctctggggcctgattttctcatccagacagtaggggtttgaacttccctctcagagctcccatggggttgtgaagggtccacggaggggtgagatctagagggttggcagtaggggtctgatgttgctgatctccgtggctgtgaccatcatggctggtgaccacactccttctgcccagttcggctggaaaactctgggaactgcagcacgagatcgaggtgaggccagagcctctggattggagcagggtggtggggggagggtggagttggacagggtacccgctagcagtgtctcgtgggcactgccccccaggggctcccagactggcctgtcatcccccttccactccctggaccaccacttgggccc

SEQ ID NO: 243018 - DNA, 1333 bp, Homo Sapiens
  misc_feature (255)..(282): n is a, c, g, or t
  misc_feature (304)..(348): n is a, c, g, or t
  misc_feature (599)..(701): n is a, c, g, or t
agttttcttctgtggaagaaaatgggtgaaacatatgtttacttatattttttaaacatatagcactgagatatgaaagcagttacctctaggtgctaggagaatggggcaggtgtatccagagtgagaacaaaaattttctatatacaatgtttggaagatccaggtgatttgtttttccttttgtgtgtggtaaaatatatatagcataaaatttaccattttaatcatttataagttgcagtccagtggcannnnnnnnnnnnnnnnnnnnnnnnnnnngagacagcctgggcaacagagnnnnnnnnnnnnnnnnnnnnnnnnnnnnnnnnnnnnnnnnnnnnnactgccttagtatacttaaactatcttttcatctatcatattgttaaggattttttttaaatttgacaacatccagtgtcaatgagggtgagggcaaaaaaaggactaccttggtgagaatgtaagttgtttaatcctttgggagggttaagctgtagatatctaaattttaaatatatatttatcctcttccatgttaagaaccctaagaaataactggacgagtgtggtatgatgtttgcatgtgatannnnnnnnnnnnnnnnnnnnnnnnnnnnnnnnnnnnnnnnnnnnnnnnnnnnnnnnnnnnnnnnnnnnnnnnnnnnnnnnnnnnnnnnnnnnnnnnnnnnnnnctaaatctatattctattatttacataagaaaattattttggtaaagtaagtaagtcaaaaacacagattacaaaataatatgtactgtataaaattatataactcaagtcaagtgaatggttcagcaaaatagtgtttctctgaatgatgaatttgggggtgatttttacttgcttatactttagtgtccaaattttctacagtgactataaatttcattttaaaactaaaaagttcttacatttggggaaatgcagtgaattcccacatcatgttttaaattactcagccactaaaaatgaatgtgcatggcgtcattaacataatcattgcctgaaccgtatttttcacactatgtactctaggttcctggaggtgaaaggaatctggacttagagttcttggctacctctggctgcccccgaattagaacagcccatgggggtatgtgtattgggagtggaggagtggacgggtagattgactttttctcagcatcaatctgttacaagttcatggtttctatggggccagatgcatgagaggtcaaagcatgggcaatagggttaactgaacgagttgaatgctagaagtcctcaggggagccaacgttccttgtaaagtgtgtaga

SEQ ID NO: 243019 - DNA, 686 bp, Homo Sapiens
  misc_feature (317)..(370): n is a, c, g, or t
  misc_feature (372)..(382): n is a, c, g, or t
ttggatacgtttaaaatctgtaatattttcctaagcaaaattatttaaaatgacttaattgtatgctaatactcaactgataataattgcttcttaaagttgacatttaactgctatcacaaagttttatatgtagaaaagtggggtccttttgaataaaagatcattcaactaaaaatattaaaatttatttcactggatggtaatgtaaccttaaaagcatcataataggtaaagtctaatattagttcccttaacaaaatcctaactgtataccagaattaggtcactgaaagaacttgatttgaattacgttnnnnnnnnnnnnnnnnnnnnnnnnnnnnnnnnnnnnnnnnnnnnnnnnnnnnnncnnnnnnnnnnncccactgttaccagtgtaggaagttacaagaaggcacatactgaatgctgaagtatacatatgctatttctcttaaacctcagagcaaccatatgagcattgtaattaatattcccattttacagatgaggaaactgaagctaagagaagctaagtaatatgcccaaggtccacatctagtaacagacaaagctgggatttcagtctatgtctgcctctctccacatctctttcatccataccacactgcctacatgccatatgacaggatgtgtaatgggctaacgtttatttaaaaagttca

SEQ ID NO: 243020 - DNA, 1279 bp, Homo Sapiens
ttggctcgcaggccccgagaactgtcgcccttccacgatgtggctccgtgcctttatcctggccactctctctgcttccgcggcttgggggcatccgtcctcgccacctgtggtggacaccgtgcatggcaaagtgctggggaagttcgtcagcttagaaggatttgcacagcctgtggccattttcctgggaatcccttttgccaagccgcctcttggacccctgaggtttactccaccgcagcctgcagaaccatggagctttgtgaagaatgccacctcgtaccctcctatgtgcacccaagatcccaaggcggggcagttactctcagagctatttacaaaccgaaaggagaacattcctctcaagctttctgaagactgtctttacctcaatatttacactcctgctgacttgaccaagaaaaacaggctgccggtgatggtgtggatccacggaggggggctgatggtgggtgcggcatcaacctatgatgggctggcccttgctgcccatgaaaacgtggtggtggtgaccattcaatatcgcctgggcatctggggattcttcagcacaggggatgaacacagccgggggaactggggtcacctggaccaggtggctgccctgcgctgggtccaggacaacattgccagctttggagggaacccaggctctgtgaccatctttggagagtcagcgggaggagaaagtgtctctgttcttgttttgtctccattggccaagaacctcttccaccgggccatttctgagagtggcgtggccctcacttctgttctggtgaagaaaggtgatgtcaagcccttggctgagcaaattgctatcactgctgggtgcaaaaccaccacctctgctgtcatggttcactgcctgcgacagaagacggaagaggagctcttggagacgacattgaaaatgaaattcttatctctggacttacagggagaccccagagagagtcaaccccttctgggcactgtgattgatgggatgctgctgctgaaaacacctgaagagcttcaagctgaaaggaatttccacactgtcccctacatggtcggaattaacaagcaggagtttggctggttgattccaatgcagttgatgagctatccactctccgaagggcaactggaccagaagacagccatgtcactcctgtggaagtcctatctctcttgtttgcattgctaaggaactgattccagaagccactgagaaatacttaggaggaacagacgacactgtcaaaagaaa

SEQ ID NO: 243021 - DNA, 1258 bp, Homo Sapiens
ttggcttttgctcaggagcaagcccactgtggatatagttaaccaggctggagaaactgccctagacatagcaaagagactaaaagctacccagtgtgaagatctgctttcccaggctaaatctggaaagttcaatccacacgtccacgtagaatatgagtggaatcttcgacaggaggagatagatgagagcgatgatgatctggatgacaaaccaagccctgtcaagaaagagcgctcacccagacctcagagcttctgccactcctccagcatctccccccaggacaagctggcactgccaggattcagcactccaagggacaaacagcggctctcctatggagccttcaccaaccagatcttcgtttccacaagcacagactcgcccacatcaccaaccacggaggctccccctctgcctcctaggaacgccgggaaaggtccaactggcccaccttcaacactccctctaagcacccagacctctagtggcagctccaccctatccaagaagaggcctcctcccccaccacccggacacaagagaaccctatccgaccctcccagcccactacctcatgggcccccaaacaaaggcgcagttccttggggtaacgatgggggtccatcctcttcaagtaagactacaaacaagtttgagggactatcccagcagtcgagcaccagttctgcaaagactgcccttggcccaagagttcttcctaaactacctcagaaagtggcactaaggaaaacagatcatctctccctagacaaagccaccatcccgcccgaaatctttcagaaatcatcacagttggcagagttgccacaaaagccaccacctggagacctgcccccaaagcccacagaactggcccccaagccccaaattggagatttgccgcctaagccaggagaactgccccccaaacccagctgggggacctgccacccaaaccccaactctcagacttacctcccaaaccacagatgaaggacctgccccccaaaccacagctgggagacctgctagcaaaatcccagactggagatgtctcacccaaggctcagcaactctctgaggtcacactgaagtcacactcattggatctatcctcaaatgtgcagtccagagacgctcatccaaaagcaagcatctgaagactccaacgacctcacgcctactctgccagagacgcccgtaccactgctcagaaaaatcaatacggggaaaaataaagtgaggcgagtg

SEQ ID NO: 243022 - DNA, 2051 bp, Homo Sapiens
cacatacagtctttgttttaatgtttattggtagaaacagatcttcaatgcatactttgtgtttatataaactctacattctcttaaaggttttcgttttgttttcactggagatttttagcctccaagtgaacttaacatattgcctatgcatctgattctttatagacttttagattttaaagctaaatttgagaaaccatgcatactgtataccttatttaataatccaaagaattgtttgcactttcaaaaaagttacaaaaaggctgaacacaagttaaataacctatatgatgtaaattttccatttctgaatactttttcagtattatatattgcttgctgtctaataagttagattgtcagagacgcttcagtaaattatctctactttaaaattatatctgaatcccctttctctgagatgaacttgccaatattaaacattgtgccatatgcagtattagcccaaaagcttaaataagaaccaaacttgtagactgaatattttaaccttaaaattatatacctatatatacacctatggtatgctgcatattaaatttaacatttcaagtaacatatatatagcaaacattcagccaaatactctttcatgaaaagatactgtccttaaaataaaaagttaatgaaaagcttatttagacacaaatgtctagatataagtactaagcctatgaaacttgaagctaaagtctgctgtactattaagaaaaagaagattgattcttaacctactgaattgtgcagatacaaaagtgcttagcatgacaaaattaccaaaataaaaacattttagaggttatttggttctagcaatattaactattctgtatttctggataatttaacatttgtattttaaattttatataaatttctttttaacaagtttaaaaaagcacacgaaaaatagttcaaactatatataatctgttatttttcatcctggttagctaatcacaaataactcagcaaaacaatgcttgaacattcagttctactaaaaaacagtatttgagtagatcccatcaccttacccattgtttgctatgttagaccctaaaacaggctgccgacagatcggacaagtgcaattctctgagagccatcggtcaatacaatgaatgtgaaattcatgcatgcaaggtaattgcctgagcttgtttccagttacatagtcactaatacaaacactacagattttacctagttcactatcaatactgttatgctcatagtgcctggtggaaagattgtcaatctgctctttggttaaaccacgtattcgatcatcatcatcactttcatttagtaaaaaaaagtgagcaaggcgaagaatgggtagtgttccagtttcaactaaattgtttggatttcgcaactgcctgccacccctactgtcactgtttcgagtatgaggctgggtggtctcgttttcaccatgcatttcagtgctgtctccttgggcctgcctgtcttgagaggaaccttccctgtgctggctcctgttgttatctgtacctaagttactcagttctgagtgcatgtctggtaaatgctggccatttctttgaagttctgactcagaatcggcctccattagagaactcagttctccaaacccagtcatgatctgccttaaaattgaccgaagagccactgatgatggctcaacaagctcattctcagaaatcctacgaagaggaactgttatggtactaacataggttcgaatacctgaccgctctaaacgagaaatggttcggcgaaagcccccactattgctttcaatagtgactgtattttctgctagccctactctggatcgagttctatttgcaatactatcccgatctctattttctccaggacggatccttctcacttgaaggtccagtgtgattgttggatgtcgtcgtacagcagttgaggatctgctggattcttctccttcttctactgttattcttgacacaagccttgaattttgtacaaagttggccattataaggaaagcattgctc

SEQ ID NO: 243023 - DNA, 973 bp, Homo Sapiens
tgggtgtttttctatcccctcccaaaggcctggtctggtgcagcgattccggccggacttcaaacgcaagtttgcagacttctttgaagatgataccatatcagagtatatttaccactgcaacgcacagaatcccagtggtgagacagcattcaaagccatgatggagtcctttggctgggcccggcgccctatgctggagcgaattcacttgattcgaaaagatgtgcctatcactatgatctacgggtccgacacctggatagataccagtacgggaaaaaaggtgaagatgcagcggccggattcctatgtccgagacatggaaattaagggtgcctcccaccatgtctatgctgaccagccacacatcttcaatgctgtggtggaggagatctgcgactcagttgattgagctgctctctgaagaggaagaggagaaagccagagagtcactcttacctccctgtctgcttactcacccactctgtcctttcctcaccaactaacatgtgccagccaggcagagtcttgtgctgttcccaaaacaggacgacagtgaaaagaacactcttgaccctacactgaaggctgaaggcagaagccacaaaaggccttgagtgccacccccagggaagaacataaagggttgcacaatgccacccatccactccttgccaagtgttacccagatggtggaggatgtgaagggattgcaccaagccacattcactctctctgtggcctttcttcctctgggcaaagaagggcttccagtggcctttcctcactctgtagtgtttgtggggataggttccatgcaagaacaccttcctcctccatcccccacttcaccccatcccataccagttccatccagggtctgcttaactgccaagagcaaggtccttgagttctcttcacctgcagagtccttttcatgacctaggagtcttattcaagccctcattga

SEQ ID NO: 243024 - DNA, 364 bp, Homo Sapiens
tcattctaaatcaaagcactttacgtgttccccaaaggaagtgacagataaagcccttgaactggcaacggaagaactagaagtaggcttttgctcttcggtaggcccagaagattatgaccactgagttgggctggtttcaggccaatgtagaaaggaagcagcaggcctcacactggagtcctccagcacagggagctggtccgctctggatgctgcccataggcggtctttttcagataaaatacatcagtcccctggatttaggtgccccagaatgttctcaaaaactgttcttatatcttattaaagtaaaaattacagtgaaatacagtaaacagatgttaaaggtacaatctaacat

SEQ ID NO: 243025 - DNA, 988 bp, Homo Sapiens
ttggcatcttctgtacaacagatcagctggaagcagagatccaaagctgtcttgatttcctccgttccgtctatgccgttcttggcttctccttccgcctggcactgtccacccggccatctggcttcctgggggacccttgcctttgggaccaggccgaacaggtccttaaacaggccctgaaggaatttggagaaccctgggacctcaactctggagatggtgccttctatggacctaagattgacgtgcacctccacgatgccctgggccggccacatcagtgtgggacaattcagcttgacttccaactgcccctgagatttgacctccagtataaggggcaggcgggtgccctggagcgtccagtcctcattcaccgagcagtgctcggttctgtggaaagactgttgggagtgctggcagaaagctgcggggggaaatggccactgtggctgtccccgttccaggtggtggtcatccctgtggggagtgagcaagaggaatacgccaaagaggcacagcagagcctgcgggctgcaggactggtcagtgacctggatgcagactctggactgaccctcagccggagaatccgccgggcccagcttgcccactacaattttcagtttgtggttggccagaaagagcaaagtaagagaacagtgaacattcggactcgagataatcgtcgccttggggagtgggacttgcctgaggctgtgcagcgactggtggagctacagaacacgagggtcccaaatgccgaagaaattttctgagcctttgtacatagatgaggcaaaaacctgcgagtgccatcagcctccctcacatgggagaccccaacccagctgacaatgtggagcccccagaacttcagaactgtgtggaggcacatgtctgctctcctgaaaagagacttggtttggggactccacaaaaggagggaagctgtagctgtttggatgtgaggagaatgaactac

SEQ ID NO: 243026 - DNA, 883 bp, Homo Sapiens
ctttgtacaaaaaagttggctcatggctctctcaaagcaccgtggaatcaaccaagccctcggagctttgcctgacaagggggatctgatgcacgacccagcaatggatgaagagctggaacggctgctggcccaggtcccaggcctggtcaactcggtcacagccagtccagaggccagttgcctgccttcccggacccctccccgggttggctctccctggagacctctccatcattcccgaaaagtggatggagagagtgatggctccactgaagagacagacgagtcggagacttgaggagtccaaagggtcctgcccacagcgccctgtacctgctcccacccagcccttggtgtgcccacccagcctcctctccagcaccttgctgtgctgccctctgctgctgacaaggtgaataacagccccaagaccagccagaggggctctgatgatcagcccagccagtggccccggaaggtgaatggcctgctctccctggccctatcagcctgtgaacttcacttaggccccaagctgacagactgtgctgaggccaccttgtcacgccgtagcctgttagtcctcctaacctcttaagagcagtctcttctgagccagcctctgcgggtcccccaataaggttcatctcctcacagcaactccattaagggggagaacccgaatagccacgcagggccttgcaccatcaagggtgacacctgcgacgcaagtaccaggaggacataaccgctgtggcctgttggagaacagccagtagccttggtaatatgaagggtgggccagaagatgatttcacttgcaaaaactgcttcaagtcttgacccctttgtgtctaatagctaaacaaacatgtgaaac

SEQ ID NO: 243027 - DNA, 807 bp, Homo Sapiens
tttgtacaaaaaagttggcttgtgttccccttaaagtatctgattcctctgctgtccctgccaggagctgaagggtgggaacaacaaaggcaatggtgaaaagagattaggaaccccccagcctgtttccattctctgcccagcagtctcttaccttccctgatctttgcagggtggtccgtgtaaatagtataaattctccaaattatcctctaattataaatgtaagcttatttccttagatcattatccagagactgccagaaggtgggtaggatgacctggggtttcaattgacttctgttccttgcttttagttttgatagattggaagacctgcagtgcacggtttcttccaggctgaggtacctggatcttgggttcttcactgcagggacccagacaagtggatctgcttgccagagtcctttttgcccctccctgccacctccccgtgtttccaagtcagctttcctgcaagaagaaatcctggttaaaaaagtcttttgtattgggtcaggagttgaatttggggtgggaggatggatgcaactgaagcagagtgtgggtgcccagatgtgcgctattagatgtttctctgataatgtccccaatcataccagggagactggcattgacgagaactcaggtggaggcttgagaaggccgaaagggcccctgacctgcctggcttccttagcttgcccctcagctttgcaaagagccaccctaggccccagctgaccgcatgggtgtgagccagcttgagaacactaactactcaataaaagcgaaggtggacatgcc

SEQ ID NO: 243028 - DNA, 1180 bp, Homo Sapiens
  misc_feature (797)..(805): n is a, c, g, or t
ttgggtcattgttggtacatacaatgtcgtggttgtgattgtgcttaccaaactgctggtggcaatgcttcataaaagctttcagttgatagcaaatcatgaagacaaagaatggaagtttgctcgagcaaaattatggcttagctactttgatgacaaatgtacgttacctccacctttcaacatcattccctcaccaaagactatctgctatatgattagtagcctcagtaagtggatttgctctcatacatcaaaaggcaaggtcaaacggcaaaacagtttaaaggaatggaggaatttgaaacagaagagagatgaaaactatcaaaaagtgatgtgctgcctagtgcatcgttacttgacttccatgagacagaagatgcaaagtacagatcaggcaactgtggaaaatctaaacgaactgcgccaagatctgtcaaaattccgaaatgaaataagggatttacttggctttcggacttctaaatatgctatgttttatccaagaaattaaccattttctaaatcatggagcgaataattttcaataacagatccaaaagactatattgcataacttgcaatgaaattaatgagatatatattgaaataaagaattatgtaaaagccattctttaaaatatttatagcataaatatatgttatgtaaagtgtgtatatagaattagttttttaaaccttctgttagtggctttttgcagaagcaaaacagattaagtagatagattttgttagcatgctgcttggttttcttacttagtgctttaaaatgnnnnnnnnnatgtttaagaggggcagttataaatggacacattgcccagaatgttttgtaaaatgaagaccagcaaatgtaggctgatctccttcacaggatacacttgaaatatagaagttatgttttaaatatctctgttttacgagttcacatatagttcagcatttattgtttaggagtataattttattttatctaaaataatagtctattttttcttttgtattttgttataatcttaagcaacaaagaaaaaaccctaatatttgaatctatttatgtctttcaatttaaattcacttcagtttttgttattgtaatatatttacttttacatggtataatcactttatattttaatgttttttcacttaatattta

SEQ ID NO: 243029 - DNA, 961 bp, Homo Sapiens
aagcaaataaccaacttatttgcccccaggctttttaaaatcattaactgaagataaaataatttgaaatttcgaaggtactaaaaaacaaaacaactccaaatgtaataaaaacacatcaagaaccaaactacaatttctgagctgcactgtttattttgctgcttgaaactaagtgacagtatgccactataattatggggtttcgtctaaacctttactacactgcaggtacagaaatatacggacacatttttagagaattgacattttgcaaaatgcagcaaacattttaatttatacatgagaaaaggaagtgttcaaaagggtatgcatttcaagttattgcaggttatttgtgagagaatttctgcaggtaaaacatgtttaaatttaaccaacagtagcgtgtcagtgtatttaaaatcatgacaaaaatcttctctctggtcatgttgcccatgacaaattactatgatgttgtacgtttagggcaagatgtcaatacagcataaatcccatggtattttggttttcttctggagattaaagctgtttttcttgggataaatgcagcagcaaaacacaaaccagttgatcaaaaaagcacttctgccataactccaataattttcaggacacatcaaccgacagtagttttgccattcccagttcttttaaggattacatctctgcactgttgccttaaggacgtctgtaaaagcttgttctctgttaagccagtttactgactacagcctggttgagagaatttagttggttggtccatttatctagtgcagtatatcgtgcaccacccctcttctgatgatccagttcaaggagttggttgacttgatcaattcggccatgaatagtgttatccaatatgcactgcaccagcaagctctccacatcagctacatctatgtttaactccttagaaataaaaggaatccaa

SEQ ID NO: 243030 - DNA, 980 bp, Homo Sapiens
ttggcaaaataggaggaaaaaatcagaaatctaactggcagaatgtaacctggtttcccttggggtgctttcatgatgatttccatagacttttttcacctaattttgtattttatataccacttttcagatcagtataaaacttttcccctttatttttattactgattttagagaaaactggtttctgaaatacgaatatcttgggctttacaaaaatcactagttttattttaaatattccattgcccctaaaaagttaaacaataacctcactgatttccaaggcttccaggaggctgatttgtaactgaaagggctgtgaatgatgtttatcagaatcaaatttgcgcgatttatcagacactaatgagttttagattatcataattgcttagtgaatttctgccatctaactaaaaaaaattctgtttatcaccagatcctagaaccctatcaatattgtctctgctgtgtaaatagttctgagtagtgcaatattgcttatagggttttggtgtttggaaagaacaatgggcaggctgcagaaagtatgtagcagaaacaagcaaaagtcatctttaggaagaaaacaaggaactagatttcactataaacattaaaatctgaggcttaaatgtaaatttttaatttattagaagaaggtaacttttctttttgacaaatgggtttatttgtagtataaagaaataatggaattttagtattgaaaaggatcttagattccaactcatttgataggagagacccaaagaaatgagggacttaacctagggacacatagctggttagtgatactaggactagaatttctaccatgtatccgaattcttttatttttctgtaccatactaccatgttgtgttcagagggaatttttagttgactagctttgtaactttagtgatattaatttaaaacataaaaaaactttaattttaggtgaagaatgtacattt

SEQ ID NO: 243031 - DNA, 448 bp, Homo Sapiens
ttggcgcctgccgccccggggactcgcaccccccacaacaccacgtcatcgaattctcaaacgacacctggagactgtcccgacacagcgacgctcccctgagaggtttctggggcccgctgcgtgccatcactcaaccataacacttgatgccgtttctttcaatatttatttccagagtccggaggcagcagacacgccctcttacgtagggacttaatgggccggtcggggagggggaggcgggatgggacacccaacactttttccatttcttcagagggaaactcagatgtccaaactaattttaacaaacgcattaagaggtttatttgggtacatggcccgcagtggcttttgccccataaaggggaaaggaacacgcgggtagatgatttctagcacgcaggaagtcctgtgcgatgccaccatgagcacctccagctgt

SEQ ID NO: 243032 - DNA, 1254 bp, Homo Sapiens
  misc_feature (392)..(418): n is a, c, g, or t
ttggctctgtgacgacccccaggccagcttggtgcccgagcctgtccccggtggctgccaggagcctgaggagatgagctggccgccatcgggggagattgccagcccaccagagctgccaagcagcccacctcctgggcttcccgaagtggccccagatgcaacctccactggcctccctgatacccccgcagctccagaaaccagcaccaactacccagtggagtgcaccgaggggtctgcaggcccccagtctctccccttgcctattctggagccggtcaaaaacccctgctctgtcaaagaccagacgccactccaactttctgtagaagataccacctctccaaataccaagccgtgcccacctactcccaccaccccagaaacannnnnnnnnnnnnnnnnnnnnnnnnnntcatctactccttgttcagctcacctgaccccctcctccctgttcccttcctccctggaatcatcatcggaacagaaattctataactttgtgatcctccacgccagggcagacgaacacatcgccctgcgggttcgggagaagctggaggcccttggcgtgcccgacggggccaccttctgcgaggatttccaggtgccggggcgcggggagctgagctgcctgcaggacgccatagaccactcagctttcatcatcctacttctcacctccaacttcgactgtcgcctgagcctgcaccaggtgaaccaagccatgatgagcaacctcacgcgacaggggtcgccagactgtgtcatccccttcctgcccctggagagctccccggcccagctcagctccgacacggccagcctgctctccgggctggtgcggctggacgaacactcccagatcttcgccaggaaggtggccaacaccttcaagccccacaggcttcaggcccgaaaggccatgtggaggaaggaacaggacacccgagccctgcgggaacagagccaacacctggacggtgagcggatgcaggcggcggcactgaacgcagcctactcagcctacctccagagctacttgtcctaccaggcacagatggagcagctccaggtggcttttgggagccacatgtcatttgggactggggcgccctatggggctcgaatgccctttgggggccaggtgcccctgggagccccgccaccctttcccacttggccggggtgcccgcagccgccacccctgcacgcatggcaagctggcaccccctccaccgccctccc

SEQ ID NO: 243033 - DNA, 1210 bp, Homo Sapiens
gaaaactttccagaaaaatgcacacaggtttttttctaggagttttacagtttcttcatcctaccattaactgattccttactttaggacaatcctttttcatgttatagttgtacgaagtgaggcccataagcaaaagtcaaaagatgacaaagctgtgacaaatcattatcaaatttactgggaggcataaaatgcacttttgaagttggaaaacatcaataacttatatgctgaagctactctggctaatgataacaaaatgccagctactatgctgaaaaaaatgtggtgggaccactgcttttatttaaaagcattacattatttaaattcacttaggaagagtgtatacttcatacttgattagcttaattatctaacttttcatacaaattcaattttcgcacaaagaaatatgaactgggagaaaaaaaatatttaaagtcctgattttgaataactatgatattaaatgtataagtgaatttgatctaatagttcattagtattaatgacactgggggaagacaaaccctcaacattttcctaagactccaagactttaatgaaaagtataaattccccttatctgaaaataaacacgctttcctgttttaccatatttaactctaatagaaccaatattccaagacgtttcagttttttaccaaattgaagatttaaaaacataacctattagtttaaaaatattcacagagaacaaaatcttatcacctgtgccttcagactgtcaagtatctttctagcaactaaatcccatttgatgggatcctgaaaggtagacaaaggatcacagtcacttaagttacatcttttatggcaaggatgttgcattttgaattgcaattggcttactactatggttgtttttaagtcaaataattttcatgggtgaactacagggaaactttatactgtgttgtagggatttgcggttatagtaagattatctctgtaagaaatacaggaatctattttgaggacatgctaaaacacatcaatagctttttatttaaatagaaaaatcaaaactttaaagttatactttagaaataattcatggaagtaattaatgttttctacagattctaagattcttttgtgaaacatcagtagtatatatttgccagtatcaaatgcatactttaaagatttgccactgacttccatgtcaagtgattgccaa

SEQ ID NO: 243034 - DNA, 2671 bp, Homo Sapiens
  misc_feature (2505)..(2513): n is a, c, g, or t
ggtggcacaagattacaactacaaatttcaatgcccttccctcccacacagctcaaatggaaggaaactgattaacacatagaaaggaacggcaggctcacaggtttaagcatttgtttttacaaaaaggagtgggatatgggggtggtcaagttttacgggtaataacaacattctctctagatggcagggggtaagtctgcctgtcctccattgctggtaccacataagggatacattagtaaagtagggaaagggttatatgtgtggctggcctgttctttagagaggaaggtgggatggtatctgctgtgtacctgtctcagaccaaacctggggctggaccagtgccccttttttctcagccctcctccacagcctgactgtactgccagccgcacccatgagaaggaggtgtgaaggaagcctgaggacatccacctcgagaaaaggaaacaggaaaactatttccttccgccttctctggaccaaatttcactcccctcagctccagagagtgctgcaaaaatcttccttagggacgctgtgaagacacggggaagaggccagccctgagcgggcaagaagaaaagcttgaactttccatgcagtaccaagcaaggctattttggaaacaagcaaacaaacaaaaaatggaaaccaacaccatataaccacaggttgggtagctcctaaatcctggacagcatttggattgggggtaagggcaattttactccagctccttgttttataacccgcacaaggtgccaagaggtttaaggaccacaactgacctctctttccctacaagcaccattccttggattcccagttttgttgagctcatttgaggtcatccttgccatcctcttaaaaaatgacacagcctcttggttattccattttctatccctttctacaattatgaacacactctctaaacaggagatctatatatgctctcatcctgcaacccaagagattaggtgacctaatgatgagaaggctaacttatttgctttcctgggtggtcctgatggaaatgaacagcagcagagttctggtgggatagagcagtctagtctgagccactgtgtgattccccaggggactggtccctgggtacatgggtccctggctctctgtctcagttccacagatattactcaacttggccatttacgcctcagctaaaacatatgagcatgagggaaaagggacaagaaatacttttgtcctctagaaaaacttaactcaatacatcttggctactttgcctcaacccacggggttccctggaaacatttgttgaacttggccaagaggagattgtatatggatggcacacctggaaaaggggagaaagcacactagttcatctcttttataagtagaatggtcccagggatgttaacctttctgatgctgatagtagatgagtggagtggaggtaatcgtgagaaaacttaaaaacccttaagctgtttggagactacacaccacagtggagcaaaccaaggtggggcctcactgcctcctcagagcccatccctgaccatgtcattggataggatggaagacaaagtctttgaaatggaggctgggctggcaaaagtaagtatgaagatgctactactggccttccacttcctctctctgatacacctaagaaggtgagagacactagcttcaattccattttacaacagttctcaacaacctgaaatattcttgacttccttaagcacatggaaaactggtaagctatatctttctaactgaaattttacttattctaacccaaccttttctttgattatcaaccagtttgacagtcttcagatcacaaaacaacagaacagacctgacatttacaaaactgtactacatacttatttcttttacagtagagctgaccaattacttttctaactactaatgcaacaccatgccactgggccctggactctgatgtttctgatccctgagcaacacatctatgtccattcacagatggaaatgaaagagtgagattctcagaggctaaacaacattctggaagcaaattggatttttgaagggagagtcctcttagaaaattctgagcaaacatgctcccagtcacgagggatggggtgagcgggcaggtttctgtctgtgagctatagctcccttctgaactccctcatgttcttgggaggacacaagcctcttgctcattaagcaaaggccctccaagtctcctttttacttcagcactttggaaactctccaagacttaacttccgatctggggaggttctacgtggagcagacctatcccttcttattcctgttcctgggtgtctccataatcagcctctaccttccctggcataagtcatatctgttatgctgcaggaactgagtaaccaaagctagatatcccttggaccactgattagtgacacattttctccacaacaaagggaggttaaagacaaaggtttaacctgagaaacnnnnnnnnnggcaagataataaagaggttaaagaggctacgtggatctgtcactgctttagcttaccattttcaattcagcaccaaagtgctcagaaagacaggctcagatcaggacgacttcttaaagggattcacaggcaatattactggcaaaatgatttccaa

SEQ ID NO: 243035 - DNA, 1187 bp, Homo Sapiens
ttggggcagaaggcggagatgaagagccagccgtcagagacagagaggctgaccgacgactactgagggggcagccccccgcccccggcccacctggtgtgacttctttaagcggacccgctattatcagatcatgcccaagtaccacgcagtgcggatccgggaggaggagcgctacccacctccagggagcaccctgcccaccaagaagcactgggtgaccagctggcagactcgggaccaatactactgacgtcctccctgatcccaccccctcctcccccagtgtcccctttcttcctatttatcataagttatgcctctgacagtccacaggggccaccacctttggctggtagcagcaggctcaggcacatacacctcgtcaagagcatgcacatgctgtctggccctggggatcttcccacaggagggccagcgctgtggaccttacaacgccgagtgcactgcattcctgtgccctagatgcacgtggggcccactgctcgtggactgtgctggtgcatcacggatggtgcatgggctcgccgtgtctcagcctctgccagcgccaaaacaagccaaagagcctcccaccagagccgggaggaaaaggcccctgcaatgtggtgacacctccccctttcacactggatccatcttgagccacagtcactggattgactttgctgtcaaaactactgacagggagcagcccccgggccgctggctggtgggcccccaatgacacccatgccagagaggtggggatcctgcctaaggttgtctacgggggcacttggaggacctggcgtgctcagacccaacagcaaaggaactagaaagaaggacccagaacggcttgctttcctgcatctctgtgaagcctctctccttggccacagactgaactcgcagggagtgcagcaggaaggaacaaagacaggcaaacggcaacgtagcctgggctcactgtgctggggcacggcgggatcctccacagagaggaggggaccaattctggacagacagatgttgggaggatacagaggagatgccacttctcactcaccactaccagccagcctcagaaggctccagagagaccctgcaagaccacgggagggagcgacacttgaatgtagaataggcagggggccctgccccaccccatccagccagacccc

SEQ ID NO: 243036 - DNA, 1058 bp, Homo Sapiens
ttggccttggtaggcataaaaggggctgctttgcccaaactgcctatgaatttgcttcctaaagcatggggtgtgcctcaggaccttattaaaaagtacataaaacttgaagaggatggtggttgtgttattggaggtgacagaagtttgcaagataaatacttacttaggcttgttgctgctatggaagaagtctttatggacaaacatggtatccatcctagtttggttgctgatgtccatcagtatttctacagaaggactggagtgataggagttcagcctgaggaagtcacagcagctgctaaaaaagcagtaatggataatcgccttcacaaatgtttgctctgtggtgccctttctgaacttcatgttcctccagagtggttggctcctggagggaaattgtataacctggcaaaaagtactcatggacagctgaggactgacaaaaattacagctttcccttgaacaatttggtttgctcatatgattcagtgaaagatgttctggtaccagactatggaatgagtaacctaacagcttgtaattggtgccatggcacatctgtgcgaaaggtcagaggagatgggtctattgtgtatttggatggagacagaactaattctaggtccactggtggcaaatgtggttgtggattcaaacacttttgggatggtaaggagtatgacaatctaccagaagctttccctattactttagaatggggtggaagagtggtcagagaaacagtatattggttccagtatgaaagtgattcatctttgaatagtaatgtttacgatgttgcaatgaaacttgttaccaagcactttccaggtgaatttgggagtgaaatcctagttcagaaagttgtccacactatattgcatcagactgccaaaaagaatcccgatgattatactcctgtaaatatagatggtgctcacgcccaaagagttggagatgttcaaggacagaatcagagtctcagctcccaactaaaattattcttactggacagaaaacaaaaactttgcacaaggaggagttaaac

SEQ ID NO: 243037 - DNA, 710 bp, Homo Sapiens
ttgggtcacatctaggagcatctacccatggacagacatgtcttcccatggaggaggctttcgagctacccttggatgattgtgaagtgattgaaactgcagcagcgtccgaagtgattaaatatgagtatcatgtcttatattcctgtagctaccaagtgcctgtactttactttagggcaagctttttagatgggagacctttaactctgaaggacatatgggaaggagttcatgagtgctataagatgcgactgctacagggaccatgggacactattacgcaacaggaacatccaatacttgggcaacccttttttgtacttcatccctgcaagacgaatgaattcatgactcctgtattaaagaattctcagaaaatcaataagaatgtcaactatatcacatcatggctgagcattgtagggccagttgttgggctgaatctacctctgagttatgccaaagcaacgtctcaggatgaacgaaatgtccattaacaagattcttctattgagtttaggaattgcggcacgaagaatgccaagagtttacctggccagccctggctttaataggactgataccatggaatatttcatctcaccaagatgtgacatggattatttttcccttggacacaaatgtctacagcaactgatgtttgataggctgaatgtttagaagaaacacttcaaagggatacatca

SEQ ID NO: 243038 - DNA, 1831 bp, Homo Sapiens
  misc_feature (495)..(507): n is a, c, g, or t
  misc_feature (1538)..(1571): n is a, c, g, or t
gtaaaacaaaaggagcaccctaggatcaaaaaagtagacaactttggagcttagattaagatctcagaaatctaccatgagaatccagtgagataaagcaatgccaagtacactgtaagtagcaaaacagtatacaaagggatgcttctatattttcaccttgtttcattacactcattttaattgtgaggagccctgaatccaaaaagggtagtgacgactagtccagtgctccttccaccgtatcatgcggttctaaagtcattctggacatacaatctacaaaaatacatcatttttccagctcatgtccatggtccaaagtgatattatacacaagtgttatctgacaatataagaatgatctgggaatgtctgttcaaaacggtagtaaatttagtcttaaacacaatttcatttactgcgaccatacttaacatgcataaaatatttttaaaatacaaacttaaattggccagattctgaatgtgtacnnnnnnnnnnnnncaaaatgcactcatgaagaaccaaagttcatattccaaattaaatctgtatgtctggaaaagtaaccaatcaaagttcattaaaatatacagtgaaaaccggtataaattaggcaaacaccataatctaatgaatatcaggaaatttctgagtttctaaggattgtattaaaggtaactttttaaaaccttagaaatcttaagcacataaatgttataatgaagcatttgcaaatgactgctcaattacttttattctagctctaacatgaaattgcattttattaactcttcatagtgctgctattcttattttgatattaatctaactttcaagttagtaagctaatgataatgagctaacagattaataataaggaataagaaactaataatagcagataagttatggaaagaaaataaaaggccaatcacattgactaatgaagcccaaaagcatgattaactaagatttcttataatgcactgaataattcacagcataacataattcagatttgttacataccatataaaagctattagttgacatggctaaattcacctaagagccaacctaccttgtaactattaatttaatttaaagccttgctgtttactccatcatttctgccaaatgtagtccaaattgggtctcagcatattcaagaaatcaagccacagaaatgtgtacttgtattgctaggctccctgcaatattaaagattttgctttctctgaagatattctgaaccatgatcatctttaaggcacttcaaatacatttctgaccactaaatttaagtagatactaattaattactgccatattaacaattcatcacgtaagccacaggaggcaagagtctcataaggaattgccttcacaaccacagagattccagaggtgatctgaatgaaacacgcaccaatggccagatccaaaaggaaaactacctagacttcctcagataaaagtcaggatctttaggaattaaaacaggaagggacactataaaggaaaagtgaggnnnnnnnnnnnnnnnnnnnnnnnnnnnnnnnnnngagcttcttggtcaaataatttcaaggtacatgctaataaaaactacaaatcagatttttgcctttagtgaaggtgcctaaaaagccagatgatctatgactttgtggtgaaacagcaaagataaagatttaatgttcctgttatttttataattaaatgcaatgctgaggaaatggtaacttgcaccgcattgggggacattagatcaaacaagtctatgccccatggtttaatgctcctccaacttttttgtacaaag

SEQ ID NO: 243039 - DNA, 1345 bp, Homo Sapiens
  misc_feature (1031)..(1088): n is a, c, g, or t
ttgggggagttcggagacgtgatgctgggcgattaccgagggaacaaagtcgccgtcaagtgcattaagaacgacgccactgcccaggccttcctggctgaagcctcagtcatgacgcaactgcggcatagcaacctggtgcagctcctgggcgtgatcgtggaggagaagggcgggctctacatcgtcactgagtacatggccaaggggagccttgtggactacctgcggtctaggggtcggtcagtgctgggcggagactgtctcctcaagttctcgctagatgtctgcgaggccatggaatacctggagggcaacaatttcgtgcatcgagacctggctgcccgcaatgtgctggtgtctgaggacaacgtggccaaggtcagcgactttggtctcaccaaggaggcgtccagcacccaggacacgggcaagctgccagtcaagtggacagcccctgaggccctgagagagaagaaattctccactaagtctgacgtgtggagtttcggaatccttctctgggaaatctactcctttgggcgagtgccttatccaagaattcccctgaaggacgtcgtccctcgggtggagaagggctacaagatggatgcccccgacggctgcccgcccgcagtctatgaagtcatgaagaactgctggcacctggacgccgccatgcggccctccttcctacagctccgagagcagcttgagcacatcaaaacccacgagctgcacctgtgacggctggcctccgcctgggtcatgggcctgtggggactgaacctggaagatcatggacctggtgcccctgctcactgggcccgagcctgaactgagccccagcgggctggcgggcctttttcctgcgtcccagcctgcacccctccggccccgtctctcttggacccacctgtggggcctggggagcccactgaggggccagggaggaaggaggccacggagcgggaggcagcgccccaccacgtcgggcttccctggcctcccgccactcgccttcttagagnnnnnnnnnnnnnnnnnnnnnnnnnnnnnnnnnnnnnnnnnnnnnnnnnnnnnnnnnncaagataaggagaaagaaagtacccagcaaatgggcattttacaagaagtacgaatcttatttttcctgtcctgcccgtgagggtgggggggaccgggcccctctctagggacccctcgccccagcctcattccccattctgtgtcccatgtcccgtgtctcctcggtcgcccgtgtttgcgctttgaccatgttgcactgtttgcatgcccccgaaacagacgtctgtcagggggtttggatttcgtgtgccgctg

SEQ ID NO: 243040 - DNA, 1320 bp, Homo Sapiens
ttggcaggaacaagggttttcctgcaagggccagctcctgttgggactcctagtttcaacagacaacatttttctccccatccttggacaagcgcctcaaactcatgtgactctcctattccatctgtttcttcgggatcatcttcacctctttcagccacttctgccccaccaacgttgggccaaccaaaaggagtcagtgccagtcaagatcgaaagatacctcccccaattggaacagagagactggcccgaattcggcaaggagggtctgttgcacaagccccggcggggaccagttttgtcgctcccgttggacacagtggaatctggtcatttggtgtcaatgctgtgtcagaaggcttatcaggttggtcgcaatctgtgatggggaaccatccaatgcatcaacaattatcagacccaagcacattctcccaacatcagccaatggagagagatgattctggaatggtagccccctctaacatttttcatcagcctatggcaagtggttttgggatttttctaaaggtctgccaatttccatgtatggaggcaccataataccctctcatcctcagcttgctgatgttccaggaggccctctgtttaatggacttcacaatccagatcctgcttggaaccctatgataaaagttatccaaaattcaactgaatgcactgatgcccagcaggccagtctgcttccttcagtccctgctctcaaaggggaaatcccatcacctcagctaaccagaccgaagaagagaattggacggccgatggtggcctctcctaaccagaggcaccaggatcatctacgaccgaaagttcctgctggagtgcaagaactcacccattgcccggacacccccctgctgcctccctcagattcccggggtcacaactcctccaacagcccctctctccaagctggaggagctgaaggagcaggagacagaggaagagatacccgatgacgcacaatttgaaatggacatctaatccagtgcagatgacctggcatgtggagttacagagggatccctcatgccactgctgccaccacctcttcctggggcatccaaaggccagctggcctcatctaatctggaagggagtgacttgttagttccaggcctcgtttagttctgaggcagctagaccagggataggagtgggcaacttgccaagcccttaactctacttcctcttcagtctgtggtactcctcctaaccctaaaccctctatgctcaggggctggaactggggaatggagtaagtcaccttctgactgcttagtaaacattccaaga

SEQ ID NO: 243041 - DNA, 999 bp, Homo Sapiens
aaaggatatgatatagaaaattaatccctgagacatatcagtgaggttctgattaaaacaagtagagagtcatcttcattttcaagatgtattatattttagcagtgtccttttcttgaagttcaaattaacattcatatttgtatagctgacctctgcaaacatggcagacatgaggatttaatatgactttctctcaatttcagtttatgttcagttttgaattgcaagagaacagcctgtccctagttttcctaactagcctctttggcaacaagtgggaagatcagtactccatgttggttggtagtattttaaatctgaagcattttcagagtctaaggcaattcagactgcacagctgtcaactcaggagtcccattaaactgactctaaaaattcctaaaagaaggcatgatttattataagcaaatggctaacctggcttttttggtaatagaattttaaatgaaaataaaattatacaagatacacattgtttggatttttaaaaactctattaaatgtttaagtggttgtgaatatgaggaataattaaatgttaaccccagctgattagtgaacatataagaaaatggggggaactgatcccaaaagatcttctcttctaaggagaacttcacttgaggggcaaacactagaagatacaattgttattgtaaaacaaacactaatgagagtctgtcaaataattttaaaagaaaatagaacgcatttgcaactttcaaatgcatttgatgcccaacaatttcatcacctaccctatgtttaaaactgggaggcaatccagaaactaaaaggaatcagaaatttgcaaaaatatgtttgcgatacactatccaacacttgtactgacaacattagtgtagatatttcaacatatgttaattttaaggagtaagttcggcagatgggcttctaaattatcaaatttcaattaagatgttactaatcaagttaccaaaaaatttaattttc

SEQ ID NO: 243042 - DNA, 455 bp, Homo Sapiens
ccatccaattaacttgatggtggctgagcagctcagctctgtgccagcccctgcaggaggcagatcatgttgtccaggccccagaggtagccgtcctcacggttgccctcagcccagggcagcctgtggctgagcgtctggtggtcgggcaaggccaccgtcttgccgaagtctatcatccagaccttggccaggccggtgtggtcgtgcacgaagaggagggagctgcctaccacctgccggggtagagacgggaggttaagggaggagcaggcactggccaaggtcccttcctgacaggcagcagagcagggtgattgacagcatgaaccctggagcctggctgcctgattcatatcctggctgtgccacctcctgtctgtgcagccttaggcaggtgtcttaacctctctgtggttctgcgtcctcatatacaaagtgagagtaatacagtt

SEQ ID NO: 243043 - DNA, 693 bp, Homo Sapiens
acttctgcatattttcatttatttaacatggcttagacaaagaatattgtccaataggataagaagtgagaaaacccaaggaaaatggaacatgagggtcagaaaataacatgaagcaacaggtaagactagaaacacaaatttccatgcaaagggactgacgcatttgggtagaaataggaagaaattaggtagctggcttcctagcagccaaagacagtggaaatgtttgcagtcactcctgatgagcggcctcacaaactgcgtccactgcctcctgtgtgtggggccaaacccctcactcatgagtacccactctcaggggctgctcctgaattcagaactctgctctgaagcagggcatagcaaacctgaaagctgtgtagggagcaaaacactacatccagaagaggggcatcaaatcttaagggctttgggggccaggaactcaacctccagagtacccactcacaaactacgtacctgtgttcccgacaagtcttccttattttcaaactccatgcggatgggatcatacggtggcaaccccatggggtaaacaatcatcaccgcgcctcgaagctggtccaaggcatctttcaccatctccatggtaacacagacaccggcttccacttgtttcttagatattattgctttccaacttttttgtacaaagtgggcattataggg

SEQ ID NO: 243044 - DNA, 1273 bp, Homo Sapiens
  misc_feature (246)..(262): n is a, c, g, or t
  misc_feature (1052)..(1066): n is a, c, g, or t
aaaaacatatacaggccaggataacttctctttctacaatgtcatcttcctctcatctatgaggagtctatgaatctttagtgctagaaaaaattgtggaggtaaaaaatattaagctttccataatgatgttgtccaaagttcctttagctgtaactatggacaccatatgtgcagttagacatgataaaaaccaattttaagttgcaaatcttgaacagtatataacaaagcttttccacagtnnnnnnnnnnnnnnnnntgcttgctgcttatttgtgcaccactgaaaattcttatttattcactttaattctgcatttacacaaaaatgctgtaataaaatatctgtacactacttctgttacaaatatagatatttaaagtgactttatatattctaatgtaggagtttcacgctctaaaatgggaatgaacacatgataattcctcaccagttgtctcaataaacagctccatctgtttcccttagtcttaaactattgtattataagatgttaatataaggcaatgaaatgaagttatgttaatccccttaatttttctatcaatttactaatggcatacaaccaaaataattagtaacacattgttctctgtcattaagattaatatgaattgaaaaccaattgcacagcacactaacacatttttaatgttgcatcggttgttaaaaccagcactaaagattctggaacccttctatgttcctctatggttagcagcatagttgctttctagaaaaaccatagtcaacatggggtggcatcatcatttacttatagcaacatgaaaatattttataaaaggtcaaaaataagaatgaaaattgaaatgtgcattaaatataatttctttataaaatttagggacattgcttcatgtatttgccatttactcaattgtagaaaccaattttagcaggaaaaatatatatgcatattagaggtggggagatgcaatgtttttataatactgttgaaaattttaaaatactgacagtatttttaaagattttcattagaaaaccnnnnnnnnnnnnnnnagtttggggtggggagaggaggtagattgccaaattgaggcattttttttaaactccccgagattttcttctttattttatattttcatttttcatcctaacttactgaagccattttctttggttagctttagaattatctttctttatactaaccagcttagcatgtaataattcttgcccatgtgactacaaaacattagccaa

SEQ ID NO: 243045 - DNA, 774 bp, Homo Sapiens
ggagtgagggtttccatggaagccagcactatcgttggggacaccactgaccattaacagattagggaagatgtgccatttacacacagagaagcagcccagagttcagtgcctgcttcagggcagagaccaagttggggagtcaggaactgaaagctgtcttagccagttgggggcagggtggggtctcaggcctttggcccctgtgactccaagtataaggcatatatgaaggctagtgagctggggttgggatgggatggcagggtgaaaggtcagcatattcctgcctgcaaacccctccccagccttgattgcaggtcagaaggctgcagggggatgtccctatgctggctgtgagttcccagccactcccttgtggtcaggccagcaagtctggtctgcaatggaacagtgaccaagaacgtgcctcctacctctctatcagagcccggggctaacgtgggcactctgtgccccagtgccagcactgtactttgaacagaagatctccaagacccatgcccgagtcatctgtgttctccatcacctgcaccaaacaagatctggcctagagcaaaggcttgggggtatttgcaacagtgagcttcggagggccaaggaaacaaagtgcccagtggctctgccctgtgctaccttcccctaaactggggttgggctactgcttccaccaaataacaactagaatttgaattgctgagcccaaggaaagaaaaacaaaacaggccaaggtggaccaggcacatggctcat

SEQ ID NO: 243046 - DNA, 942 bp, Homo Sapiens
tacaaaaaagttaggcaattctacccacctccccccacccccgactataggcaaagagagttgatcacttccagggtctctgacttctgtgacctggaaatcagcctggcttgggaaattcatgttgttgatctttaattatttaattattctttaataatccttctattttcttgacatctgacccccagcaagagtaaggatcccagaggtcaaaacagtggtgagagccaagctgctcacagacacccacttgatgccacagccatgccatgaggcttcctcccagctgctctgctggcttgctgaagccagctctgagtcacagggttgccttggaccctcggctgtagggggcacctgtctggctccgggccctttgtcctggatacactgacagtaatgtgagcgcagcacttcagagttcaggcccagcaggtcctggcaagtgcattccacccgaacttttaacccaagcggtggggaaggaagccaaaactccaagctgcactttcttggggttctggccatgcacttcttagccttctctctgactttacaggacaaaaggtaccccacgccttcagaatcatgcttacctgcacggcagcatctgactggatggctggctaggtctcatccaccccaaattactgacccttgatttatgttgttactgctcaggttatgctcagatgccctggttgcctgaagatggtttaagtgcaggcccttcagacaagtcacgtcaggcaagagagggctggcctctaacccacaagagggcagatttgtggccaagaggcttcctggcatccactcccaggcccaagggatcagtgtggtgccagagaggatctttaagctgggactgtactgacgcttgatgggaagtatgggcagcatgtacttgacacgttatcacccagtccccttgtaaaa

SEQ ID NO: 243047 - DNA, 902 bp, Homo Sapiens
ttggcaccctcggagtcggggcctctgcctggggccccagtgtggggcgccctgcgcccttattcaccaccccagcccccggagcccggcctgcccaggtcgtcctccagccttaggtcgccacggatctggtgggctgggtccccctctcgaccccagacgcccctaactcgcctctggctccgggagagggggctgcccttgctgggcagagggtccgaggccgggcccgggagccacgtggcttgccctgtccgcagcgccgtggggaagacatgcttgctgatcagctacacgaccaacgccttccccggagagtacatccccaccgtttttgacaactactctgccaacgtgatggtggacgggaaaccagtcaacttggggctgtgggacacagcgggtcaggaggactacgatcggctgcggccactctcctacccccaaactgacgtctttctgatctgcttctctctggtgagcccggcctccttcgagaatgttcgtgccaagtggtacccggaggtgcggcaccactgcccccacacgcccatcctcctggtgggcaccaagctggacctccgcgacgacaaggacaccattgagcggctgcgggacaagaaactggcacccatcacctacccacagggcctggccatggcccgggagattggctctgtgaaatacctggagtgctcagccctgactcagcggggcctgaagacagtgtttgacgaggcgatccgcgcggtgctctgcccgcccccagtgaagaagccggggaagaagtgcaccgtcttctagagccctggcccacccgagcctgagggctggcggggagcagccctggacgtgtccgcctgttgtgttgagacgtgtgatgtccctgagtccgctgtggg

SEQ ID NO: 243048 - DNA, 1382 bp, Homo Sapiens
cccaagctcctttcttaggaggagtggagaacactcaggccccatgcttgaaaacaagagttggaaagggattgaaccaaaccattagagcacacaagataagactggagatttggagatttgtggaaaagtgagactggatctctgattctgtgacaacattatgccttgtttcagaaacacagagaaagtcttgctttttcaactgaaaagtggtagagcctctactttcctatgctcagatcagtagttctcttttgttatggggctgttccaaaggagacacatccgttaatttcaaagaagacttacatgggggagaacagcaggcatggaaggggaattgcagtgtccctctgcttgtctcaggaacatctagttgaaagcaaacctaatagtcttagccaaagtccccagtggcaaatcaacctccatgcggagattcttggtccaaatgaaagaacataaacatgagaaaagtgggctggtcttaacactctttctattatctaacactttattttacttgattttgtctttctactgtaatttaaatggcaagattaaaggggaaaagccacataattgaattatcaatcacttgcagtaaatccaattccaggggtcaatgggacagaatacagcaggtagcctgaggtgttaatattttaacagtttatataattttttaaagcaatatgctggaaaatccatgtactctttgtgcacacacagtatgacttttatgtgtatcaaatgcacgtggggagtagctgcacttcaaaaatctttaaatgttttaatccaaaacaaaagtacagatccagtccacattaaggactaactgcatgtaacatttaacttcgtgaatggatgcagcattcaatagacagggtgtgaaaaaaggcatccacacagctactaaacatcttccctagtgctctcaaatactaaaaatggctgaagcaatttattcccactatgtgggctttctcttttacaactaagttttataaatccctcaaaataaggtatttagaatggaaatcctccctcactatagtggaattaataaatgttactgatacagccgcttgtggggttgtttaaatacctatatacttagagctatatataatcaattctcagttaaaatgggaaagagatggaactaatcaacaaacacagcaactcataaatattcccccaactaattctacccaattgcttcaatctaccatctatctaacttcttaccagaacagataaaagtagcaatgtggctgagtgtcaccaactgtccgtcccttctctctaactgcagtgcgaaacagcactgaatgttcatgaaggtagtgggaggagaggcaaatgtgatccaa

SEQ ID NO: 243049 - DNA, 794 bp, Homo Sapiens
  misc_feature (259)..(289): n is a, c, g, or t
  misc_feature (626)..(672): n is a, c, g, or t
cccatgagctagttatattattgaatgtttcacataacccagagaaactcagcagacaggacttggtccttgtattgagtggaagaaataactactggcatttaatttgtaggagtcagggatcccagatgtccttcagcacaggacaatcccaaacaattttttaatgttttgcaggacattcagatgggtaaaaattctattgataattatcagagactagaacctaactctttttttacacacaaccacagagtcnnnnnnnnnnnnnnnnnnnnnnnnnnnnnnncagtgctaatatatgatgattttctataaggacaactatggtctaaatcaaggtactttgttctgaattttactgagattcgatcattttatcagcctgagttgcagtgtattctcttttatttctcctttattgtagaattagggcatcatatggctttaaaataggtaggttaagcttattgccaatttaatgaattttatttatggatagaaatgggggcattacaaaatatttgttatacaaagagcccgcttggtctgaaagagttgaaaactattgagatatattgggtcgtttaacctcacaacaacccactatgaaagttaaatccccnnnnnnnnnnnnnnnnnnnnnnnnnnnnnnnnnnnnnnnnnnnnnnnttcaaagccaggattcccaattcagacctgtttggattcaaaatcctggctcaagaaaaatgtatgttcacacaaaaacctgtaggtgaacatttacagcagcatcattcataattacccaa

SEQ ID NO: 243050 - DNA, 897 bp, Homo Sapiens
ttgggcttcttttacatatgggtcctggcagtaacagccaagagaacccaaaacgatgcagagctgaaaagccaagatataacttgtatatttcatcgtttccgagagaattaagccaaagaagttgaaatcagtagttcttgtatcaagctgatcaggtccaaaggacttaactgatctttctcttctaatagctgatcttcagatgatcagaacaatgtgctgcacctcctctggctgctggtatttatacctaattgaagtctcctgaggattacgtattttcacaagttttttaagatgagatggtgacagataggcagggatgatagtttgtattaataactaaggttttgtggcatttgggtgttgtagttagagtttcctttagactccttgggtcctttgacgatgagacagacccattatgcccacctgtgccattctggtgggattctttgaaggcacttttacttcacaccattcaaggactggaaatttttttgtacctccccacttcgccctggtaaaatgttgactcttcattcacaaagcacattgatcatttgcttgtggttgggaacaagtgaaaaacgaaattctagggcctctcaaacctttacaaaggggcagccttttaaaatttttcttgcaaatgaccagaaagcaaggaaagaatgcggttaaaagaacaatttggtgaggaagtccttcatcagagttggttagtaaaatatctaccacaagtttcaaattgctctagatcagcactgcccagtagaaatacaatacaagccacacaggtaaatttaaatgatctagtagcctcattaataaaagtttttttaaaaggtaaatataattttaaaatatattgtatttaaaccaatatatccc

SEQ ID NO: 243051 - DNA, 897 bp, Homo Sapiens
tacaaaaaagttggctctgaaggcaggaacccccacaggccccagggcatagcagcgcctcaattagccgagagcaaggcctctcgtggtgatgtggctcttgttgtttgtcccgggccctggggcacccggctgagtgtcttggtccctctcccaccccacctgtgagcttggggtctcccctcagaggcctgaggagatggtgttccctgggtgctcctgagcaccagccctcactgccaggctactcttggagcagcacaaggttaggatgtgctggccaccgccttggggctggtggccgcctgggcactcagggcctcctttgggccgtcttacctcgtctctctcctccaggaggcaacgcacgggccacaggcatgttcctgcagtatacagtgccggggacggagggtgtgacccagctgaagctgacagtggtggaggacgtgactgtgggcaggaggcaggcggtggcgtggctagtggccatgcacaaggctgccaagctcctctatgaatctcgggaccagtaactctacgtggggctgagcttggagtacgtgtggtcaccaggactgagtcgcttggaacagcagagcctgctccttgcgtaccacagggattaatcctgcttgtgctgggaaatgcaactcactcatgtatttggagaaacaggagtgttcacttatctagtgcaatatgttcacagtttattaatgctttaaacagcttcatgttttagaatttgtgtattgtcaatacttaattgggggtgggagagactgagctacactactgctaaactatttttagcataatatataccatttttatgagttcgcaggtctactagaaggttctggcccatcaatattcatttcatttaattcttcc

SEQ ID NO: 243052 - DNA, 938 bp, Homo Sapiens
gtacaaaaaagtttggctaacccagaaacatctaaattctcaaactgaagctcgcactctcgcctccagcatgaaagtctctgccgcccttctgtgcctgctgctcatagcagccaccttcattccccaagggctcgctcagccagatgcaatcaatgccccagtcacctgctgctataacttcaccaataggaagatctcagtgcagaggctcgcgagctatagaagaatcaccagcagcaagtgtcccaaagaagctgtgatgtgagttcagcacaccaaccttccctggcctgaagttcttccttgtggagcaagggacaagcctcataaacctagagtcagagagtgcactatttaacttaatgtacaaaggttcccaatgggaaaactgaggcaccaagggaaaaagtgaaccccaacatcactctccacctgggtgcctattcagaacaccccaatttctttagcttgaagtcaggatggctccacctggacacctataggagcagtttgccctgggttccctccttccacctgcgttcctcctctagctcccatggcagccctttggtgcagaatgggctgcacttctagaccaaaactgcaaaggaacttcatctaactctgtcctccctccccacagcttcaagaccattgtggccaaggagatctgtgctgaccccaagcagaagtgggttcaggattccatggaccacctggacaagcaaacccaaactccgaagacttgaacactcactccacaacccaagaatctgcagctaacttattttcccctagctttccccagacaccttgttttattttattataatgaattttgtttgttgatgtgaaacattatgccttaagtaatgttaattcttatttaagttattgatgttttaagtttatctttcatggtactagtgttttta

SEQ ID NO: 243053 - DNA, 898 bp, Homo Sapiens
acaaaaaagttggttcacaaataatttaaataataaacttttaagtttattgtgcctacctgatacacattgaccagtattgttttttttaatagcagatctgtgaccagtttcctcttctagcatactttttttgttgccaagtatattttaatattgttttttatctttgttacattttctaaaggcagtgaacctttagaaaatttggtgataatggactcttagtttccttgtaaatatttatgtaaaagctagtaatatcatctattctcataactgctgaagtttttttaatcactttataaagaggaagttgggttttgttacctgaaatggtcatgatgagctgtctaaataaaacaggaagttgaaagtgtaataacttttagaaataaatcttttagttgtagctttgagttcacagtttctgagaatgaacttgagctctttagttacatgcttagcaagaccaagatactataattaggaatcctgaaatatgagatgaattacttctttgggttcttttcattgtctatttcctttatttcattcaacatttgtaaaacataaaagcaaagagaattttggggggctggaaaaaagtgtgactagcatattttttcccttcagcctaactagtggaatatttgtgtacaatttcaaaagtatggtaattgagaagtcatgctttcagtttagacaatgctttcagtaataagataaagttttcagtattaagaaaaactacatgctttcagtttagacaatgggtagtggtgttaaggcatttttgagaaacaagtttatcaaaattatttagtagagcagtagaaaatgttgtaaatagatgaatatgagggctttgttagagcacatgaaaaatattttatac

SEQ ID NO: 243054 - DNA, 2218 bp, Homo Sapiens
  misc_feature (311)..(323): n is a, c, g, or t
  misc_feature (479)..(488): n is a, c, g, or t
  misc_feature (1158)..(1179): n is a, c, g, or t
acagataaacattttaattgatgaaatatatactttcaagatctttttgaaatcgcacttgtactgtactaatcaacagccaaaggcaataagaaagtttaaaaccaaaaatattctgacatgaacacatgacaggaaccgctgctatgtaaagtaacatacactgctcccaagaacaatgatatttttaggagataattcatcttaacatgtgcaaggacaaatttgtaatcaaaggctggaagaaatatatattagtgcctgctttttaaaagtttattttacattttaaatacagtatttttctcatnnnnnnnnnnnnntccaggaagtgcctaactccatggtttctataccatatgtacatgaaagctgacagagagcctgacaaatgttctggatgtaacagtatgaacacctatgagctgggactacttctgaatcaaaattaaaaaacacaaattaagcactgcttaagnnnnnnnnnntccagtttctgaacaaccaaaagagaacagagttagatatgtacaaaaccaggtattaaaaaacagaaagaaatacagcacacaaaaaactcaaacaacccatatgtagtgaactgtatatactgcagttaatgaaaaccctcctacaagaagtgatttaggatttgaaattttaaaaatctaagtacttcagtaacaacatacaataacaacattaagtgtatattgccatctttgtcattttctatctataccactctcccttctgaaaacaagaatcactagccaatcacttatacaaatttgagccaattaatccatatttgttttcagtaaggaaaaaaagatgtacctcttcccgtcaataaagaaataacacaaattaaagctataaaatttaagcatgggcatatgtatttccaattctccttaataagtaattccaaactggaataatgtggggtttgtgactaagtagtaacaaattaaaagaaaatagactgtctctggcagtgatttccatattagtgcaatgttacttcccatatgctgaattatatttaaatgattttatgtattttaattcagtaggtgccaatttgagtttataaaatccttaattttattctttgtgcagaaaagtttcaatttgagatactctatgaagccnnnnnnnnnnnnnnnnnnnnnnctgtattttgctactagtagtatgaataccaaataaagatacaaggattcaaagtttgtggaagttcctgaagaaaaatctctgaggtgttctacgtatcttgatacttcaattatcaattagttttgaacattctagtttaagattatctcagaaaataattctctgtaatataactctgaactaaacagctgcacccaaagcagaaacaatctgggtcattctgaacgagatcaaactgaggccatttctttttctattataatctgtgaggtgttgagtttttaagttttaaaaatggcctttaatcaaagccagctgcacctgatatagacttgttaacttatggatttcaaattagaggacactgtaactacgggctctcataagacacatggagcaggcagcaaggggctaaccatcagccgggtaaggtcaacgttggggtgttttattttggagactttaaatatttaacatgtagctcatgtaacttcagcatccactagtgactctgctggtcagcacccaagggctggatgagtctgaggaatctcctttaaccccaaagtatgaatgctaaagagtctcaaggaaattttgattcccagcaagagttcacaaaccatcagaccaatatcaataaggtaaactgtgactctaatgctccacaaaagtaaaaagaaatttccaaattaaatgtcatcttctgcccaaccctagactccagactttgtaacaacatttttatctagtataatagactctgtagtagactgattttgaccgccacaaagagtaggagttgtcaaacttgaggagatagactcctctccctggatattgatggctgccagcatacacctcctcatgacagtcccgtcggtacacaggcacaatctcatccagcaaaggcttgttggcattctttttggctttctcttcacaaccgatgttttctgtaagaacagagacaagtcaatgaacagattcaggaaaaccacacttgcatcaagcaattaaaatctatcctttcttt

SEQ ID NO: 243055 - DNA, 647 bp, Homo Sapiens
tccctctgaaccttcagttgtgtacatcaggccacacacttgtttacccgggaccttggctgatccaggtcactctacctggtatgcccttccccatccttactgtctggcaaacttccctttgcctgtggatgcttgattggaacagcagcccctctgtagacaggcgggcttctgctggctgagttgggcattgcctccgagcccagcaccccccaacctccaccatgctccccgatgctgcccagtctcacaattgttccggagtccacaactgtgtctgtttccaccacaccaatctgggcattccctaggggcagattctcatgtctgcagtgcctgtggcgtcgtggacatatattcaacaaaccaacagcagaactgggctcctgtgatgtgaatgtctagtttccaggacagccccagccccacccccattgaggccactttggagtggagcccaactgctcttcacaaagtcatctaggagcagagaaaattgcagaccagatctttctctcccttatcatcatgacaatagccactatttagagagcctagcggctgtgccaggccctggaggggctttcgcttcctcatctccctgcatcctctccacagccccaggagacggacatgaccagctt

SEQ ID NO: 243056 - DNA, 892 bp, Homo Sapiens
acttgtgttaattaatccaattactttatcatttctcagaaatactaataatgctctttcctttgtaagaggaattttaataattccaaaagtaatcactggcctatactataataaacacacaataatcaaacatgcttctatttttcctcaaaacggtaattaactttttatctgaaatcagggattgctattgtaggatttgtattaactgtccattttctctggtttttgataaatcgaattaagtgttgtcaacaaaaatactatttcttctttcaagctttccaattcctctctccagaagtaatctacacactgaattctcaagaatatttttctccatttctcttacagcatttaacctcttttactgtttgattacattatttatctacatttattctttccatataagttccttaaaggaaggattgtagctctttcattttttaaaccacattgcctgatgaagtaacttgcacagatgaagtacataatacatattttgaattataagctaatttataactgagaaagaattgtctgaaatatattaaagtcataatgattaagccttaagaactcaggaaaaaaatattctcaccgtctgtctccaagctctgagcctctgctttctgagaaagaaaattgagaaggctgttgaaaagtagctctgatgtcatccggagtcttcagattccctgtcctccttcagtcaagtgtgcatcttaacaagagggaaaagatagtttggcatctattccaaaccagattctggaataccttttgatcaagttcaacttatcccattaccttttcttgttcaagttcaatgcaaaagtagtcatttgacagaaaaatatcaattgtttatgaatgctggttccaa

SEQ ID NO: 243057 - DNA, 348 bp, Homo Sapiens
ttggttactttgttgtaagtaaaacgtgtataatcatgtctgtgttttctgatctctcaaagctgttccaatataaggtgccatcgttcctcctacttgtgattatatgtgtaggattaggggattagaatgccagaagagggctatgtcctcagaaaagccacagccaatttgactaatcagaacaggggacaggacagagtctaagatgtagtgatattttgtatatagttttactttctccagtaatagatccaacaacctttatacagtgtctgattctttggttaccttaggctcatctcctttttaaaaagtttatttttatttttagagatataatagtat

SEQ ID NO: 243058 - DNA, 930 bp, Homo Sapiens
ttggctccttccattaatcatgaatgttcttcatggcatctagaatggtgactcctttccagaaggtttttaatttactttgcccagacctatcagaggaatcatcatctgtggcagctatagccttatgaaatgtattttttaaataataggacttgaaagtccaagtgactctttgatccataggctgtagtctggatgctgtgttagcaagcatgaaaacaacactaatctccttatacatcattgtcagagcttttgggtgaccaggtgcattgtcagtgagcagtaatattttgaaaggaatctttttttccgagtagtagatcttaacagtaggctaaaaaatattcaataaaccatgctgtaaacagatgcactgtcatccaggcatttctgtttactgatagagcacagatgcagtagatttagcataactcttaaagaccctaggatttttaatatggaaaaggagcactggtttcaatttcaagacaccagctatattcacccctgatgagagagtcagcctatcctttgaagcttttaacccaggcattcacttcttttctctagctatgaaaatcctagatgacatcttctaataaaaggctgtttttttacattgaaagtctgttctttagtgtaaccaccttcatcaatgaccttagctagatcttctggataacttgctgcagcttctatatcaccattcactgctttgctttgtcctattaccttacagagatgacttctttccttaaacctcatgagccaacctctgctacattccaacttttcttctgtactttcctcacctctctcagccttcatgcagtggaagagagttagtgccttttttctagattagatgttggcttaaaggaatgttgtaacaggtttgatcttctatccagactgctaaaactt

SEQ ID NO: 243059 - DNA, 915 bp, Homo Sapiens
ttggtaatttgaagagacgagattaagacctgggattacaggcgtgagccaccacacctggcctggctgcccacatcttggagtgggtccccttccctccctactagcttttggggactttgcttcttccagcattatgctcctctcttttctcttctctagcttcctttgcccagtcctgctcttaccccatcttctttcacatatttggatctctcccgctaagggctcagcctttaggaacacacttgacatttgagttgtctgtctactagtgaaagcttgaaacaaggaaatgacctcctttgtacttctgtttgtctttaagtggcaaatcactgctgtggggaacaaatgttggatttggtgccctgataaatatcagttgtgtggaaatactttttagatagttaagaacttttctgtaatgctattaacacctttatttctttagatattcagagctgtaagtaatgtaatttatcagataatattagctgtttatgagtttgaaaaatttttaattgtttatgtactatatcatcacatatttagtttatgatctttttcatttgttttagatgtaaggctacgaaaacttgctggagagaaggaagaactactgtcacaggtaaaggcattcttattggagtgtaatataattttaacaaagttacatggtaaaatactggctaattgaaatgttcattaaaaaaatatgcttctttcaacatcagtactcaagtgagatatgaaggatagataattcatattttacctctttgttattttctgttcttaaacatttttttaaggacacataattttaaggagtcatatagttttttacaagcttggtatgaacacagcagtcccctgccctgggctcctctgacctcgccctgaccatttctg

SEQ ID NO: 243060 - DNA, 365 bp, Homo Sapiens
ctacgtatccattgctaataacttgaaccgacctatcagttttctttcaactaatttgtactgatctctaagccatatatagccattcagttcccccatcatcctttttcctggtgcttcaccttctgtagcacccccatccttcagcttctatctgaatgggttgtactctaggcgtagttcacaaccatcattcaggggctttcctttacccttcttctttcttggacacgctcttttctggattccgtatcatctcatttcatgatttactgcattgttttggtagaacacatacacccgtagctttctcagaaaggtaaagaagctacatttcttttgaatctttaacatgtgaaaatatc

SEQ ID NO: 243061 - DNA, 500 bp, Homo Sapiens
  misc_feature (63)..(105): n is a, c, g, or t
  misc_feature (158)..(198): n is a, c, g, or t
aaataaatacaacatctttatttggcattggatatcctgacatttgttcattacagttccttnnnnnnnnnnnnnnnnnnnnnnnnnnnnnnnnnnnnnnnnnnngatccaatggctctatttacatatagcaaagacagcccaggcatcttccatgnnnnnnnnnnnnnnnnnnnnnnnnnnnnnnnnnnnnnnnnnatagatgcccacagatcctttagtactctccatgtgtgaacgtgtatataatataaattcaggtacaaataatatattgttttaataggaatataaaataaatttcctgaggaaggaaaacaggattctgcttgacttctaccaaaataaaggtaccctacataaaaacttactacttgttgacagactaagcttttaaatatagtgtattctatgaagtaaaattattattaaaaacaaaaatcaggccaggggcggtggctcatgcctgtaatcccagcactttgggccaacttttttgt

SEQ ID NO: 243062 - DNA, 866 bp, Homo Sapiens
cccggaagaacctcttccgcacagagctgctgtcgtagtcgtatttctgcagggaacaagggggtcgggggtctgcaggtcagtgggctccattggccctgagggtaggacgaggccagtggtctgacccaagcctccgagtcctcatccgcacaagaggaccatggcgcctccttgcagggacagcaatcctggtggtggccggggatgaggctcggggctcggcctcgcctaggacggtccggggcagggcgtggggccgctcaccttcagcacccgctccaggacccgctggatggacttgcacagctcctccttggtgggccccttccccagctcctggtgcaggagggtctcgaacgtatacacggcattgtccatttgctgcagggcataccgcggacatgtgaagcccccagggtgaccacagccccttcctgggtgccgctgaggggtcctcatcctcaaccagccccccaccccgaggcctgccagggaggaatggcaagcggtctatgcccactcacagctctgcacgctggagcaagtccctgcctcaaggcaacaggaaatatgggaaggggcctgggggcgcaaggagagcttcctggaggaagaggtctctaagctgagacctgggaagtgagtcagaattagccaggtgggcagaggcacagatgttccaagcagaggaggagagagcgtgccaggcaagcgtggctatggcatgacgggacggagcagaagggaccccctgggcgagggggcctgtggaaggcagtggacagggtgtggggtgggggtcgtagcctcgggtctacctcccgcatgtggatctgggctcgctgcttgaacacggacgccaa

SEQ ID NO: 243063 - DNA, 1248 bp, Homo Sapiens
gtttgcaaaagtatgaagcatttagaaagcatggtgctatatatctctttatctacatttaccctggcccctctagttctgcatctaaaacagaacctgtaatgtagaagttatgattatttgaaacacttttggttttccttcagcattatacaatataatttaataagatacaaatgcatatttaatgtttgttaatgaaagaaagttgtgtgagggtgggcatatatctaggaaaacactactggttactggcttctcatcaataactacaaagtaccacatacctttgtttcagaaaccacccattctacattaaaatctaattcctttatcatctatggctctttgttattatagaatgtctacataggtatttatttgcctttcttcctatcaatcagatttatttattttaaaagcccttgataagtagtaaaatatttaactgcttttcttaaccatacaagtcagaattagattttaaaattctatgaaaaattttaggataacaaatctaactagagacttaatgatttgtgttaggattctgtgagccatacttcagcttattattgttctcagcaatccccagatttgattgtctgttctaccagagtaagcttaaccagttttattatctaaaatgcttaataagtgccccctccccgccaagtgatgatggaattgaggatttattctttaaaaatacctataactccaagtttctttgactagcctccttaagttcatactactactttcagcgtacttggaaaaatcacaggaagaactaatctcttagaaaacatataacaagtgactgttaacacagagccagatatgtttacaagaattctaggatgtgtgtggctggggcagcggagacccaagcagaggctgggaggttggactagccctttccagtgctgctactctgtaaaatgtatgtctcaatcagactcacaggcccccatcccaaatactcaagacatcttaaccatttatcttgtaagatttcaagtttgatagttacttaacagtaattactaaattttagccagttaaattcttgtttggatgtgctcttttagctcaaaaaacagatttgtttttctttttatatccctgaaggacatactcctcaactttgcatgattactatagttggcttcttaaggggaagtgaagaaacaaacttctgtatcacaatgacttactatgaataataattgtgatccatgccaa

SEQ ID NO: 243064 - DNA, 831 bp, Homo Sapiens
ttggcggccgccatggagcaacgggaagaggagcgctatggggcagagctggaagcctgccgctgccgggcagaggagctgggccgcggcatcgccttgttccaagggctttccaacatcgccttcaactgcatggtcttgggtaccctatttattgggggctcccttgtggccggacagcagctgacagggggagacctcatgtccttcctggtggcctcccagacagtgcaaaggtccatggccaacctctctgtcctgtttgggcaggtggtccgggggctgagtgcaggtgcccgggtctttgagtacatggccctgaacccctgcatcccactgtctgggggctgctgcgtccccaaagagcagctgcgtggctccgttacatttcagaacgtctgcttcagctacccctgccgccccggcttcgaggtgctgaaagacttcaccctgacgctgccccctggcaagatcgtggccctcgtgggccagtctggcggaggaaagaccaccgtggcttccctgctggagcgcttctacgaccccacggcaggcgtggtgatgctggatgggcgggacctgcgcacccttgacccctcctggctccggggccaggttgtcggcttcatcagccaggagcccgtcctgtttgggacgaccatcatggaaaacatccgctttgggaagctggaagcttccgatgaaagaggtgtacacagccgcccgggaagcgaatgctcacgagttcatcaccagcttccccgagggctacaacacggtcgtcggtgggtgctcgggtctgccgggaaccaggtggtgaacggggcacta

SEQ ID NO: 243065 - DNA, 949 bp, Homo Sapiens
gaagaaagggcacaaactgtgtgcttgcggtaaatgtctgcccccacacatagacactaagatggattaagtgctcatgaagcaatttaaagtacttatcagtaaacattctatgttaatagacatcaggaataaagaatctgctgtttacaatgatccatgcaaaaatattcctaaacttcttataaaataagatgtgaaaaagaaaattataagaagtacttactataaaaaataaggttaccaaaggctcagtggtcaggtgtccccccaccaaccaactggggcagaatgctagtgggcatcctcactgggcgccagtgccctgacccagctaccagcaaatgaagaggagcagagccccctccccaccagagcccacagcactcaaaccaccactgcactgggaagaagacgcacgctcctgccctagaggccgctgaaagggacccaggccttacatcccccacccccactctgaccctcactgagaaccgacatgcactctcatggatacaggacgggcatattttgggggcggggtggagggaagccttttcatttcttatgtacaagattcagatcctaaactcaaattcctctcccacaataaaccctgccagcaaacgcactccagcactgcctggccctctctgctgtctgtgcttgctttgtgccaagtgccctcagctgcaaaagagatggcaggagaggctcgcagacaacagacactggcctccccctcgccccatctctaagcgtcccctccagccggcctcagcagacaagtcaccaccatcaggtgggtgatcccagaagcagctacaggtttctacatttccagacatatccacggccctgcctttctacaagaaattggaggaattttaaataaagttttgttcccttttaactcattcttaaatataccactttcttcataacccaa

SEQ ID NO: 243066 - DNA, 754 bp, Homo Sapiens
  misc_feature (276)..(378): n is a, c, g, or t
  misc_feature (455)..(506): n is a, c, g, or t
  misc_feature (529)..(564): n is a, c, g, or t
caagaataaaattatgatcagcatactttaacatttcacataaatctgctcctttctctgataataaagtaagcaaataaatcctacctcaaaacaaaacaaaaatatttcaaagtgacaacaaaacaggaacagaaagaaaagaaaagcaaatttgatttcttgagtcaactttgttcttaatatacctctactcattgtttagggcataaatgggcaaacacgttcttattttaataaaatatatgggtcaggagcggtggctcactcctgtgnnnnnnnnnnnnnnnnnnnnnnnnnnnnnnnnnnnnnnnnnnnnnnnnnnnnnnnnnnnnnnnnnnnnnnnnnnnnnnnnnnnnnnnnnnnnnnnnnnnnnnntttagccaggtgtggtggcgggcacccataatcccagccactcagggggctgaagaaggaaaatcgcttaaacccannnnnnnnnnnnnnnnnnnnnnnnnnnnnnnnnnnnnnnnnnnnnnnnnnnntgacagggccagactccatctcnnnnnnnnnnnnnnnnnnnnnnnnnnnnnnnnnnnngtaggcacacaaactttgtttcaaatacatatttgaatttaaatatatattcaaatatacatagtatttcaaataaataactttatatcattttgggttctggacaaactcaaactggtttgagacagggtcttgctcttgctgttgcccaagctagagtaaagtggtatgatcacaacccactacaact

SEQ ID NO: 243067 - DNA, 913 bp, Homo Sapiens
acaaatttgccctgactttagctgaagtgatcagtgataccagctttgcccttgaagtattcgcatttgcctcaactgagtagccaggtgtgttatacgtaatacaattgctttaaacttcttccttgtgggtcaaggcggaggggtctgtacaattattaatacattctgtcatgcctacattaatgtcttggactgagggaaaaggtcagtacagaaacttaaggaaagatcccactccctgactcttcttaaatgaagccttggtggcttcttgaatttgttcaaggagttgattctgagactctgacaggcatatttgaggtcagtgccacaaatagcttcctcctgctttgtggattcttgtttatagtcaccttaataaggccatatttgacaaattaaacagacttggtcccagtctttgtcagctgggttaattggagaatgccagtggcatatctatgggaaacttcaccagaagcaagacagtgtaaaaaggagggtgagccactgtgcctggccagttttctgtcaataaacaaaaatttggcaatccaggaggaaagaatagtctctctctacagctataaggttgctgggtactataaactatgaagaaatccaatggaataaattggtgttagggaacaataaatatgagaaaatgttttccatttgttatcaaagagcaacttgataattttaagggattgtattctaaaataaagcaaataccttcaaacctgaaaatattgtttcattattcagatataattcaccttttcatcagtcaataactatttaggcccagaagggaaaagttgtacaatcctttgtacatatggttctttgataagaactactaaatacaggctgggcgtggtggctcacctatgtaatcccaacccaa

SEQ ID NO: 243068 - DNA, 504 bp, Homo Sapiens
ttggcttgttaagttattaatttttcttatctttctcttctgacccccccgatcaggtcagttatacaagtttttgcctcagatcattctgaaactagttggaaggtaatggagtagcatcactaggcctggcaggtttctgaagcattaataatccgaagttgtatgttccttacttgattaatgtgcacatgaaccatgattgacctatggtcttgtgactggactggaatgtgtaattttaaaaccaaagactaattaaagataggtatttccgttggaatgttttaattgggcttttgaaggccttgtccattttcagaattccttatggtggaattcttacagagatattaagaagatcttaaattgttatctgacatcctgtttgtcaaaactttcaaccagacaagaacatttccaaaacttactgtttcaattaatgacatcatcttcctcaaaacatcacctgggtgcagcacgctgccacctcctgcagttgtt

SEQ ID NO: 243069 - DNA, 900 bp, Homo Sapiens
ttggatcaatagaaaaaagagaaggagacctgtaactttacagtgtttttggccagctcaactagagaaaaacccagtaggtaacaattagggaagcttttgatatcatcacttttggcagggaaggttttcatagtcctctgttcctttcttacatttgcttgatttgcaacagaataatttccctgctgggagtcctgaacggcttcaggacttaaaatccacagtggatttgctgaccagcattactttcttcagaatgaaggtaagaaatggactggggcttgggtggtgctgggctggagacctggctacaggaacgtgaagaatgagaatcattgggcagagtctgaggctacaggattcatcacctctaagcttacatttctgtgtacctgttccctgggttacttctgagagagcacatagactatggatccatgaggatggggtggaagttttccctgtcaactatcctggcaatttcatcacagggaaaagtctagggacccagacagggatgaaagaatctagagtaggtttggggtagtgctaggagaatatcccacccaggtgagcaggtccttgggcccatatttcttcttttaattggcaggtacaagaactgcaaagccctccaagagccagccaggtggtaaaggattgtgtgaaggcctgtttgaactccacatatgaatatatcttcaacaactgccacgacttatacagccgccagtaccagctgaagcaggagctacctccagaggaacaagggcccagcattcggaacctggatttctggcccaagctcatcacactcatcgtgtcaatcatagaggaagataagaattcctacacatctgttctgaaccagtttcctcagagttgaatgtgggaaaa

SEQ ID NO: 243070 - DNA, 670 bp, Homo Sapiens
ctttgtacaaaaaagttggctctgttatttcatttctcaaatgtgagccttgttgaggtccattatcaaatctacactttggttgattatatgatgtttaggacaaggcagaatttaaaacctgcatgtttagtgcatcacatgtcaagtcaccatccttctgacagtgtaacttccataacgttattttgagagccatttaataatcatatttgaaaaagtggatttcttgagtctgttgtagtttagtacttacagcagtgcctaaaacagcaactaatatgaactgcctgagtcctacaacataaatgcataaagcttttttatgtaaaagccacaggaggggttcaaaattgaacttttccaaagtttatttctcttgcgttagatgaaaaactatttaaaaggactgaaaaccctgagctttttgctcgtcttggtagcagatatctgtaaaaacctacccagaattgtgattttacttcattgttcttgcatccttgaggctacagtataaatcatctccaaacttgactactattgggaagatgtgtataaaagcatcgctttgggaattttttaaaaaatatgcaaaaataagtattgaataaaatctacattaccataaaacacccaaaaatgcagttctaaaataaaattggtcacaatt

SEQ ID NO: 243071 - DNA, 918 bp, Homo Sapiens
tgtcgcacgttctacgcagaatcccgaccgcagcggctgcactcccaccctccggcccccatgctgctcccagagcacgtcccacgccttcctgccccaggacctctgcactcctgccgttgcctctgcctggagtgctcccccttgcactttcctaccggctgcctcagtctcctggttcagatctcagtcccgtgtcacctcctgaccatctttgccaaagaaccacccgatgcaaattcctccccaaacatgccagctccaggacaccatcttcccttagtccctttgttgtgctaggatctgcaggcctgctcatctgataacatttcgtatcttttcctattaaacagaaattctgtgagagtaggtctgtcttatcatgatgtcccttgtcccccaaagcattccagcacagagaagacactcagcagaacagcttgttcctacagcaggactcagaatgcagtttctgggagttgcaggctgcctgtgctggccggcactgccagaacttaaaatcctcaagcacccagagggcagatctgcctgacagaggaggccaggacgctcctctcaccttaagtcagctctgagaactttctgcattgcacacaattgttcaagaaattcatgaaaactttacaaacacccacccactaatggccagacacctgctggggccagtggcctcactgactggagaaggcagtggctggagctcaggaggctgaggtggctgcaatctgagggccagaaactagagaggagggggctactccgacagaacgagctctaggaacccaagggaatctcgagtctctggctgagcaccaggcagtgcacaggtgcagggcaggagtcctcaaggtcaagagaagagcaactaccagggagcaacgagcggagctcacccaa

SEQ ID NO: 243072 - DNA, 831 bp, Homo Sapiens
ccccaggtaggctgaccatcttttagtcctttccatactcatggacaaatggcatttttggtttatcttcccatctcccctttgagatcagaatcctttagaggctcttgggtactgtactgtctagcacagtgcctggcccagagaaggcactcaataaaaatttgtggaactgaactaagagggccttccagagcccaaagcctacacagctgggaaagctagtcatgtgcactgtgaagttggtccctctgcttcctaaaggaataattcccaaataccaaaggctcaaacttgaatgacacatgacacaggcatacagtatcaggagagtgagaagtccctcataagcaccacaaccaggtaagagatgagaggtaccaacacctaaaaattaacatcaaaacacacacagtcaggcacactcatgcaagtacacatatcccctcttagctagagggtctaaaagtcattttgactccataagctctttttggaacagaaagcccttaccagaagccagccttctataatttctcaccctgtcccagacattaaccagatcttcaacctgccttactcgtcccctggccctagctcaggcaaacctggcatcatgcagactatcatcaggctccagaagtagacataggggcctgtctcaccagaggaagatgccagggagttagagtttgtgtattcaagttgagagattaaaaataacaagacatagaaaagaggaaagcaaggtaagaagggaaattagttgggcacggacagcctgaaaggcaggtagattcctcctgcttctgcattagcttaggccctctt

SEQ ID NO: 243073 - DNA, 934 bp, Homo Sapiens
ctttgtacaaaaaagttggtgttcagcagctcagccactgtgtacgggaacccccagtacctgccccttgatgaggcccaccccacgggtggttgtaccaacccttacggcaagtccaagttcttcatcgaggaaatgatccgggacctgtgccaggcagacaagacttggaacgcagtgctgctgcgctatttcaaccccacaggtgcccatgcctctggctgcattggtgaggatccccagggcatacccaacaacctcatgccttatgtctcccaggtggcgatcgggcgacgggaggccctgaatgtctttggcaatgactatgacacagaggatggcacaggtgtccgggattacatccatgtcgtggatctggccaagggccacattgcagccttaaggaagctgaaagaacagtgtggctgccggatctacaacctgggcacgggcacaggctattcagtgctgcagatggtccaggctatggagaaggcctctgggaagaagatcccgtacaaggtggtggcacggcgggaaggtgatgtggcagcctgttacgccaaccccagcctggcccaagaggagctggggtggacagcagccttagggctggacaggatgtgtgaggatctctggcgctggcagaagcagaatccttcaggctttggcacgcaagcctgaggaccctcccctaccaaggaccaggaaaagcagcagctgcctgctctccagcctctggcaggaactcaaggccctggagctgctggggccaagccaaggcctcccctacctcaaaccccagctgggcccgcttagcccaccaggcatgaggccagggctccactgaccaggaggccgaggtctctaactcttatcttccacagggtccaagagttcatcacgacccccaagagtgagtgagggggcaagg

SEQ ID NO: 243074 - DNA, 611 bp, Homo Sapiens
acaggcactgcactgtgcagtggttaaagacacagatgcctagtggaaaagtttaaaaattatttttggaaacagtctatgaattgatgaaccctgccgtgttccttcatctccttctcagagtggctgtctttaggaaaacagattgttttatagctgctcttggaaacggcatccctgttttgccatgaatgtcatgcctcgtagtaaacatgaaagaagacaggatccacaggcaagagagcgaccagagacatgggctgatctcagctggaagcacagatgtcccttctcctagaagggcttctcttctggcctttgctgggtgtcctatttatgtgtccaatttcatttctattttcttccttgtctgaggcttctttatcaagggaattcgaaaagacacattcgtacctttgggcacaggaactggttcctggactttttcaatgttgttcttgtttctgggccctctggcccaggagtatggctgtgtgtttatcctctttgttttgcctggttccttcctcttccccaagttcgtcataacttgatgataaaatcaatctttaagtttcacagtttgtttgccccaacttttttgtacaaag

SEQ ID NO: 243075 - DNA, 893 bp, Homo Sapiens
tttaatagctgagttcccagtttgcctggaaatagtcccaaaggattctgttgtgctgagcatccactgttttaacaataagttatatagccacccgtgttatagtcctaactaccattcaacatgaagcatgggctcaaagaaccactttagtcccttatctcacaaaacagatctacatttctgctgctgttcacagggacatcatgccatgggccaaaaatccccacttctcctaggagtatggatttgaggaaggcctaaaattatgggaaactcatgctcaatctaaaaccatttaaacagccacctggctgatggtaacagcaaattatccagacagtctgacacttaaccgtacatcatacttttcaaagagcaccactaacacgtcagttactcaggattgagtgcctggcattgccacccagtgaaccgtttcctctttacaatgctcagaaacgacttgaaaggcacattaagcaaatatcagacataaatgttaccttaagcaaacaatgggagggaagaatacagaataggtcagaagcagcctcctgctacacagctgttccaagggcaaacacactgcagtgttctggcagagtatgcactcaacaaatgttaacgtctcctttgcccaggctctaattgaaaattcttttgccacttaaatacatgtttaatttaaagggctctgagtcaggtttctcccctgctcagctcagagacaaaacatgctggacaaacaggcaggaagtcccgctgaacatctgtttctggctggggtgacagttcaaatagatcatttagaactcaatttaaaatagtaaaaatgtattgagcaactgccatgttttgaatatgatttagtacctgaccaagatagccaa

SEQ ID NO: 243076 - DNA, 282 bp, Homo Sapiens
ttgagttctacttttaaggtaaggtaaggtcagggaaggcctcactcaagtgacatgtgggtaaagacccaagaaggtaagggatgaacaatgaaggacaagtgaactaaacacagaaaacaagaagtgcaaaaggtcctgaagatgtcaggaatatcagtcttaattacccaacgaagtattgtagaaatatcaatcttaattacctaagaaagtattgtactgtcaaaggagctctgaaaaattaaacagattaatgtcataatactccctgctattatc

SEQ ID NO: 243077 - DNA, 524 bp, Homo Sapiens
cactctctctcccaagaacggtaattataaagcatttttggtgattgtgtttcctcaagatgaacatacaccttaaaatttctatgtccaatacaggtatccctatcccttctggtttcactacaaacataattaccatgaatatcccatcttcaaccttgaagtttaattggcatcacacaaaggtcctatttattgtagaaataaacattaacacagccaatctcacaagggccaaagttatatttaattatgaggcttttttttcttaaatcccagatacatttccatacttgggaaaaaagccagctattcatttagacaatggggttaagaaccaccaatatagtcgatagataaaatcaccagcacaggaatgcctcaggtaggaaaaatgatgtataatagaggagctcactgtaatgtaaacagctgtttatgtatcttactctactatgaaattagagctttcacagaagaaaaaggatttttagtgtccttaggcactagcaaaaagtttccaa

SEQ ID NO: 243078 - DNA, 353 bp, Homo Sapiens
  misc_feature (95)..(167): n is a, c, g, or t
ggttcacgtctgtcggtctaacaagccctccaggtgaccctgatgcacactcgagttggaaagccactgccttctctccatgcttctcaacagtnnnnnnnnnnnnnnnnnnnnnnnnnnnnnnnnnnnnnnnnnnnnnnnnnnnnnnnnnnnnnnnnnnnnnnnnntgccactctccctccaacagggccccagaacctgcatccctagcaagctgccaagtgacctgctctagggatttctgaaactaaagaagggagctgagtctcattttgtatccttttgtcatttttttctcacttgtatatatttttaaataaagaatggaggctatttctcagctgatgagccaa

SEQ ID NO: 243079 - DNA, 816 bp, Homo Sapiens
tatgtttttctagtctctggcatgggtagcctctcctggtcatagaccagtctctttgtaagttattgtggcagttcacacagtagccaccaggggtctctgtttccattacaaactttgttctgtctgggccagagaacctagcctttgaaatctctccatcatatgaaacataacgggatgggacaatcccgtaacctgtttggggttgggggctttctctctgtgttctttccattgatgtgaattggtcattggtgtttgctcttgcctctcctccatcccctagaagtacacccccgtcttattaaggagcttttaaagtttttctgaatgtatagacatttctcgggttcctacctttgtctctgatggaccattttccatttaagacattttcctgtataagacagttttatagctggttccttttagggtaaagagtcttaagagagttttattgtgtctatggcaggtttgggaaaggtaagaaatgggtcctttttcctcctaatgtttttggcacttaaaacataaaattcattatcctattaaaaaattaaattcagctttgctaatccagaaattgttcccaaatgaaaacttgttttaagtccaccccttagtttcccttattttacaaggtctctcttcagggaccaacaggggcttagagagccttagttagattaaagggagaccctacctcttaaaaccagtttcatttatgcaaacaaggacattaagggaaccctgaccccacaggctctcaagtcttcccaaggccagaatcgaaagaaattaaattggatgctg

SEQ ID NO: 243080 - DNA, 591 bp, Homo Sapiens
gttttcatcaggctttctgacttataatacgtggctctattcttcactaaatttaaactcctctgatttgtacagtcctattttggctttaatatccttatttgagccttcctccccactgctctccaaaatagcctctgcattctaattagatcccatctccttaatgcacctcccatcaaaccatgcttctcccagatctttgcctttgttattgtcctgttgggaaagctgtcatcattttttatccaagcagatccatgttttgagaaggcatactcataattgtaatatgtcagaattactgttggaactgtgtggggggaaggggaaaatgtctagttcaaacgcagattccagagctccacctctcgtatttagaggtgctaattctaggatgaggcccggtaacttgattttggataaatctcacaggtagttgagacaagtgacccatggatggcatttggagaaacgctgtactctaaggtcttccacagaagtgccatctcttccagagctcactgctgatcttgtgacatcaaccacaaactttagcatttcttttcttctatctatgtatctatctat

SEQ ID NO: 243081 - DNA, 856 bp, Homo Sapiens
ttggctcatttacctattccaggcaaagtgattggaaagaacgggaaagtgatccaggagattgtggataaatctggtgtggtgagggttcgagtggaaggtgataatgacaagaagaaccccagggaggaggtatgggtacggggcaagtgggcatagagattggtttccagaagtaaatgggattgtcctctgagggctgggattgttctttgagagggtggagtacggaaagttgtttaacactagtagatttagagcccagaatgatcccactgggcaggctcccctaggagactgggcggcgttaatccttccatttcattttcctttctgatccatcgtttctgctctctgttctctagggaatggttcccttcatttttgttggcacccgagagaacatcagcaatgcccaggctttgctggagtatcacctctcctacctgcaggaggtagagcagcttcgcttggagaggctacaaattgatgagcagcttcggcagattgggctgggctttcgccctcctgggagtgggcggggcagcggtggcagcgacaaggctggatatagcactgatgagagctcctcctcctccctccatgcgactcgaacctatgggggcagctatgggggccgtggccgtggccggaggacaggcggtcctgcctatggccccagctcagatgtgtctacagcttcagagactgagtcagagaagagagaggagcccaaccgagctgggcctggcgacagggatcccccaacccgaggggaagaaagccggaggcggccgactgggggccggggtaggggacccccacctgccccccggcccactttcgagatacaatt

SEQ ID NO: 243082 - DNA, 479 bp, Homo Sapiens
catcattggactaaagatagggattccgggagtcatggcaccctgtggaaagcaaggagaaaaacaggttaggctggctgctgctaagtgtttgtggaactttcttggtggaacagcaggtcaggtgtgcaaagacagatgcattcggagaataatggggttattaaacattaattacggaagaaccagctattcttatacacattgctttcttctttaataccacacagtggataaacatgaagaaaaatggataaactgaacttcggaaaaattaaaaacttctgttctttgaaagacaccattgagaaaattaaaaggcaggccagactgggaaaaaaataactataatacatacatctgagaaaggactggtaaacagaataataaagagctctgacaactccataaaagaagatcaacaaataaaataataaaaaagggcaaaagatgtgaaggacatattacaaatgaagata

SEQ ID NO: 243083 - DNA, 164 bp, Homo Sapiens
cataattcttatagctaaatcttacaggtcatatccttaaaggaaatccctacaaatgaaaccactgaatcaaagaaaatgtttattttaaagctcctaatacatattcccaaaatgtcttccagtaagattttcccaccagccttgtttaaaagtgccatggg

SEQ ID NO: 243084 - DNA, 1011 bp, Homo Sapiens
ggggcccatttattagggtagaagttcagtatctttgtttcctattctagcccagatttcccagtcaaacaattccactcaatacaatatataagaaacaaacacacatgttcaaatactttcatcattctggcaaatctgacaaactgaatactgaatttctgatccttacctgttattgttacaaattgttcactagacatgtatctatttatccagatacttctgaattgtaattattcaagtagaaaatcatgattgtgatctgacgcctgctcatgccaatcccttactgcaaaatccacttttctttacataaaagtaccaaaaaaatctagccccaaatgtgcatcactaatcacttagcaaatatattttacttgcttgcctttgctgagcaaaaagaaggtaggaaaacatttacacacatatgtgagacactaatagccaagggcaaaataagatacagtctttgaatgcatctttcaaggttctaacattaccccagaaacaacgtaagttaaaatggaaggtttccatttatcttctgctgttttatatcacaatctcttgatacaaaaaaacaaaagccaggaaccaagaagtctatgcacaaattcaggagagctctattatttataaacaagatggctcaaccacagcatgttataacaggacacagactattgatcacatggcttttttggtggtttgtactagtcataaaaccagagtttatgaaaaggttgcacacagacaacatcaaggatttgtcttttacaaagatatagaagactgcggaattggtttaaatctgattgttctaatttacagttgtcatgatccactcattgcgagaattttctcatcttcattctacagtttttacatcagaattacaagaggtttctgagagtcaaacaggatggtgccacaatctccttgcagaatgagatttgcctttggaaaatgtcaagtattatttcaaaacccaacttttttgtacaaagt

SEQ ID NO: 243085 - DNA, 261 bp, Homo Sapiens
ttcagttgagtttttagtacactttatatattccaaattgatcagatatatggtttgcaaattcatctcaatctgtagcttatcttttcctcttcttaaatcacaagtttttaaattttgaagaagtccaatatatcagattttgtcttttatggatgtgctttcggggcaaagtccaagaacttgtcacctagcccaagatcctgaagatttttctcctgtggcttttttcaaagttatctagttttatgtatcacccaa

SEQ ID NO: 243086 - DNA, 106 bp, Homo Sapiens
cactcccacaggtaggttatggcacagctgtcgtttagaaatggagattgacctgggtggaccttacctcattaagcagtcccttaaaagggaccagactgttcct

SEQ ID NO: 243087 - DNA, 1150 bp, Homo Sapiens
tgacggagaccccatctttaaaacaaaacaaaacaaagataagaagaaaagaaagttactggcactgagagccagacagatgcccaaagtaagagcccattaagaatttccaccatgagataactggaacagtaattttcatattaaaaatagctttcttcctgcacttaaagggatggttcgaggaagcagattctaaaggagaggtgaaaaagaagacatgctctggatgtttggagatacagctataagccaacatcctcggcaagccctgtaccaccccaatgccaccactccctgttccagtgggtagacatgggtgggagcagcatgagtgattaccgttagggggctaatatcaccgtctttatttcatcatgtctccaacatcctgagaaggacatagtggccactatccctcaaccaaagaaactgatgagtgcagtaggaacctgctttggagggttcacattgggactcatcaaggtggaaggtaaaaatctgaagatacaattgaaatctagatagccttgaatggtatggacaaggatacataaaatctgcttactaaatcagaataataagatgaaaggtcaataataagcatagaaaggtcaataatggaataataatagtagaggtcatccctagaaggttgaaaacattttcaagtaaatataagaaactccttattgtaagtagtagtgcaggctggaaaaatatacttatttagttcaaatcatgtgacaggcactaggaataaagttagtccctgccctcacagggttcaaggtctaaatggaataatagatatgaaataactcaacaagtaaatagctcagctgttggaaatcaaacaaggagaagaaaagaaaaaggacatagtgctataaaagaaaatctttataaaattcaaaaccatttaaaatatgtcgccattgatttccttattaataggttttaatacctccatctttctctaatagttttcagtttattagaaatagtatgtgaactttttagattaaaaatttccagcacagatttatcacttattatatccttttattccttgaaatggatgattgtcaggtagaaatttaggacaaaggagctggaaaatattcatgagactcaggaacaaagccaa

SEQ ID NO: 243088 - DNA, 479 bp, Homo Sapiens
  misc_feature (162)..(170): n is a, c, g, or t
ttaggagagagcggaggcctgtggccctgcatccctgcagcgggtgctcctcgagggggccctgacttctggaatgtgtgtgggagaggatgggggagggcaggtggcccccggtgggtctgtgtgtgcattgggggcaggtgggggcggggatcctaaggnnnnnnnnntaggaacaaggagcccagctcccccccagaccccaggttcctggcgttcaggagcccagttctggggtgcggggatacatgcagaggagtgtcccccctccaacaggctggatccagttagaaaggaaataaataagaaggggtgggagggaggccggggggagccaagggcttgggcaattcagtccagaccaagggcccaggtgatggaggcagggcgagtccaggccaagccagggcaggaatcagagtctctctcgggctggaacccagatgtaggggcctgagaggtcggtcgatgacacccaa

SEQ ID NO: 243089 - DNA, 879 bp, Homo Sapiens
ttggctctctgggctcctccatatcatgacctgtcagctcctctttaactcctttcttctctcaagtgtttctcagatcagagaccagattgcaatgagagaatcagtttggtctggtagtatttcacgccaaaaagagttggtcaccctttggattatatgcctttggttcaggcacctacccctggtcctggctgttggggatggatggtgactgttacgtggcctttacagggctttaggcacaataaagctttcccaggttcagcctactgagtgctatggccatgacctggacattaaactggccctcataggttcagacctggccatggcaattgacgaaccctaccacagggctcttggaaccctgtgaaagccattttattgtatgttcttggctgttgaagggagttgtagcccagctgatggcttccatttcttttctgtggatcttgctttcatcataagcattgtttaggggtatagcatggaagagggagatcagggcctcagcctggttttcaactatgagattgagcagtcagtattcggttgctcagtctggccatgacagaattggagccggccctcaggactcttgatttttagctctctgccctttctgtttacagacccatggcacagaaagccttatgcccagacactgcaggatgcagagttatggagccatatcctttcagaggaatgcctggctactcaacagggttggaaagtcaaacaaggatcaacacctacttttgcctgctgtgtgatgggcccgagcctgcaaagctggaccaaatgtggcccctttcctaaaggcggggggcagtcaccttctagtatgggaaaggaatttagtctcacttctccttt

SEQ ID NO: 243090 - DNA, 442 bp, Homo Sapiens
ggtgagaaagccagctgactttattgctctgggggcagggagcattttattcgtctgtttgattcctatgtttttattagtggtgcaattgcaaaggtaatgctattgacactttttgtgtagccttgagagaagagtatgaattgttttagtagcagcacagcgtgtccctaaatataaatcatgctgtactgatagttactttagcagccactgatcagcaataaatgttaaaaattaacaagaagtttctttttttcgaaaccgccaaatgactctaagcattaaatatattttagccggagttgcttctcggccacagagtggttcacaacattaaacatattttcaaagtattactccttccccagcctccaagtggttgtaaacattaaatatgtcttataaaaactgctttgccagctactggcaagacagccaa

SEQ ID NO: 243091 - DNA, 468 bp, Homo Sapiens
gaagaagtctgccaggtagccagggtgatagatgcggaggcttggacactagaataggaacagtggaggtggagagaagttgatgtatatgaaatagaaatcgcaggttatagctagtgatgaattggatgaggggtggagggagatggaagtgtcaaagataaattccggggtcttacactttggaaaccctggatggagtgccactgagtggcagtgggaaagctgcggggaggccctgtttggttgaagataaagagttgagttgcagcacagtgagtgagagatgcctgtcaaccacaaactgcaatagcggactctggtcatgaaggtcattagcatttcaagagtagagaacagaaaacaagtctgggttgaaatagggacgtattgggtgtagacattgtatatgttcatataatgttctgatggatctaatggggttacttaattaagtgtgcataaaat

SEQ ID NO: 243092 - DNA, 939 bp, Homo Sapiens
ttttctcacgagaaaaatgatcagcatagagcacggttggagggaaagagaagctgcttagcccccacaccgcaaaggggtacagacagcacccagggttctgccagggccaaactcctctaaaagctcctggggaagggctcggttaggggaacccagagtggacagaggagaccttttggcaataatggcatgtctgtgcttttcttttgcaggaagagaagacaatgaaaagagcatagtcaggaatcaggaatcttttgtggtatcaaagctgaacctaagtgaagaagcaattttctgtcctctgcccttgtccaaaagaacacccctcagttcctgcttcttactaagccggttgaggggcgtcaaggggctggacaggacaccccgcaaactttccagccattcctgctgttccttctcactggggcaagtgaggacaaatctccgctctggggtgacaatggtgagtccggctttccagcgatttcctcggatgcccttgggcaggtcttcgtaggcttcatatccctgctccttgttcccaagaaaaacctggccctgctcgaaggcatccagtgggttcttgtaatagagcagcctccgctcatggcaatccagggcgaaccaccttttcttgaaaggttctttctgctgcaaaagagggaacttcttaccacagatgaccaggtcagtttctgaggatagaggtcaggggccagcccagcccaaaccaaaggagctggccagtcccactggttctccagcccagcctcctcagtcagacatcctagtgcttctccctggggcctggataggagccctcaggctctgaaggttctgcccattccccttccaaccccaccataccctttgccagcttcaccctgctgcctcaacttggaagaggcaccttcctctttttcaggctgccaa

SEQ ID NO: 243093 - DNA, 674 bp, Homo Sapiens
  misc_feature (53)..(65): n is a, c, g, or t
tcctactgaatagaggcaatataagtaaaaccacaattacaaagttttttttnnnnnnnnnnnnntctgcctaacttttcatgcctaatacaatcaaagttattaataattaagatttccagaacgtgtttattaaaatagtaattcaaataagctaggggataatcatactaaaaaagaaattctaaggctgggcgcacctcatgcctgtaatcccagcactcactcttgaattctttcctgagcaaagccaagaaccttcccggtctaagcccaattttggggcttacctgccctgcatcaatttaactataattctactgcaagccaatttaagtaggacacagaaaactataaaacaacacaccttactatgttgtcttcacacatgtatatgcacgtaatagatattataaatctctagattgcttaaatataaaatccacccaatttgctttgcttcttaccttttctatcaaggggattcacaattacctcaaggccttacaagatcaaggcagtattattttgagttgtgtcttctattaatacttccttgaaaaggaagtcttttttaacaggtaacctataatttatatctctaatttacagcttttaaagcttttttgttgaattttgtaaaatcatctaactttccaacttttttgtacaaa

SEQ ID NO: 243094 - DNA, 840 bp, Homo Sapiens
actttgtacaaaaaagttggcacagagctggtagcctgccttcggacacgaccagcgcaggtcctggtgaaccacgaatggcacgtgctgcctcaagaaagcgtcttccggttctccttcgtgcctgtggtagatggagacttcctcagtgacaccccagaggccctcatcaacgcgggagacttccacggcctgcaggtgctggtgggtgtggtgaaggatgagggctcgtattttctggtttacggggccccaggcttcagcaaagacaacgagtctctcatcagccgggccgagttcctggccggggtgcgggtcggggttccccaggtaagtgacctggcagccgaggctgtggtcctgcattacacagactggctgcatcccgaggacccggcacgcctgagggaggccctgagcgatgtggtgggcgaccacaatgtcgtgtgccccgtggcccagctggctgggcgactggctgcccagggtgcccgggtctacgcctacgtctttgaacaccgtgcttccacgctctcctggcccctgtggatgggggtgccccacggctacgagatcgagttcatctttgggatccccctggcacccctctcgaaactacacggcagaggagaaaatcttcgcccagcgactgatgcgatactgggccaactttgcccgcacaggggatcccaatgagccccgagaccccaaggctctacaatggctctcgtacacggcgggggctcagcagtacgttagtctggacctgcggccgctggaggtgcggcgggggctgcgcgccaggcctgcgccttctggaactgcttcctccccaaattg

SEQ ID NO: 243095 - DNA, 895 bp, Homo Sapiens
tggtaagtatttgtgtatctaagcatacctaaacatagaaaggatacaataaaaatatgtactataatcttgtgggaccatctcttctacgcagtccttggtctttatacctttatatctgcactgcccaccaatactgcgaataacaagctggctacgaaaatcagactacctcagactcagcaagttatacacccaaaaatctctcacgactttcagtttaaaaatatatctacaaatatagacaggaagatggggagagacagcgtgagtgccagtgccaggcactaaccatgtgaagaaagatgaataagctgtggcttacagaagtaaaaactaatttgggaaaagaattcaacattcaaatgcctggtgtgtttcttcatccctaggaacaaatagtaactaatggcaagaccctaaagtacaggataggcagtatggagcccgaggattccaaatactctccaagaaacaacatcgctcatttcttgaagcctggggctgctctgcaaaggtaacaaggcaaagatgttcgaagacttaattatattaatatatcgttcaggatacttatggattatttggagcaatggaaactatgtaaatcaaagcattaccataccgttaattacataggtttataaggtgagtttatattttgggattctctggtagtgatattttacaatataattatacatacagtttgtatagtctgatgagtttcctcactgagggtgaactgctgcgaaatgttttatgattcgtttattgctagtcacgttgttcaaacaacacgtctataagtaacgttccctttgaactgtactgttactagactgtcctgtgttgtaccatcgaaaaccatcgtccccaacttttttgtacaaag

SEQ ID NO: 243096 - DNA, 673 bp, Homo Sapiens
aggcccaaagattattactgacctgaggctgcagacttgcttttcttcctaatgctggaacctaaccccgtgttccctgactcacattagattgctctctcagtgctcagggctttatactccaaacccagggcttcatacatgactgcccaagaacaagaggaaattgtgaaaagtgtctttgaagaggatcatataaacagtaatcttttgtattggcatcatttggatagtggtgttgggacccaagggtgaacacacccctccccttcaaaagttctggtcaataaagaacactcagaggacagtgctccttgggacagttacccaagtaaagttcaggtctgtactcaactaatggctaagcaattctccaataaccaccagaggatagggctctcgggtgaaagctagattagaaaatatgacctagagcttagaccaaacatgatttttaaattctgaacactactcctgctatgcccataactgaatacaagtaggccaacaaaacaaaagaatggctacttcttctggggttgggaagagggagccctgtcctgctctgctttcctcaatggagcagaagctaagtgcatatttcttcttgaacacacacctgagaagcagtcaagaggccctgctgtgcctgagccaacttttttgtacaaag

SEQ ID NO: 243097 - DNA, 893 bp, Homo Sapiens
tagttttcaaataagtccgaaccatgctaagtaactgagcttttccccttttcttcaaacaacgtgccaaccaaataatggagtggtcccagataagtattgtacccatcttctgcaccagtgcttctacgtcccattttattgagaaggcatgcattcaaatatttcacgtaatttctaaaaatttggaaaataacggttggaaactctacatcttggtttgacggctagtcagttatgaaacacaggtatacaaaattggaagatttttgtaagtaaaccctttgtgaaagatataaacctttcttagtgtaataagcgaggtatctgaaaaaacgcaacttttgaaaaggaaatactcctaattatctgattcaggagtttccactttaaataatgggttctgcctcccttttttctattgggttaaactggtttcaaataaaatgggaacgctccatgcaaatgaaggatgatagatctgctttctaaatggctgttcaagaaaatagcctaaaccaatcaaaagatagaatgtggcctgtctcttgtgaatttaaaaaggtcacaatccacttttcagtgttttgagattttcaaaatgattgcattagctcttggcaatgctaaattatgttccttgcgaaccactatccagtttctcttgggccaagtccacctcctgctccgcaagaggaacaactcccagctggtggtacctggcggcagtgctggagaaacgccattttgtgactggcagagtacacctaggctttagaaaacaaaagctgcagaacgctgcaagtttaggattcaaagagcataatcaagagaaagacgtctcatagaaaatgtttctgagtaatagtgtaatcctactatgtttgagccaa

SEQ ID NO: 243098 - DNA, 579 bp, Homo Sapiens
gagatcctgtctcaaaaaacaaacaaacaaatagctgaagcccagctccactcacgttccttgcctggagccctggaagccaagcccactcctgcatttccagaaccttccagttcttcccacatccctctttactgcatctgttcccactgcctgcctgctcctttctacccagggaagttctccagcttactctggaaagcctctctttctggaaggccgcggagtcccccgtgttctggaactgtgtgcccaacctccctcctggagggtgaaggctacatctgctggagtcggggaggtcaccccgccctggacaccccctccatgcttcctgctccccaaatagcaccagaggcttccttcctggttcacacacttatggagcaggagaaggcgatgcttgctgggtcccaccaaccccactggctggagaaggaaagagagggaggagcgagaccctggccgcctctcgtgtcacctctgagaaccatgaggaggacctccgaccccacccctgccctgtggggcactcacgaaacatggtcatgaactgcttggggttgagccaactttttt

SEQ ID NO: 243099 - DNA, 482 bp, Homo Sapiens
ttggctgcctcttggatccactcagctgtgctttcatggctggatgatggaacactgtgcgaagagagatgggggccaggaagtagcgcttcatgcttagtacatcctccaaattgtctttgctggaggagaaaaccgtactcagccaaaagatcaggacaatatgacttgagtccacaaggacacaaacacctgagtagctgggcagcccttggcagggtctaagccaggaagtaaaaatgatctggcctagatatttaagggaactctaggaagaggcctaggtttttaaaatcctgtctctttgtcttaccataagaggctgagcctctcttcatttttttgaagggccacttgtgttttctgttctgggaacttcattcatttttctactgggttgttgatctttgcagtaatttctaggagctgtttatgtttggaggtaattggtcctttgtccatatatatgagatgtaagtctt

SEQ ID NO: 243100 - DNA, 797 bp, Homo Sapiens
ctttgagatgcataaagaaaacaaattacagctataaaatctgacaactaaagactattttttatacttttatacttctaataaactacaaacaatagaatacatgtttggaagaataaaattaagtcaaaagaaaccaaaatttttactagtaactacaaaaatcccagaaattttagtttaatttattgtaatacttgaattaaatggaaggggtgtgtttcagatactttgtgaccataaacttcagaattgtaatacaacaagcaccatgatacattagacctacagacagagatagggagaattctggatagaaattattagagcacaccaactaaaatagtatcaaatacagaagcaaaaataaagcaagggacctctgcagtacagaaatggacaggttcagagtaggagatggcactgtaccctggcagagtaaggagagaaaacaccttgagaaaatctatactgacacatgtcaagttccagaacactcaagaaccactttactcaaaagattcactaatgaagaagtaactacagatgtactttttaaattcttctcctatgtatcttacttgcacccatttcattaaagagttttttaagcttaaaacacctgggatgtaattcctctctccttcagttctttgatccaaacataaggcctaatcactgcttttattcacattaaccctgtcatcttcctctatttccctctccttctttcttcagcagactctgaagaaaactgacaagtagatgttaattccaaggaaaagcaagccagccaa

SEQ ID NO: 243101 - DNA, 606 bp, Homo Sapiens
gaatcaactttattgaacattcagggtcagtttctcttcttgctcttgcctgtgaccttggctggtgtgaggactggagctgctgcctggtacagggtggaggagatcttgttgatgtagtacagaccaaccatggagaagatgaagctatatggtgaagacagaaaggtcatggcaccagtgggcatttgccagcctggtgcctcctagggaagacactagcatcaaggaaagaatccaagttcaagtttaggaaaacggggagggagaacagagagagaggtaggtgtggaaggaaaaactctggcaccatcacagtaagatccaatgccaaaaaacggaatgctacaccccttacccagctgtcaagaacataccaggtggtgacacagactcggtggatgaggccagatgcaaagagagccaacaggaggcacaggagaactagggaggcaagaagaacaaggagggcaacggtcagaatggaaatactaggcatctgcacatggagtccaggagaaatccggggctctctgaatcctggggaacctgcttagaagggtaagcgtgactacagcaggaggattctgattaccttaatgccaa

SEQ ID NO: 243102 - DNA, 867 bp, Homo Sapiens
ttggcaccaagccacaagagacgtcataatcaaggaaacacaggctccagcatatctcatagacctaatgcatgataagaataatgaaatccgaaaggtctgtgataatacattagatattatagcggaatatgatgaagaatgggctaagaaaattcagagtgaaaagtttcgctggcataactctcagtggctggagatggtagagagtcgtcagatggatgagagtgagcagtacttgtatggtgatgatcgaattgagccatacattcatgaaggagatattctcgaaagacctgaccttttctacaactcagatggattaattgcctctgaaggagccataagtcccgatttcttcaatgattaccaccttcaaaatggagatgttgttgggcagcattcatttcctggcagccttggaatggatggctttggccaaccagttggcattcttggacgccctgccacagcatatggattccgccctgatgaaccttactactatggctatggatcttgataaagtatctgtttccatgtgtaatctcagcttagaagaaatctgtgtgggttgggttaattttggatctttgcctaataatgcatgttgatgttattgtgggtctgtgtttgtttttatttttatatgttgttagctgcagattaaccccagcccctctgtcttctgttaagtacagttgatactgacattgttcactcatcaaaccacatcttgatgctaagtaacatttcccatgagcctcaaaactgaatgctgaaaagctactagactggaaaacaaacactgcattatgtatgttaagtgactaatttaatttcattaaaaagcgtatgtgaacaatg

SEQ ID NO: 243103 - DNA, 1015 bp, Homo Sapiens
  misc_feature (127)..(218): n is a, c, g, or t
  misc_feature (223)..(284): n is a, c, g, or t
  misc_feature (432)..(527): n is a, c, g, or t
ctttgtacaaaaaagttggcaacacctccttccccaacacctccttcccaaacacctctttcccaaacacctccttcccagacacctccttcccaacacctccttcccaacacctccttcccaaacnnnnnnnnnnnnnnnnnnnnnnnnnnnnnnnnnnnnnnnnnnnnnnnnnnnnnnnnnnnnnnnnnnnnnnnnnnnnnnnnnnnnnnnnnnnnaacgnnnnnnnnnnnnnnnnnnnnnnnnnnnnnnnnnnnnnnnnnnnnnnnnnnnnnnnnnnnnnntcccaaacacctccttcccaaacacctccttcccaacacctccttccccaacacctccttcccaaacacctctttcccaaacacctccttcccagacacctccttcccaacaccgccttcccaacacctccttcccaaacccctcttnnnnnnnnnnnnnnnnnnnnnnnnnnnnnnnnnnnnnnnnnnnnnnnnnnnnnnnnnnnnnnnnnnnnnnnnnnnnnnnnnnnnnnnnnnnnnnnntcccaaacatccccttcccaaacacctgcctctcttcaaccccacaggccagagtgctgagacagagtggccttttggattcaataagtatcttgttctcttaaagactcagcaacgattttagaagtcgcagcagttttacatcacatgcagccaagatcagcttgctctacaagcaataacagaactacttagcacttcaaggttgaaagttcttcactaatggatccattgactaattgatcctggaaggccaaaggaataaaattcttttatataaataggaaaacaaaggcagagagctaaagcactaatcaaatcggggggtgttagagcaaaaacaggcttcagaaagagtattttaccatgctttcacatggaaaaaatcgagccccgggagcgatgaaaagcatattttctttgtttctccaagtttcataaccgttcagttgcagaacgaagaatctaaaaccagctctgggaaacaa

SEQ ID NO: 243104 - DNA, 934 bp, Homo Sapiens
  misc_feature (782)..(845): n is a, c, g, or t
ggttttagattcttggtttctgcaaatgaaacggttatgaaactttggagaaacaaagaaaatatgccttttcatctctcccggggctcgattttttccatgtgaagcgtggttaaatactctttctgaagccctgtttttgctctaacaccccccgatttgattagtgctttagctctctgcctttgtttcctattttatataaaagaattttattcctttgccttccaggatcaattagtcaatggatccattagtgaagaactttcaaccttgaagtgctaagtagttctgttattgcttgcagagcaagctgatcttggctgcatgtgatgtaaaactgctgcgacttctaaaatcgttgctgagtctttaagagaacaagatacttattgaatccaaaaggccactctgtctcagcactctggcctgtggggttgaagagaggcaggtgtttgggaaggggatgtttgggaaggaggtgttggggaaggaggtgttggggaagggggaagcaggtgttgggaaggaggtgttggggaaggaggtgtttgggaaaggggtttgggaaggaggtgttgggaaggcggtgttgggaaggaggtgtctgggaaggaggtgtttgggaaagaggtgtttgggaaggaggtgttggggaaggaggtgttgggaaggaggtgtttgggaaggaggtgtttgggaaggaggtgtttgggaaggaggtgttgggaaggatgttggggaaggaggggtttgggaaggaggtgttgggaaggaagtgnnnnnnnnnnnnnnnnnnnnnnnnnnnnnnnnnnnnnnnnnnnnnnnnnnnnnnnnnnnnnnnngaaggaggtgtctgggaagcctgatcagctatcacatctcccttgggaatcttgccttcttgcagtgagtattggcaactgtatgccaa

SEQ ID NO: 243105 - DNA, 887 bp, Homo Sapiens
gatggcctttggtattagctacctttttgtattcaatgaagacatgaaaaccacatcccaacacagttctacattcatttcccctctcaacctcttctgacccattcttgtctcaggccctgctcatagaacacccaaaggtgccctcacttccctcatacaggtagcttttactctgagactaggaatgtctttgatgactaatccctacgcaaaaagatgtgccatcacttagcaaaatagaaagtaagaaaggtgagagggtgatgaccacctccagtctagtgtggctgtagaggctgatttccagctaccgatgccccttccatctgagaaagggcccctgggcagatgccaggcaaaagtcatttcactagggctattctgcgttccacagggactcttcttgctaagcacaattataaagaaaatgacatcaccactctgaatcacaggctgaaagcaaaattgggttttggttgattctccacaagaaacacagttatagtgatagctagaatatctgtgcctttggggtttgcttatcacacagctgatattggtacatatgccaaaggaacgcacaatcacatatgctaccagaggtgagtggatagctaggtaatcaagctttaatataagactttacttttacatattaagtacctcaatctagtttgcagagtaaggtcatcacacagtgccagcctcttcccaggacagaattacatcattgtttatatagtatcaaaggactaagaaattttcttaaggtttatcttatacaaagcattttacactactgctgctaaccggacactacctgttttgttcactttaagtgacaaaattcttgcctgcctacttgtccctttcttgtctataac

SEQ ID NO: 243106 - DNA, 602 bp, Homo Sapiens
ggcaaaaatccaacgttgggtggacagaggctggcaagtcatgacaaaaaataccagtaagattcattttactgtgcgacactgaacaacagtattcaaacgaaaacttcactggtctgggaaaacaaacaatgaatgctcaggcccccttctgctcctcaaatagaagagaaacagaagatagaaaaccggttacatttcagatgaaaaaagggcgaagacctatctcaccgtgaaaagctgaccgaggcacaccctgtagggtggtaaacggttgcctaccccagaaagacctcagaaggtcgtatgtttatttaacaaacattacgtagcactcatgggccaggtgcttcacagacatgacctcattcgatcctcagaacccccccgagagaggtaccactgctgtctccagctcgcagtcggtgggacacagaaagatgcccacactctactgctgactagcgggaaaactaggacttaaaaaatatgagcactggctagttaaggagacaggggggtcccagatggggaacagggctcctctctatgcctctatattgcttatgacaacacatttatcatttaatgggctgggtgtg

SEQ ID NO: 243107 - DNA, 628 bp, Homo Sapiens
ttggcagaacatcagattttattcaaaattttttaactcactgaactttaataatcaggtcacctgtactctagtcagcactgtatatattcttggagtttgtacatgggacttagcaaccacactgagtgaggtaaaagcatttgatttcagatctaaaattcgtaacaacctaaatttgagaggtggctgaaatgtgatgaaaagcaatacgaaaagacaatgtaaactttgaaaaggattttagagggaaaattgcatagctttttgtaacatttacttaattttaaaactaaactcatacttttgctatctttttaatatttatctcgtttgggagtatacgtgtttttaaaatttgtgttttctatctgtttactatagtgtagctactggcttcatttaataaaaataaatgattttgaaattaaatataatatagaattcacattttatatagctctctcaaaaattaatttttattccttaagcattttaaaaacattttaaaaaatgttttgtaaatccaggtgtattttaacaattaaatgcctattttgttatatgttatacttttattcttaattctgaattttgacattttcacacaataaaaataatttatatc

SEQ ID NO: 243108 - DNA, 1011 bp, Homo Sapiens
ttttgtacaaaaaagttggttcagtcttgccccagaggttccctcaatttcagcagcaccgagcggtttataattcattcagttttccaggccaggcagcccgctatccttggatggcctttccacgcaatagcatcatgcacttgaaccacacagcaaaccccacctcaaatagtaatttcttggacttgaatctcccgccacagcacaacacaggtctgggagggatccctgtagcagacaacagcagttctgtagagagtttaaatatgaaggaatggcaggacgggctaagggcacttctacccaacattaacatcaactttggtggactgcccaattcttcttccccctccaacgccaaccacagtgcaccaacgtccaacactgccaccaccgacagcctgagttgggacagccctggcagctggacagacccagccatcatcacaggtattccagcgtcttcaggaaacagtttagactctcttcaagatgacaatcctccacactggctaaaatcccttcaggccctcacagagatggacggccccagcgctgctccatcacagacccaccacagcgcccccttcagcacacagatcccgctgcacagagccagttggaatccctaccctcctccttcaaacccttccagcttccactccccacccccaggctttcagacggccttcagaccccccagcaaaacccccacagatttactacagagttcaacactggaccgccattaggcaaagaggagcaaccattagaaaatgcaggatttgtcccactctgttttctccctctcagcccaccacccacagctccctttctcatctcttatgttctgaagaatccagtacctgatcaattttttttctccctaaccccagatgcatgcgatcacagggtcattaccatctctttattaattgtaaaaatttttgttgatccaccatttgagtgacacggttgaaatgttcctaaaatgcctttttaggagag

SEQ ID NO: 243109 - DNA, 958 bp, Homo Sapiens
ttttccagttttaatttgggctggtggaaaacaaagatcagacagtgtgacatctaataatctctaccatgaccaattctgataaggtcaaacacttttatccctcaggaggtatcatacaacattttctttagtttcgtttgaggtgtatgaagattttccacttgtgaataaaatcctcagcaaatccttatagggtgtttttcttgtgtgacatggagccaaccagctaaggctctcagtaaggccggctgccagggtaaatcatatctttcctggctttacacgtgagccagatgttggggattttctgagctacaggatggtggggaaaaaggtttttgcatttcctgtgttctcactccagctctcaagctttcaagattcatggccagtcaacagtgtcatgaactggcctgaaaatattccagattaaaacccactgacaacatacctgactctgccattgcctcatactgtttgtcagatcaggatctctttgtactgctgcttcccctgacagttccgagggcagtcagagaggcaggtgtaatctttaatcttctgaagcctgaaattcagtggaattcaactaccactttaaaagtagcttattttctcgttaatattagtagtattttatgaaatttgttaataaaatactattagtaccaagtcaaatatgataaactttttatcatatagacaatttagaaatatgtataagtatgaatgtatatgtacatttcatgtatatgtaaaaatccacaataagtccactatctgaggaaaactaacatacaccattttcaggtatttccagggacaagtaaggaattccctaggttcctaatgaatgtccacatatgcctacatatgccatcataagcatatttgtttgtatatatcaacattcatttaaacattctatcataagccaacttttttgtacaaagtt

SEQ ID NO: 243110 - DNA, 542 bp, Homo Sapiens
aagaaaaaaatgacccttggattactaatacagagttcagccctcctttagtcactataaaacggactccatgttttcacaccactcatggtcttccaggttatagataaactttgtcctatgtgtctggtttgcgggcacagggtccctccccaggttgtctagggtcagagtagaggcaaagaactcactggtgctcagcccgccctcgtggtttttgatgtagcgtttatagtttttcctcaggcactgccacgtggtggtgtacaggatgaaggcgaaggatttgagcgcgatggcgatgctgacatacaggtatcggtagaccacattgtcgtagaggacgcaggcgccttgctccccacagaacgtgctccagaacaggcaggtggagtcgatgccagccccgaagatgaggggtggagggatgaagcctgttaccgggaaaagaatgttaaggttctggatctggtggccagtgctcccctgttcctgtctctgcctagcttttcttatagcactgctaggcaaatatgtcccaa

SEQ ID NO: 243111 - DNA, 527 bp, Homo Sapiens
caaggatcaacctgtttaattgttcatattttattcctgtatcagtagattaagaaagtaaaattttcccaagcactgatttatagatcatgtttataagcagcatacaaaaagttaagtttcataaacaataacattcagtgatctacttaaatccaattgtaatccttaaattaaactaagggcaataataatttaatacatagagtaaatacacacaaaacctgtgtattcagaactacaaacatggtttccatagccacgtatggttttagtcaaggacacatttccacaatgaacaagtacttacaaatatgttaataaaacactaacccaaatgcttaccctgccatcagctttttaaacaatgccattcctgctactgaaagcatttatttttagaagcttgaatctgctctgggaaaacgggttctcctaaaacttaacaggatgttataaatccgaaaagattttaaatcaaaaagccttccaacacagcattattcatgtgaaacttgctttctttc

SEQ ID NO: 243112 - DNA, 813 bp, Homo Sapiens
  misc_feature (322)..(332): n is a, c, g, or t
  misc_feature (635)..(674): n is a, c, g, or t
tttctattgtacaaattaattcacaatgttatatctttgttctcttcccttttatgtcttcaagcagataaattattttactttcacagtcttgtcataaacttgttaacacaaaagagcttagttaacatatgaatgctgtgaagagatagtggtaaacaaaattgcatatctaaataatagaagttaataaataccccaaggctaaattcactctttctgtcatataattaatctagttactactcttggttcagatgatggccttcaaagtaccctgcaattcacagccaccattaagtaagaaagaaaaatatatttnnnnnnnnnnntagggcccaatgacagcaatacaccactcacctttcagaaacagaatcatactcctggtgttctactaagttttaatttagactgctttaggtacaatagaaaagaaacctgaaaacacatgctgttttagtaacaaataccaggttgccagattcgttggcatacctttgcaaactagaaactagaaacaggagaaaccctttacaggagtaggctacagatatgaaagctttgagggcatgagtaatggcattcaggaaagtgttttttcacattggtacatttttagagtttgtcatttnnnnnnnnnnnnnnnnnnnnnnnnnnnnnnnnnnnnnnnntcccactaaatttgacaaaaatagttgcattactaatggtcacgtctatttctgtctcacatagagagcattaagacatttaggcacttgttttttcctcctaatactggtcttttattttaatctacattaaatccaa

SEQ ID NO: 243113 - DNA, 937 bp, Homo Sapiens
tcaacttggtctaacccactatttcccaaacttacttggccacagaaccctctattcacctaacaatatattctgacaaaacactcttcaggaactgcttcacccagaaccaaacaggtgagttttaaaaaatattatagcataatttcaaatgattaataaggatacaaagagacttattttcctgtcttttgttattttgtctacttattttgttctgaataatcttctatcacatttccccttctattcacaaaccttcaactcgagttaccctttctgatacctttgttcaagaatgttaattcttatcagaaatccatggcacactagtctggaaaaaaataattttgtgtctttttaaattcctagagtacctctccacttcaatcacaatttaagtccagggcaggtatcctgggctcctagcaaacactacaccccaacaagagtttgggagccaaattattttgcaaacccttaagaacacaaactaaaactaatttatccttatatctctgcaaaaattagcattttgaacatccaacgaaacttcaagtttgaggataatgggcttactgacctgacctttgatttcacgtaactaacaacaaatttctttaaaatctggttaagaaatatgaaaatattgaaaagtaaacataaattccacaaagctgaatggcagcaaaaaatatttcttaacatcaagaacatatacaaaagatgatcattaccacccaaattatctctgttgctcaggatttcagttataaaaatagccaaatcaagacaaagacaattacagcttaaaacgaaaagctacaccttcttcattaaaggtgagcatcttgtcacactgtgcatatggagagagaacaagtacaaggcacgggagaactaccatgtcaagggacagagctttttcaaaatccaa

SEQ ID NO: 243114 - DNA, 925 bp, Homo Sapiens
tacaaataaacagccagatgaagagataccgaggggaagctctagaagggtccggcgcataggagttgctgccctgtggcgttgggtttgcaccctcctggcctgtggatgtgttcttgttcaccttcctggaagcccccaaactcagtccttttggatttttatggaggcttcattacacaggcatgaccgattaaatcattggcaattggtgctctactcaatcttcatcccctctcccttccccagaggtgaggggtgggcctgtaaattccaaccctcagagcaccaggtttgttcccctggcaaccagccccccatccagtggctatctgggactttccaaaaatcgcctctttaacataagctcaggtttggttgaaaggcacttgttcctccttagtacagtggttagtaaaattaactaattaaaataaaatgaaagattaaactaaaagaaacgggcttgttataaataacaaaagactgtctttcacctttatcactctggagctgttctggagctgtttcagaaaccaaggacaaaaggtcaaatattttaacaaaacatactattattgctctagtcccttaggaaattacatgggttataagagctgtaagccaggaacatatcgcacccagcatggggagagatggagaggcagtctccaaggatctgggggagagacttcggcttggttcattctccattcccaaaacgccaatgtctcaaagcttcctcttatgcatccaggctgaggctccttgggaaggtttggagctggagaagcagctgaatgactcatgcctaaggggccggtgccattcagatttatgacttccttgagaacaaagattatatcttattcacctcaatatcccacatctgatgctccataaacgggttttgaattgaatccaa

SEQ ID NO: 243115 - DNA, 933 bp, Homo Sapiens
  misc_feature (67)..(79): n is a, c, g, or t
acaaaaaagttggctggaaggcaatctttataaagaggacatttacccatgccagaaggctaacctnnnnnnnnnnnnncgcttgtgctggtgaggcacttggatacatactgatgctgcaagttcaggggatttttcttactcttaggtttaaccaagaacactgagcagggaaaaaccctgcctttcctaactgcatgtattttttcctttttggaaaggtggtagagactcagaagctttccttgttttcttcaggcctgctcccagttttcttaacagtttcttttgttgctttctctctcccttgttgctttccatggcagtaatcctcctagagtccaagcagtctgttgtatggagcagggtgtgtgggttttctgggcccatcattatggctgcttcagagtcagaagaaagccatagggcagtaggggagctcctattgcctagcccctctccctttgtggctcccactctagctgcctatttttgctcatcagctggtgagtcagtatgggccagcagttctccctccctaagcccttgctactttatgggttagctttgcaggtttggtggcttgaggggtgggggcaactcaccactgccaggtaactccctgaagggtgggagtggattatcttctaggctcttacccgcggtagggaagggcatcaacactgtcttccttccattctcctttcccccatcccatttagtgctgccacagggcagaagcacacaaaccaaccacacagtctctgacttctcctaagcactttgagttgttgaatggggctcaggggcaagagtttttgctgccctccccagcgtggtcacagggttattgaactgcctgcacttgtttctcatgcaactccagcattttccccagaagttgaactatggatagcagcttggtatggattt

SEQ ID NO: 243116 - DNA, 908 bp, Homo Sapiens
gccagtcacatacatacaacatgcatgttgtacactgcaactcttaaaagagctgggaatcaggaaataactagaataatggtaggacaaaaagaaatgctgcagtctctgcctttaaggtgacttctcttcataaatacaagggaagcaggtaggaaacataatttgcatagttttcttccaaaacttgcaaaaaagaaatctccaaaactttaaccatgagttctatgcctcctgaccttactggacacagccaccaaatgaggtgcagctcttaaatgacaaggtagctagtgctggccagtgccaagtgtggaattaactgagtataattagcggtcaacagtctgcaagattctggcctctttgaactgtagtaggtgcccttaagaggttggttgaaggtttctttttgtctcaccttagctatttttataagcaccttagtgaaatgaaccaaaagcactttcaactgctgatgggtgaccttgtttgcaagaattgctcaattttgcttggaaatggctgagacagcaaggaagcatttttaatttaagcagtgttaatattcagtcagcactctctccctctcccctttaacagatgagaaaatgattaatgcaagggaatgtattccacttttcatgtctttactcaacctcatttcagagaggtggctactgacaagccctcactctggagcaaggcccagctgtctgatatttatgacctgattttcaggttaataataaataaaattctataaaacacattacagttatcatcagttattatctgtgaactcttaccctcctccagtctatttattttctttttgatgttttgaggaatccaaaagacagaaaagctcaatctatttcttcaatctattttttccctgaatccaa

SEQ ID NO: 243117 - DNA, 527 bp, Homo Sapiens
ttgggtttcttatagccctcttgagcatattttgggaataggagaaataaaagttaagagcatacaattaagacaggcacggagaaccagaaggcctccatggtagctttgaaggagtcccttatctcttggaatcacagagcaggtaagggtgaggagcctctggtagacacattcttctaccacctacctggtaacaggttgactatattcagtctcttgtcatggagggtacaatgctttgtcctcacgggatatattatggatatggatttgccttccctgaactcagggcttctgatggcacactgtagattttatggatggacttctccatcaccatggaataccatccaacttcattttaacaaggagatgcatttttttggtaaatgggcatgtgggcaatgggcccatgcgtgcagacttgacaaattttaccatacggtccatcacccagaagcagctggctttttaggtggcatgacctgctaaagactggttatggcacaagttggagacagcgt

SEQ ID NO: 243118 - DNA, 1321 bp, Homo Sapiens
ttggctttctgacaccgtgctctagaaccctgcctgtggtcctgagcactgatcagcttagctagaccatggttgactcttcttggagattttcacttggtcctagaatgtggcaacgtagttgtgctcgccagaacgtgggaccaaattggcctcaggtgttgagtccagacttctgcttttgagagagggctgcactttttcatggtatttctaggggaggtggtaggctgcatgtgccacttggtcttgttgtgagtatgctgacaccagaaactcagagccagcttgtggcaagcagttggggtggggggtctctgacttgctcaggacaaactaggccagtggttttcaaactgcttggcagagccctgaagtttcctaggggttgcctcaggagtccttggggagatgaagggggtggggagctgagcaggctgggcaatttgccctcaaacagaacagctccccttgtagctgtcttacatattggggttcagggtaagattttatttgcattaaggggtttgctgctgaaaaaaagttggaaaaccactgactagaccatcggctccaaattggagtctgtgcttccttccccaggtatggagcacactcttcaccctaccctctaccacaggacacatatccctgttagcattccccgggacctttagccaagaggagctgcagggaccatggccaggttaccaaaatgccctgctctgaagccttgacacctgggtggaaagagaggctgttttctgaaagggtaaagggcttggtctggattcccagaagcatagcttagatgggaccacagtgggcaattttgacctgtcctgcccttcttagcttgaagggaaaccccagagactcttctgtcagggaaaactagggactctcttctagagccatatagttccttgggattagctcttggccaagaaggctgagtatggttcccaatttttaaatccatttcattttttaaaaaataagggaaataaatgtaattgccatttttcaaagattaaagtaggaggagaggggtttcttgctctccagagccccaagggacaaatagggactttgtttaggccaaggaaggagcggaagtagggcaactcggtcctgcgattattaatctcactctctacttattctagggcacacaaacactattttacttttttaaaatcataaaacggcagaacagatttggttagtttagaagaaaagaaagctctataaatataaatctatattcctgtattttatttaataattataaataccaagttcatttgacttttatttt

SEQ ID NO: 243119 - DNA, 452 bp, Homo Sapiens
tggatggacccaatggctaggcttcctcaggtataggacagagaggagaaataacaaattataagaagatagtgctttatctaaatgtgtatgacattgctttcacaatctgatatcatgttatgaaagccagatgtgtgatttggagcaaagtttaaagaaataggaataatcaaaataatttttctttcaaaaatctaaatttcaacggctttcaaatatttcttaatctactcatgatttttgttgctctgcttcagtctcagcctttttctttttgatattttggctgccaaaaagcctgagtccttattctcaggagcctgattattatctccgataatggttctaaacttagtcatttttgtccatcattattattattagttttgaagtttaaagaatagcaaaatttggctctaaaaatgaaacagactttcatcaagtaatac

SEQ ID NO: 243120 - DNA, 617 bp, Homo Sapiens
actaaaataaggttatttacttcaaaatgatacattggacataatctgtatatagaacaaagcaagtaatggtaaactcttaaggcaccttttaaaccagatgctgtacaaaatacatttagtgtgttacacgtcaaagacgaatttatatttttggtgttttacaactgcctgataaaactgcttgcttttacccttctttcaatgcctatgtacagtttcccctaatgaagcaataatgatatttccattttatacaatatatactacattttagtttttaaatgggccaggacaaaggtcactaaaagggcttaaataattccatagaaaacagaatacagagcataagctaaaattacaatagttaatcctttacaagagccatattcacatactttccttatgggaccatcattacacgtggcttcacaggatgctgtgctggattttggttcttaggaacacacctcctccctgcagtttccactgtgactctcacagcagcacactaaggcaagagacgagctgtggcactgctattttaacacctgactcaaagtcagtaataaatatgaccacttttaaacactacaagccaacttttttgtacaaag

SEQ ID NO: 243121 - DNA, 864 bp, Homo Sapiens
ttggcaagaagagcctgaacctcaacatcttcctgaagcaatttaagtgctccaacgaggaggtcgctgctatgatccgggctggagataccaccaagtttgatgtggaggttctcaaacaactccttaagctccttcccgagaagcacgagattgaaaacctgcgggcattcacagaggagcgagccaagctggccagcgccgaccacttctacctcctcctgctggccattccctgctaccagctgcgaatcgagtgcatgctgctgtgtgagggcgcggccgccgtgctggacatggtgcggcccaaggcccagctggtgctggctgcctgcgaaagcctgctcaccagccgccagctgcccatcttctgccagctgatcctgagaattgggaacttcctcaactacggcagccacaccggtgacgccgacggcttcaagatcagcacattgctgaagctcacggagaccaagtcccagcagaaccgcgtgacgctgctgcaccacgtgctggaggaagcggaaaagagccaccccgacctcctgcagctgccccgggacctggaacagccctcgcaagcagcagggatcaacctggagatcatccgctcagaggccagctccaacctgaagaagcttctggagaccgagcggaaggtgtctgcctccgtggccgaggtccaggagcagtacaccgagcgcctccaggccagcatctcggccttccgggcactggacgagctgtttgaggccatcgagcagaagcaacgggagctggccgactacctgtgtgaggacgcccagcagctgtccctggaggacacgttcagcaccatgaaggctttccgggaccttttcctcc

SEQ ID NO: 243122 - DNA, 751 bp, Homo Sapiens
  misc_feature (558)..(580): n is a, c, g, or t
ttggcacctcgcccaagcgcaagatgagaagacgctccagctgcagctcggagcccaacacccccaagagtgccaagtgcgagggggacatcttcacctttgaccgtacaggtacagaagccgaggacgtgcttggggagctagagtatgacaaggtgccatactcctccctgcggcgcaccctggaccagcgccgggccctggtcatgcagctctttcaggaccatggcttcttcccgtcagcccaggccacagccgccttccaggcccgctatgcagacatctttccctccaaggtttgtctgcagttgaagatccgtgaggtgcgccagaagatcatgcaggctgccactcccacggagcagccccctggagctgaggctcctctccctgtaccgccccccactggcaccgctgctgcccctgcccccactcccagccccgcagggggccctgaccccacctcacccagctcggactctggcacggcccaggctgccccgccactgcctccacccccagagtcggggcctggacagcctggctgggagggggctnnnnnnnnnnnnnnnnnnnnnnnaggtccctccacagctgccacaggcaggtgagggacccctgagaagatgccaggacttatagtaccctctcaggacatggacagtatgtgggggccaggaagttatctcctcccgggtaaagccatttcgtcctctccagtttggggcggaatgaggcctgctccctcttg

SEQ ID NO: 243123 - DNA, 146 bp, Homo Sapiens
ttattttttcagataaacacatggatttatttaaaagcctacaagcactacagaggagggtagagtgctattacccagagatactgacccagatgggaatcagaaaagccttccttgaggaagcagtattttcatctttgaaccat

SEQ ID NO: 243124 - DNA, 638 bp, Homo Sapiens
ttggggcaggttccgcggcaccgagcccgagccccgagacggcattgaacctggccacatcccaggtaccgtgaacatccccttcacagacttcctgagccaggaggggctggagaagagccctgaggagatccgccatctgttccaggagaagaaagtggacctgtctaagccactggtggccacgtgtggctctggcgtcacagcctgccacgtggcactaggggcctacctctgcggcaagccagacgtgcccatctacgatggctcctgggtggagtggtacatgcgcgcccggcccgaggatgtcatctcagagggccgggggaagacccactgaagctgggcaggacacaggcgagctcaggtgatgccggccaccagcaatgcctggcctggtagctccgcttctgctttcaccaagagagtgtttcttcactcaactcaggtggcatttggggtgacatctcaaaggccaggaattccgttgacttgttggctgccagtaggggcgggaggaaaggcggaggcgagccctggaggagggaggccacaactccgagctgcccacctggtgctgagctggggccccgcctcctttctgttttatttttgaggaaataaaataaccaagtgct

SEQ ID NO: 243125 - DNA, 932 bp, Homo Sapiens
ttggatctcttgttttctggtatatgccatctttctttaacttctctaaaatattgggtatttgtcaaataaccacttttaacagttaccattactgagggcttatacattggtgttataaaagtgacttgattcagaaatcaatccattcagtaaagtactccttctctaaatttgctgttatgtctataaggaacagtttgacctgcccttctcctcacctcctcacctgccttccaacattgaatttggaaggagacgtgaaaattggacatttggttttgcccttgggctggaaactatcatataatcataagtttgagcctagaagtgatccttgtgattttctcacctctttaaattcccacaacacaagagattaaaaacagaggtttcagctcttcatagtgcgttgtgaaatggctggccagagtgtaccaacaaagctgtcatcgggctcacagctcagagacatctgcatgtgatcatctgcatagtcctctcctctaacgggaaacacctcagatttgcatataaaaaagcaccctggtgctgaaatgaacccctttcttgaacatcaaagctgtctcccacagccttgggcagcagggtgcctcttagtggatgtgctgggtccaccctgagccctgacatgtggtggcagcattgccagttggtctgtgtgtctgtgtagcaagggacgatttcccagaaagcaattttccttttgaaatacgtaattgttgagactaggcagtttcaaagtcagctgcatatagtagcaagtacaggactgtcttgtttttggtgtccttggagtgctggggtgagggtttcagtgggatcatttactctcacatgttgtctgccttctgcttctgtggacactgctttgtacttaattcagacagactgtgaatacacctttttta

SEQ ID NO: 243126 - DNA, 947 bp, Homo Sapiens
cattcacacggtcttttggatcgttttactcttttcacttcttcaaccattctccccactgagctgaacaagggaatctgctggccatcttgggctctaggaagacctcatcaaggtgccactctgaaaggggcacttctggatgagctgacatggagatggctctctgacttggatccagagctaggaatcttcaacttggcatcagcaatgtccacaaagttgtgcttggtgagtttgagacagtgaatgttgagaagagggcccagagctccctgtgccttgggatggctatgcacctgctccaatgccaactggtaatacaaagccctggaaaaagtcttttgtatgcggtaatacacaagggccaagcccccagtaccgaacacattgccgaaaaggaccattttttccttgaggcactggcatcctgctgcctggatacttttgccacctcacagcacaactctcttgaaaatcatcaaaggcaagttgttctgtaagcgacagaagcaccatgctgcagagagcatgaggagcccttccgggcgtgggatggtggcggtaaatcttgatctccattttaaagaaaactaaggaattactgaattaagtatgacagataagaagtggccactgcttagtaattccttagtggaaatgcccacaatggggactggatcccatgcagtctgttcccagagccactcttcccgctccaccacactgtgcttcagagcagaaaacataccacctgccgtcctgcatctgcccttcatctgtccactagactataagttccctgaggacaggaacataccatcagtgtacatacctttcatgctctacacagtgcccagcatagcataggtgcttaatgaatacttgttgaatgaataacccaatctatataaaagtaaggaatggtatagcaacaaagaagccaa

SEQ ID NO: 243127 - DNA, 889 bp, Homo Sapiens
ttggatttccaaataagatctcattcacgggtaccagagatctttttgttcagggacacagttcaacccgtaacaggagtattgggaatgatccccctcctgcactgctgatacccgaagcgacagccccgatcctgctcccaccccggccctgcctatgcctaaggaggatgcgcctagtgacccagcactgcctgctcctccaccagccactgctgtacacctaaaactggtgcagccctttgtacgcagaagcagtgcccgcagcctgcaacacctgtgccgccttgtcatcaaccgtctggtggccgacgtggactgcctgccactgccccggcgcatggccgactacctccgacagtaccccttccagctctgactgtacggggcaatctgcccaccctcacccagtcgcaccctggaggggacatcagccccagctggacttgggcccccactgtccctcctccaggcatcctggtgcctgcatacctctggcagctggcccaggaagagccagcaagagcaaggcatgggagaggggaggtgtcacacaacttggaggtaaatgcccccaggccgcatgtggcttcattatactgagccatgtgtcagaggatggggagacaggcaggaccttgtctcacctgtgggctgggcccagacctccactcgcttgcctgccctggccacctgaactgtatgggcactctcagccctggtttttcaatccccagggtcgggtagacccctactggcagccagcctctgtttctgggaggatgacatgcagaggaactgagatcgacagtgactagtgaccccttgttgaggggtaagccaggctaggggactgcacaattatacactatttatttatttatttatc

SEQ ID NO: 243128 - DNA, 861 bp, Homo Sapiens
ttggggaaaacaaaggctcaaagacagggcagagttcagaccctccgttcccaaagtggtgccccccacccctcccaggactgtgtccacacagtggtgcccgccagggtgggcaggaggtgtccatggacatgactacagcaaggccaggggccgagagggaagggtcagggaagactggccagctcgaggggatcacagaggctgccctggccttgttcctagcggacaaaataggactgacagctacagacaaagccaggcacagcccagcacaaagacagacagccgaggaactgtggtgccccagtagttaagggccagaaagaacatttttaaagatgtcagggttggctgccagaatcctcttgtacaacattccatgactgggagttgttggggacttgagttccaggctggctctgcccagccttgaaagcctggctgggcctcggttgcctccttggaaaatgaggggctagactgaggccctgggggtcctggctgtgcccagagcctgccgtgccaggcccacgaggagaggtcagggctgggggtgccgagccagcttccccaggctccgggtcaggttatccaggtgggagggaggcctagcacctcccccactccgaggtctggcttctagaatctcctgcagaaacacaaacccatctcactacactgtaaacacaacatccttggaattggaaatcaatggcagatgcaggcagattcggcctccaaagccacagaagggctgggagcggaccggacccaggagttgccacgggaagtgggtgcctgggagctcagcacagaggtggcctctctcaggcaggctgggccgcagcatctgtgggc

SEQ ID NO: 243129 - DNA, 919 bp, Homo Sapiens
tttaatttttctaaaaagatgcaacaaataatttcttatggtaaaatgccaatttttgatttgtataaatttataggttaccaaaatgatgtcataatctgtggatacaatgtagaataattaaatcgagctagtttaacatatccatcacttccaaatacttagcattttgtagtgagaaacatttgaaatttactcttagcaatttggaaatgtataatactctactaactatatttcaccacactgtgcaacagacctcaaaaaaattataaaatggattcttcctgtcggagattttgtaccctttgaccatcatttaaattttttaaatgcaacaaaatatcaatttcaaaacagcatgaaaaattgagtgtgtttaaccatattcagctgataacagggcaaatgaattgaacagaataacattctattccatgtttaatgaactggcaacaagagaaagttggtggaagaaaggcagaggaacttgggcaagaattagaaccaaggggctccataatcatctgacatcagttcccatgttgtatctatggttagaaatgtacatgataggaactccaagaatcttaggattcttcttttaaggtcccaggttcgtggctacaacacttatgctgagtaactctctgtgctaagcagtcatctgcatagattccttcctgtgcgtggtaatttggtaatcgttcaaattttggatccttggcaatcctttaagccacttgatacttcgccccaatttctcagtttcagccattacacagttacacaagggatacacttggcatatagacagttcatcactgattgcagtatgtcttatttggctccaatagaaaagttggtaacgctggaatcaaacaggacgtggtaaggtggacccagctgtgtaatccaa

SEQ ID NO: 243130 - DNA, 856 bp, Homo Sapiens
ttggcaatggttgcagcaatcagagtcccagcgtttgtactcacagacaaggcaaaggtaccagcttttctgtttctttgaacctactgcaaaccaagaataactcatgaggtggtaccaaagatgaaagcccagacttcagtaatcttttgaaccagacgtggatggtgctgaattgttgcttggatggaaaaagggctgcccatgttgtgctacactatgctaaaactgtaatttagtaagaccttgggctgcctcttctgtcttaactggttctgcagcttgtccttttgcccacatagggcctatttcatgtactgttagttttctctggggactctttaactttagagccatttctttttcttcaaactgatgaacttttgtttgaaaggcataaggagtgaaaagctccttgaaaatccaggcgggtatggaaaggtgctgctacccatatctttttgactttctttgtttcatgactttaactcatggcatctcctttgtagtaaaaggagacagaccattaatttcagcatttctttgtgatttataagtactgagcatgaagtacttgtctgcccctcatttcaaggccagagttattttctatttatgtattagtctaggctgatcttttagggcacaatagaaaccatggggcgtggagcatgagttgtgaatggcagggatcattctgggtaaaaaaaacctagaatcatttctgatgtgcaacattgtcaagtgaagaagctaacagttcaactaccgagattatttgataacctgggtttttctcattcatccatcaagcaccatcaaccagtcagccattattatttatatatgtattacc

SEQ ID NO: 243131 - DNA, 890 bp, Homo Sapiens
ttggctttggccactgtgggcggccgtgccgtggggcggggcggcagccgtcggtgtccgggcttgcagctccacggccgccccggacggcgtcgagggcccggcgctgcggcgctcctattggcgccacctgaggcgtctggtgctgggtcctcccgaaccgccgttctcgcacgtgtgccaagtcggggacccggtgctgcgcggcgtggcggccccggtggagcgggcgcagctaggcgggcccgagctgcagcggctgacgcaacggctggtccaggtgatgcggcggcggcgctgcgtgggcctaagcgcgccgcagctgggggtgccgcggcaggtgctggcgctggagctccccgaggcgctgtgtcgggagtgcccgccccgccagcgcgcgctccgccaaatggagcccttccccctgcgcgtgttcgtgaaccccagcctgcgagtgcttgacagccgcctggtcacctttcccgagggctgcgagagcgtcgccggcttcctggcctgcgtgccccgcttccaggcggtgcagatctcagggctggaccccaatggagaacaggtggtgtggcaggcgagcgggtgggcagcccgcatcatccagcacgagatggaccacctgcagggctgcctgtttattgacaaaatggacagcaggacgttcacaaacgtctattggatgaaggtgaatgactaaagctttgctactggggctgaggattccggataccaagacgcaaacactttcactttgagctgggcaaatcttacttggcatcaacttggatggctcgcatatgacaggaaactggattgccaaggcatggcagactgagctggaggaagatgtcagaaatgtttgccctgaaatcagttac

SEQ ID NO: 243132 - DNA, 925 bp, Homo Sapiens
tgcaagtaacagacatccattgaaactgctttgagcacaaaagggaaatttatttataaggacatagagatactttctcagagcccaaggttagaaagtgcagacactgaggtctggatcctggagctagaaagcctacagaatcaaggcagctactctcttagtcaatcagtcttactctctccccatacccacctctctccctgcagcctcacacagtcttttaatctgcatatctccagaggcctgttgtattcctctctctttctttctccctctctcttgctccgaaagacagttatacagtggctacaagtatgagctcatactacctgtgttcatgcctggctctgccattaaccaactatatgaccttggataaattacttaaccgctctgtgactcagtttcctcttctacaaaatgggaataagaagaggtcccacctcataggagtattacaaggattattgaattaatctaagacatggcttcccactgctcccaagtttacacatctacctagtctatctacaaatatgtcttagtccaagaccacacttctgagaaagacaacctggctggtccagcttgagtcagctgtggatctttgatctactgagccacagcctgggagccaagttaaaaacctgatcaccagggcccatccttgaagataaagtgacagttcttagagaaaggggccatgggctgagcagacaccagaaacaaaaacctgctacagccactaactaaccatgcagccatgcttgtgggcctgcctaggattacagctgggccttttcacctcatggccctgagcaaggctcgtatttaaaacacacagctgcctgtcagactgcaatgacacctaagggagccaacttttttgtacaaagttggctattatagaaaagcattgctc

SEQ ID NO: 243133 - DNA, 722 bp, Homo Sapiens
aaattgatgagcaatgcttactataaagaaaaactttgtacaaaaaagttggctcgctgcagacccaaggaatctgaccatgatttggcgccgcgcggcgctggcggggacgcggctggtttggagcaggagcggctcggcaggctggcttgacagggcggcgggagctgcgggagctgcggcagctgcggcctctgggatggagagcaatacatcatcatctttggagaatttagcgacggcgcctgtgaaccagatccaagaaacaatttctgataattgtgtggtgattttctcaaaaacatcctgttcttactgtacaatggcaaaaaagcttttccatgacatgaatgttaactataaagtggtggaactggacctgcttgaatatggaaaccagttccaagatgctctttacaaaatgactggtgaaagaactgttccaagaatatttgtcaatggtacttttattggaggtgcaactgacactcataggcttcacaaagaaggaaaattgctcccactagttcatcagtgttatttaaaaaaaagtaagaggaaagaatttcagtgatgtttatactaataagtttgctagtacagtgtcagttatttaaagtggtaatgcccgataatgtcttttaaatgtttgaggatgttttaaatacatgcattgtcttcacgaagaagatgtaaaaataatgaacaataaattgcggtgg

SEQ ID NO: 243134 - DNA, 919 bp, Homo Sapiens
aactcaaacatatgtacccgtaggtttactgttcccactcagacggacacatctgcagttaaaagaggaaaaacatttaacagcttgtcagtctgataaataagggccatttctcacgaagtctggcaacaacgggccagttgtttaattttaggctgctcttcaagatccaagtcctcatttgatgtctgaagcatccagatagcaatgggccagcatggtcacacttcctttgggtatgtacagaaaatgactgcaaagctgctcccagatcaaaccaattttctaataaacgtgacaaatgtttatttcagcaaaaagttactaacaaggcaaattcctacaattttgcttctggcataaactgacaatttgcatatgatgcttaaggaaaccatgtagtcctgtactgctgtctcatcaaaagcagaggagttatcctacaaattctggagtgtggcctaactgctccatttacccccatatcaaagcagtccacagactcaggaagtttaagagacactgaggcactctctactcattataccttctttgtctctgtctgtctccggttggctggctctctttggagaaatttctttgtgggctaaagaagttaaaacatctacgatggctcataataaaatgaaagtcaaaaatataagatgaatgatctctcttgaaatattaaggcatattttctaaattattcatcttagaacattacttgcctttcggatacccttgggatatttcagccttggtgctaaaattgactcctgaactaaagctatttaagtcatgaaactctcatcaagtatcttgatcaaggcagtcattgagaaacgtaagttaaaagatcaatgttaaaactttctgcacatctatgtgttatcaaggcatgttaactgaaagccaa

SEQ ID NO: 243135 - DNA, 551 bp, Homo Sapiens
ctttgtacaaaaaagttggctcataggtaataactgcctctcactgcaagtcaaccctgtacaaccagccagatatttgtggacaacacttcacagctcaaaacaaggtgaacctaactcctcagcaaaccacagatgctcctgaaagtctccaaggccagaagaaaacccctaaacatataccacactgtggcaactgtagcctagaaggtaacgaatgaagaacacagcaaatatctgagagttgctgcctgaagacacaggacaatgacctcagaaggatggggatgggctggaaaacctctggtctctaccctccttacagctgtgatttgcttctccctaggaaggtcctgcttccatgcttctccccataccccactcacttgagtgtctcacacgggatggtaactagatgtaacacttgccaaggggtcattatcacctactaaatacaaatagatgtctagcttgtctgtccacagagaggtgaatgatgagagaattcaatctcctggaatcaaaagaactttttggtgtgtattctacaa

SEQ ID NO: 243136 - DNA, 670 bp, Homo Sapiens
ttggattcttcaaaaccttcttgttacatgtgcgcaatagaaatttctaatgttcatgacttttatctttcctgtccatcaattcactggttgtaaatgcttcctgagagctgtctaggtctgtatcccagattgttgcttaatgacatctgacagatgcattgttttctgaaatcagcttaagacaccaattgtggcaactggaaactcattacctgctgcattggatcaactatggaagttggagcaggggtgggcggaggtcacctaaccaatcaatggaaggcaactcacacctgctccaagcctcagctttgagaaacaaacacgtttataagagaaaatatatagctattattacagaagtgaatatgttgtgctctcttactgctcttggtgcattgacagtttctgtatctcaaccctattcatctttatgaaaaagcattctgaagatctatcctcagcactgctgagtgtgcagtcacactttcctaccaacccccttcttaccatctctagctgccatttgtggggggaacaaaacaagggaatcctgattgtgtacagtataaattgtattatattttttgtacttatgttttatgtaaatagtttgtctcattcaattgtatgtgagcattgaaataaatcctaccatttaggggac

SEQ ID NO: 243137 - DNA, 898 bp, Homo Sapiens
cctttgtcagcatagtgagtagcaactccagattcacttgcacgcacgttctaagccgctgctctgttcatcagcatttccttctgcaaatgaagccagtgagcccactttaggtagaagtgattgttcggttacacattcttctgaaggtaagacaatgttcccattactagatggcaagtttcctaaaaaatgttttgtttgcctaggcagggatgatccaagatggagaacagagtcagcaagctcctggtcatttcccaactccaaatggggtatctgaggaggtagtttgacgttgctactgaagtgagacagtgtgttattctcccagctattatcttccttaagaaattcaccagtgatagaagatatgtatctctcagcagagagttgagttgccaaacttgaaattccattcctggagatttcgggcggatatgcattcccaaaagcaggtgaacaagattgaccaatgttggggaggacccttaacaatcggtggcgagatggtgcagtggaaccactagaaggtcgaggagctacaggtgggtgaggttttatcttgacagctttcttaggctaaaaggaatgaatatacagtttctttacacagtcgttttctctgcccattaacaaaaattagcgaaggaagaaaatgttacttaccataacatactagcatttttactatctcaatttaaaatgtttaagaagaataaaatcttaagattatgacagagaagatgctattttccttcactgagtatacttttctgggaatattaaagaaaaataattttgttttatttccttactgctatttctcagagttttactacaaagaaaatgaactgattatattagatatgacattgctgacctattttagatccaa

SEQ ID NO: 243138 - DNA, 475 bp, Homo Sapiens
tactactactactactaagaagaattaactacgtctctagcttctctttgcagactgcctgaaacaaaggaggtttttaggaaattcagcttcatacctggtgagatgttatttatttcacagtgttaacagaggttacaactggggaatggccatggaagtgagaggagaaactttaatttttactttttatactcatgcatgattggaatttctaatccaacacttactgcctttgtaatcatacatacaatttgaagtgcttcaaataataaaaaataagtcacccatggctaacattgctaatactttttgcacctccttctagtctttttctctctcaggcatatatttttattagcaacctttgaaccgtaatccatatttaattttcccccctactttttattttaatttaacatgatgtagcaagcactttctcaggttatcaattattcttgggaaacatagccaa

SEQ ID NO: 243139 - DNA, 648 bp, Homo Sapiens
ttgggtgtactacgtccttgtttagtgtgtatccgtgcccacgtagatgatgtctgtaacgcagttttgtttgaaatatgagaatatgcggcttaaactttgatctgtaaggagcggggccgtggccgtttggagcacgctgtagacaccgttcctcatgctgccgggtgggttttgcagaagctcccttagtgatttcacgtttaacaggcagcatccattttcagaatttcctggcattgatttatattttgaagcatacaggaaacttctcgtttcctcgtttagccccacccagatcaggtgaaagggcagctttaatggtggtttttatggaccacattatcagagagcactgtgcaagccaaatggttcaataatgaatgaaaattctgggtgtaaagagtaaatatgccctggctctttctaccaatgtttgctcctggttgaaagaaaccaaagatttaagacgggctgctcttccagactggctgtgcctgcctgtgcccagcaacctgtgcagccggcagtgtgcctggtgtcacgccaggaggctgtggctgctgtgggccctctggaattgtgctcctcacaaagtttccccaaaaggttcttctaagcctttattgtccctggtaaatgtttccc

SEQ ID NO: 243140 - DNA, 1064 bp, Homo Sapiens
tagatattttttattaatgatatataacctctttaaaacatgtatatttaccaaaagcattgtgatatggcattcctgtagtgtgactttttgcatgtaaattaatacagcctttttgaccttccatacagtcaggttcctcttcagtgtggatgtttcctaacgaccaagttcaagggctttccaacatctctttcactcatgggacttctcaatgtgtgctttgacatgttcccaaagtggaagctaaaaacaaagaagaatctccacacattttacattcataagatttttcacacttgtgagatcacagctgaatattaaggtataaggcagagtgaaaggtttcaacacattccttacagccagaggacgtgcatttatatccaatgtgctcacaagctcagtaaggcccgaggaaaataatgaaagcttttccaccttcctcacattcatagcatttctctccagcatgagttcaaacagactcagtaagatgtaagcatcgacaggtttcctacgttcagtttgtttcctaggatgcacagacacatgaatagtaaggcctatggaaggagccaagattttcccacattccttacattcatatgtcttctcttctattggaattgttaagatctgagacaccaaggaaggcttcccacattccttatgactgtgtacattgccactatgaatgagtacatgttcagtaagtgtgaggaagtagtggctttaccacattctttccaagtatcagccccaattcacacacattcagtaaggcatgaggaattactaaaggtttgcccacattccttatatggtttctccacactatgacttcttagatgtcgaataagatatgtggaccgagtaaaggctttcccacattcctgacattcaaagggccgttcaccagtgtgagttctcatgtgtactgtaaggcctgatgagatactgaaggcttgcccacacttttgacatttatatggcctctcccctgtatgtattcttttatgtgggaaagcctttagatactcctcgcaccttagtcaacccaa

SEQ ID NO: 243141 - DNA, 922 bp, Homo Sapiens
ttggctcatgtcctaacacagcacaacaggaggtctctgtcagtccatcagagatgacattctatgtgatatttttgacatccttgtgctaaaagcaatggcacaaaatggaaaagggcctattgaccacacctactccagtaaaattgttcttcatttattccttaattttctaaatctgacccctttaaagcaatctagcaaattgagaatcctcagctctccttggatacctgatattttatttcaagaaagagacaaagaaggaaaattttatttattttactacccacatataaaccgaagggagatgggactacccaaacatttgctgctcaattttgtgtcttgtgcttgaaagtctgccctaatgcataacaaaaactacttgtctcctaccttttgggatccctttaacaagtatttgccttctgaactacgtggataatttcaaaggcagagttccagaccagagaggtctttccatacaatgaaagctataactagctggttgtgtttaaccactgctatcacgctatcctgggactgcatagaactttgacaaaagacagacttcatggtacacaacttcaacagattttctgtcatattctcaccagcacatctgaatgaggctttgtgttttccttgctctcttgcatgttccttttcaactcatggcccacagtgactctcagagatttatgccaaaattgcatacaattgttttctgaatcataacttgtctatttttctgcctatgtgtgctactttcagtttgtttctcatcaacattttgactctcagaagagcctccatttgcccctttctctctttaggtatctaagatctttgaacacctggacctttacatttgatccaaccctatcaaataatgaacttctcagagaggcatctgggg

SEQ ID NO: 243142 - DNA, 936 bp, Homo Sapiens
aacactgtcatggctttattcaaaacacagttgcacaaaagtattaacttcaaagtttttaaggagattcttgaggaacttaacacaatatatacatactgccatacaaagagcattaaaataggaccgaaaacttctacaaaatataaaacccaccattattatttgcatgaaaataccacccacaaagctaaataagtcttaaaagttatctggaggctttaagtgttgttttcaaaccaaagtactctaattttgattgcacagtaagatgattgataagaaagtcaatatatagatttcattttaaaaataagtattttgtaatctggcatagtatgtaatgagaattgttaggaactagaacagggaatttcagtttttaaaagcagaagaaaaatgttatctttttggggattccaatcccctcactaaacttatccccaagggttttctttcggtcagttgtacaacatttttagtttctccacaagtaacatcataatttttactttaaaacaccaagtcatacattttacattgtagaagcagtagcagcagtactatactcagtatttaaatatgtcccagtatagaagcataacttcaattaatttgctgacactaacttcttaaaaacttgcaaatattcaaaacaaagggaaaaaattttagatagccaagatttaaaaagccattgccttgaacatggagcctccatagcaaaagaggagatatacttgtatactcattatattttatttagtagccatgtaaggaaacacacactcacttatcccaaatatttttctacttttaatggacatccacttgaaaacaaatcttaattttaatgtcaatttagtttcaaatacttttccagctgcctagtatattccaattaaatgctattattaccaacttttttgtacaaag

SEQ ID NO: 243143 - DNA, 139 bp, Homo Sapiens
gtacaaaaaagttggtgaggctttaagggttgccaaagtcacctaataaagttagaatttctgctctgtcaccaaacacctattcaaagcctaatgccttccattactattccactaggaattaaaattggtgcataag

SEQ ID NO: 243144 - DNA, 800 bp, Homo Sapiens
ttggcgcggatcaagaggttaagagatccagaccagctgggattacaggcttaagccatcatgcccagaccggcaatgtcgattttgaatgcaaatatcagatcatttaactgagatgaaaaatccaagaaagtacatgattcgtagttcatggcttgtccacggagtgtgcctggggctggccagaggagataggcataggccagacccaggaaggttggaaggaaggggtgggggtccatcaggcacagagctggctgagcgcacaccttgggcatagggatgctagatgggccagtgtagacagtcacgtgctcccctggtgcacatgagcatctacattgaacgcggaggcgatatgcatttgggcttgacaggtgctgctttcctctcctgccaagtgaccggccagtgcagggaggttgagtcagacatcacccctttctatgcaacaccaccccaagacctggcagaaggcaaccttcaagggtattgcaaccttcatgcaaggaacccgctaggtacctggatcaggagtgggggtgagacttacctctgctgaattgcccaccaaatgcaccagggcaccacccacagtgagcagccaccaccatggcctgcccaaagaggcacagggcatatgagtctggtcttacccactgttacctggcccgacgcactctgcacccacgcccaggcccccagctgaacagagggcagcagtggtcactgggcaagggcagaaatggggagaccagggctgctagactggttctcctgctagagaacccatccctggg

SEQ ID NO: 243145 - DNA, 710 bp, Homo Sapiens
ttgggccaggccggagaagacatgttcacgggcatctatcagatgcccccttgaggaggctgagttatttgagggctgctgcaaagtacgctaggctcaaattctcttttcccagccagagccctggccacacggactcagaggggccaccggggtggggaaaggacccctccccgaccccccgcagccactggcctccagctctcggccacagaatggcctctaaggctgactcagccgctcccttgggctgtggcagcaggaggcgggggctctggctcaggccccggagcctgtgcagcttgcccatggccctaggcagcgaggggacagcctgggggacttcctgcctaggcaaggtcattggccgggcctggcctgtggatagtggggccaggggccggcccaggccaaatgagtgccctccttgttatgacaccaagtgactacaagggaggcaagacccctccaggcctctcagccgacactgggtcccaccacacacagtgactgtgccgtgcagtgcaggttctggccttttccttgaaggcatctggtagacccgaagccacgctctcgggccgcacatgcacgccgcagcaccagctgccctgagctgcttgtacaaccaaacacctttcccctcttctccagctgtaacctggagagtcagccatgccttgtcttttgttctcataaatagtcactgg

SEQ ID NO: 243146 - DNA, 554 bp, Homo Sapiens
cttcaatgcaaactgtatagacttttctaatgaaggatctttttcaatcagcattctcaccaccatcccgaaagtttcacagtcttgtcggtaaacctaaaaggtaaaacacattctggttagctgagaatgaaaataactagccaaatacttagctaactgagttggcagaattatgatgctgacatctaaaagagagacacaaaaaagaaagcggaacctttctcgcccttgcattgtcactattaccagaggccatttaaacctctatccatgagatctgctgacaatacctgaatgagaaggaaaacattaacaaactacattactgaatatagaagtttggcatggcatttgtcagtgtaaggcagtctactcaaaggacatcagactagagatgagaataagaacaaaggctagggaagacatatcaatgactttgttcatttatttgttggaagaaaaaagtttctgagcccctaactttagattctttgtttgaatcatgatcagataacaaattctgtttagtggccgggtgcggtgtctcacac

SEQ ID NO: 243147 - DNA, 116 bp, Homo Sapiens
tgatgtaaggtgctggtagtttggctgacatttcaaacaaatctggctcaggcctagggtttgcagagtcacatgggcctacttaggaaattacaacagcccaacttttttgtaca

SEQ ID NO: 243148 - DNA, 399 bp, Homo Sapiens
tttctcctcccaaccatacttttttttcctcgctagatccagcagattgcagtccacccctcccaacccctacatattcctgtcaatcgtgttttttagcccaagcctcatcgttgtattctcaaccgccatgttcccagccaccatcttaccagtcagcagtatgagcttgtttacctacaccgccccctcctcaggacaattctagtattgcctgtacccattctcctcccctactgccttctcctgaggcttgtaaacccatcccaccaccttacgcccgtagatatcctgcaccgcgggttaagtcaatccccctttccccttcaaaccctcagcaggaaccacttccaggttcttccttgtctcccaatgtggcagggtaaggggcttttccaa

SEQ ID NO: 243149 - DNA, 219 bp, Homo Sapiens
ataaagaacttttttaaaaattcctatttgataaacttacttaaaagcagtcttgttttacaagattaaagcaaacaaacaacaaacagctgccaggtaaaaatttaaggtctttgttttttgtatttttaacatatccctagccaatagaagagtaaataagaatagctaaaggaaaaaaagcaaagatacagcaatagcagtttttttaagtcccaa

SEQ ID NO: 243150 - DNA, 903 bp, Homo Sapiens
ttggaaaggctgccaccctctgggtcgtgggaaacatgcgaccttggcctcagggccacagagcgtgagcagcaccctgtccgctgtcctcgccacctttacctgggagagaagtgcctgtgagcgggccttgggactcactccccatactctttcaccaggaacgagcagagtgttcactagtcctagtgtgaagcgggcacaagtgaccaaagccaatggtgaggaccaccttgggggctggagagcacagcaggcagagcagggctgaggcgccatgaggccatcaccaccatgcaagggaggagcagccagcagctctcctgggtggcccaccggctcctgccggccagagcgcatgagcactgaccttcctcgtggggaaggtctgcagacccgtgtgaacatggcagaggccacactccagctcccacccacataaacctttgcaaccacttcactacctctcactgggtctcgtgggcttgggacagcaacggttctgtttagtcagctggtgcaggtggttggcccagccgatgagaactcaaatagcacggatttcctggatgagctaccacgtggcgctcttcaggttctgcctctgggaggctgtgtgcacctcagtcaccacagctcacggccgtccccagttgagtcccccttctgaggacaagtttgaaactgggaaggagacaccccctggttccgccagcacctatcccactgatagtgatcccctggcctccccgagcctccttagcaatggccactggtttgtagacagagagtttcttgcagccttgaaaattttattccctaagtggggacagctctggtattactgcttctttaatttgttccacaaaaattatgctgaaatggacctgaatcagccctggg

SEQ ID NO: 243151 - DNA, 834 bp, Homo Sapiens
ttggaccaggggcaataaccaggcgtgtcccaggggggagccccgctctgcagccctgtgcgccgtagagagctggacttaggctggcagcatggccgagttcagggtcagggtgtccaccggagaagccttcggggctggcacatgggacaaagtgtctgtcagcatcgtggggacccggggagagagccccccactgcccctggacaatctcggcaaggagttcactgcgggcgctgaggaggacttccaggtgacgctcccggaggacgtaggccgagtgctgctgctgcgcgtgcacaaggcgcccccagtgctgcccctgctggggcccctggccccggatgcctggttctgccgctggttccagctgacaccgccgcggggcggccacctcctcttcccctgctaccagtggctggagggggcggggaccctggtgctgcaggagggtacagccaaggtgtcctgggcagaccaccaccctgtgctccagcaacagcgccaggaggagcttcaggcccggcaggagatgtaccagtggaaggcttacaacccaggttggcctcactgcctggatgaaaagacagtggaagacttggagctcaatatcaaatactccacagccaagaatgccaacttttatctacaggctggctctgcttttgcagagatgaaaatcaaggggttgctggaccgcaaggggctctggaggagtctgaatgagatgaaaaggatcttcacttccggaggaccccagcagctgagcacgcatttgagcactggcaggaggatgccttcttcgcctcccagttcctgaatgggtctccaccc

SEQ ID NO: 243152 - DNA, 477 bp, Homo Sapiens
ggataagcaggtaggagacagggatgttgctaaacatcctacaatccccaggtctcacagagccccataataaagaatcatccagcccaaatttcaacggtgcggagattaagaaacactacctatgaggataagttacatgataagtacatgaactttttgggggcaaagtcaatagctttcaccaaattctcaaaggagttatgactcaaaaacttaagaaacactagcttgaatacatatttcatttaggccatggtaaagagtgacatattaacctacttcacaataggagtcacctctttagttaagaagacatatctctgccacacaaatttcactgtccctttccactgtctactgtcattcacggctagataaacacagatctttgaagttcccatttctagggccaacaagtacccatccctctatcagccagattaacacaaccattccaacttttttgtacaaagt

SEQ ID NO: 243153 - DNA, 431 bp, Homo Sapiens
tgctatttgggagagggagcactgtaatcagaatataattccaaaataaatcatacaataaattattttctaaaagaaattgatccacatgcagacagatgaacacacacacgcacacgcgtgcgcacgcacacgtgtcattctagtcatttattcagtgttgactgtgacttccatggagggcaccatgagaaaggaaaagattagacatgtgaaaagaaggctaggccccatcttgccaccagtggaatgagatttaagaccactagagaaggaacccactaaattgccagaaacaagagtagaaagaaacagcagttatcaaggaagattttaattgcttcaaagagggaaaggaagaaagcacagaaatctaatgcaagtaaaggcacaatgaatgtggagttgaatggccaacttttttgtacaaa

SEQ ID NO: 243154 - DNA, 941 bp, Homo Sapiens
ttggatctgaccttcctttcctaaaatggcaggagttggggaaggggaagtgtagaatgatagcagataatcaaaatggaagaaagtacagtggagtggcatgaaatatagtctcaaaagaaataggaacacttgtgaatactgaggaatggtgttctaattctttctttgaagaattgttttagtccagtgtgtatttccttttctgaagattctgtttatttcttaattgcattactcgttaaatacttaaagtatgaggaaggagaggccttacaaaagcaggtctgtctggttaaacatagcctgaatgatattccgtaagtaattccttaaattggaaaagcagatttttggtaagaaatattaatcatatttaaggagtatgtgtagcaaaactcctaaattagaataaattatttaagtgtatggtttttctttatactaaaccagtgggcttgtgatttgaggctactgttttcgatggtattgtattgagtccacagagaatatgtatacctgaatcattggtataatgtctttcccacagcaattcttgaacatatcaaattactcgatatttgttatattcttaatctggcattgcttagggcaaaaactgggtgtccctcataaaaaggtaggaacagtagccagtttgcaccattcctatacattattccatgactttaggaagtatactttgaggtatactcttcagatttggtttaataatattaaaggtatattgatggattgtttcctgtatgaaagtattgcatgatttctgctcttaaatcagtgaattaaatttcatctggattgcttatctcaaatttaaagcctcaaatcagacttaaataattagtatttagtatttagtttgattcctttgtacccaagctaatttttgtttaaaagaaaagtgcttccatcctttt

SEQ ID NO: 243155 - DNA, 622 bp, Homo Sapiens
tcagtatccactctacaccagacacttttactagactttagggttgggaggtgaacaagacaaaatctctgcctttttcactcagagcttagtagagaagatagaaatgtaaataaaaataaaacaaacaaacaaagaaataattggtcatcgttggaggatgctagtgaacaagttgttattataaaaattggtaaaattgaaacgtattttgcttgttcggtatgaaaggtatactgagtaccaaaataggagacaagtgcaaaacatttttttcatagacctaccccagtgaataaatgaagaaggaatggtagagataggcaattatcacactgcaacccctagccactgatcgtgaacagctattaaacatcacacaaaaagagaaaacaaggcattatataccacctcctgatgatggaagaatacacgaacacctgtgaagcagtcttgccaaaaaaagccaaacccaaatacaatcaaactatagaactgcactgttcaatcggtagctactggcaacatctggctactgagtacttggaatgtaatgagcctgaattgagatgtgctgtaaatgtacattttttctattgattgcaccaacttttttgtacaa

SEQ ID NO: 243156 - DNA, 304 bp, Homo Sapiens
gcacccagccaatattctgaacaagagaatattttttaacgttagaaaattccaaacttctttgtagtcacactcagccttttaaaccttacttgcaattaatttaagtctaataaatgatattagtttaatttttgaatgtgaattctagaatcaagcatgcggctaaaatatttaagggtaaaatgtattgctgtcttcaacttacttagaaatgcaatgcagtaaatcggacagacagatggacagaaagatgggcaaatatgtgataaagcaaatttatcaatgttaattgcttttaaaa

SEQ ID NO: 243157 - DNA, 943 bp, Homo Sapiens
aaaagatgaggatgcaatatacacagataaggtcacaaatggaggattcctggatgaacttttgttgaagcagttacttacagtaggaggtattgtgtgttagtcctcaccgccagcatttttgaccccatctacatgcacttagtagatagtccttgatgtgtctgcttaaggaaaccatctttctctagtttttagtgcatatgttggctttcacctattttaatactgtttgtcattataaattgaattttagcccctaccctcacccttacctggaagtctataaaacattttctcataaacttttgtaacacaattcaattattaaaaccaattatactgtttaaaataaaagcctttagaaggcttgtcagctactttgatatatatcatatttaaaggaacttcttccctttttagtttctttagagtataattagtttctctagaaaatgtctggatttttggaaaaggaaactacaattaattttttttaaaaccaatatccctatccagacaaccaaaatgaaaactcctctctagcatttggatttatctttttaaaagaaatgtgtttcttatattatgataaatcctgaaatttaaaatgtccattaaataagaaacaccttatgaagacaaacctgaaaatagactgggactagcaattaagaaagcaggaattgacacccagctatcttgctcaccactatgtgaccatgaaagagttattggtggacttgagatgtttcacagccacgtccctttttgtcatggtaagaatcaagctgtcccagtcatctatccctatccgtgtgcaaacctccatattcctctgagtttcttttcttcaaacctccaatcttagctctctcttccactttaactttttcctatgagatctctgatctaaagaaaatccaacttttttgtacaaagt

SEQ ID NO: 243158 - DNA, 243 bp, Homo Sapiens
caggaattgagaggtacaacatatacctctcttagcaccaaatcaaaatccaggcaccccggcatgcaggcaggcccatcagagcctggcccatcacggtcttaaggttcaggctgcagaagcagatgcctgcggggagggcagagcagtgaggggtccagcagtctccagcagacccagccactctgctcacaccttctgccctgggtccccaacttttttgtacaaagggggttattaaag

SEQ ID NO: 243159 - DNA, 965 bp, Homo Sapiens
aggtcaattgatttccaacaaagtgccgaagtaattttaatggtgattgttatcaataaatgatgcagaaacaattggatatccccatggaaaaaaaagaactttgatcctttcaatcacactttatgcaacaattaacatgaaatgaatcatagatctaagagagtaagagttaaaactatcaagttactggaagaaaacacaggaagaaatctttgtaaccctgggttaggtaaggatttcttagaatgcaacacaaaagaataatccataaaagaaaatattgatacattggacctcatcaaattaataacatttgctctctgaaagacagtgttaaaagaatgaaaagacaagccgcagactggaagaaaatatttgtaaatgacatatatgtcaaaagaatggttttcagaatattttacaaaaaacttacaactcaacaagaagacaatgcaattttttaaatgggcaaaaaaaattgaacagatacttcacaaaggaagtgtacaaatgaccaataaagacataaataaatgctcaaaattattagtcattagagaaaacctgtttaaaccacaatgaaataccactgcaagtcactaaaatggctaaaatttaaaaggcagacaatattaagcgctgttgaaaatatgaagcaattagaactgatgttgctggtgggaaagaaaaatgatacagccattttggaaaacaatttctcagtttattatttatttaaacacatcgtaaaagtcagagatcctacttttaggtatttattcattgaaataaaatgaaaacatttgtctacacaaagatttatatataaacattcacagcagctttgctcataatagcctatggtagcagcctctaaggtagccctgaatgacccctacctcctggtattcatacccttatatcagcttccttgaatgcaggccccaacttttttgtacaaa

SEQ ID NO: 243160 - DNA, 219 bp, Homo Sapiens
tcaactagctctgcagaactagaggagcagtttgcatctgtatgtgcggatggagtttcttttatctgacaccaggtatccaaccacactgaaacaaggcatttatctacagagctcaactagaaccccttttcattagggtactccacttccttcccctcatacctaccccacatcagccacgtggttaagatagtcatccaacttttttgtacaaag

SEQ ID NO: 243161 - DNA, 1135 bp, Homo Sapiens
taaccagagaacaggtctgagaacaagtacataaaaggattatttgacaaagttttaacaaaagtgcttacagcttattttgtttcagatatacagaactgccagtcacaaagagccactaagtggcaatacagccacaaacttgcctgggaagtaaaatattttacatatttacactgtacatttaaatgggatattctgaagcattattattatcaataaactctaagcaagaagttctcttaaaccctctggcacttaacaaagaatattaattttatggggctatgagttttacagtttgattcccatctttgccataacctaaatggatttttaccccctccagtacacatatttacctcctacacaaagtagctgttattagcttatcaccaaccaaacctttgttagtagcagttggaattttgttggcatcaatgtatttacaatgtaggagtaaattatttagaggggagtctctaaaaattaaaataacttcattaaaccctattttaaacagactttacagtataaaatttatggttatagaaatctagtatctaaacaagtttataatttataaggtatttattacgattgattcccctatgatttactccatttacatgaatgtttattttaataatgactatatctttcagaaaacaagttatgaatataaaaatgactattataagttaccatagctataccaaaaatgaacattaaaatgcagcgacttgtatgttaaaatacatagaaatttgctatacttctttaacaagtgctttataaaagtataaaattataaaaggtgctattttcatgaattttgtgttttcctgatacttcagccagaccaacatgcaaacgttacaaatagagcaactgaacactggccatcaattacctttgaatttaaacagtacattccagcgcagtctgggccccaaagcagtttcacccttacctaacttacctaactcttaatatagcctaaactcactgaaaaataagctaacttcatttcaccttttgtagcatacacgtagactcagagtatatactgaaatataatttgaaagccaacttttttgtacaaagttggctattatagagaaaagcattgctc

SEQ ID NO: 243162 - DNA, 972 bp, Homo Sapiens
ttgggcgagctacagaagcttcagtactgcgtgggcatgtgcggagacggtgccaatgactgtggggccctgaaggcggctgatgtcggcatctcgctgtcccaggcagaagcctcagtggtctcacccttcacctcgagcatggccagtattgagtgcgtgcccatggtcatcagggaggggcgctgttcccttgacacttcgttcagcgtcttcaagtacatggctctgtacagcctgacccagttcatctccgtcctgatcctctacacgatcaacaccaacctgggtgacctgcagttcctggccatcgacctggtcatcaccaccacagtggcagtgctcatgagccgcacggggccagcgctggtcctgggacgggtgcggccaccgggggcgctgctcagcgtgcccgtgctcagcagcctgctgctgcagatggtcctggtgaccggcgtgcagctagggggctacttcctgaccctggcccagccatggttcgtgcctctgaacaggacagtggccgcaccaaacaacctgcccaactacgagaacaccgtggtcttctctctgtccagcttccagtacctcatcctggctgcagccgtgtccaagggggcgcccttccgccggccgctctacaccaatgtgcccttcctggtggccctggcgctcctgagctccgtcctggtgggccttgtcctggtccccggcctcctgcaggggccgctggcgctgaggaacatcactgacaccggcttcaagctgctgctgctgggtctggtcaccctcaacttcgtgggggccttcatgctggagagcgtgctaaaccagtgcctccccgcctgcctgcgccgcctccggcccaagcgttcctccaagaagcgcttcaagcagctggaacgagagctggccgagcagccctggccgccgctgcccgccggccccctgaggtagtgcaggcccacgggc

SEQ ID NO: 243163 - DNA, 947 bp, Homo Sapiens
ttggttcaacttggagatgagcgggtctgtcctcttcacggcgggagagaggtggagatgctttctgaccccgtcgaggtcatccctgtactgggccttacataatttctgctgtcggaaaaaatccactacacctaagaaaattactcccaatgttactttttgtgatgaaaatgcaaaggagcccgaaaatgcacttgacaagctcttctcttcagaacagcaggcttccatcttgcatgtgttgaatacagcatctactaaagaacttgaagctttccgattgcttcgtggaagaaggtccatcaatatcgtagagcacagagaaaactttgggccatttcagaatttagagagtttaatgaatgtgcccttgtttaagtataaaagtacagttcaagtttgtaactccatactttgtccaaagactggacgggaaaaaagaaagtcaccggaaaaccggttcctgagaaagctcctcaaaccagacatagaaagagaaagacttaaggcagttaatagtatcatatctatcgtttttggtactcgaagaattgcctgggctcaccttgatcgtaagttgacagtgctggactggcagcaaagtgaccgttggagtttaatgagaggaatatactcatcatcagtctatttagaagaggtaaggcagttgcacctccagattcctacctgctagagctccttgtgtagtttaatcttctggtcccaaaaggaatgtaataaaatagtaaagatgggttttcttctggtacttgttactcacttattcctattatgttttccatcacctttgatttttaaaaattcaacctttagttagttcaagaaatgccttatgcatcgaagcagatactgagaaaatcaatggtatttcattctaaatgttatagaacattatcactcttttatttataaagcttattttt

SEQ ID NO: 243164 - DNA, 1111 bp, Homo Sapiens
ttggatttattcggtaagtatttattgggtattttctgtctgaaaagtgcgattccaggtgctttatgtgtctctgtgtgtgggtgttatataaatacttataatactgtatccatactcttgaaaagcttagttgggaaggcaaggcatgcaataaggaacacagaattttagtcattccacaaccatctgttgaatggctgctattgttagtatcgtggtggaaactgagaagcaaagatgactataataggatctcttttctggagatgcacagtggacacgtagttatatgatgatgataaggactccagaatagttctatacatgatgctctggggccacatgcagattctgatgagaaacaattaactctttttggctgctacctgagaaggggtaattgtcactcaggaggtttttgccttttgaccaacatagaaaggagtgtgagtgaaggctagaggtgtactaacttggtcagggcagggtgacacataaaattaaccatcacagggaagggtagggctggagaggcagactgtggccaggttacaatgcgctgaggctaaggagactgtgtttatcctgtaggccagtgggtcttactctgaagtcttttgggtgggacattcatggacttcaagagacctgtgaatgccctaagattataagtaaaatctgtgagtctgtaactaaagctaaagctatttttctggggcccaccatctaaagaagattctgaagccttagggtagccgtggaggagacatgaaggtccattttgcatggtagaaccctgcctggctcttgctgcagtgtgggaggacaggtttgcaatgtggaggtgtggcaggcatggatttgggaggattggcagaggactcaccatgtccatacactcactgagatggcaaatatttattaatcatccaactgtgtatcagacactaagaataagctgggaggccatggcaagtgaggtcaccacagtccctgccacagtggaggttatggtatacagggtaagcagggaagagcactgcaaagggtttgcccattgcatcagtcatttatttatgcacatgttgattcaacaattatttctatg

SEQ ID NO: 243165 - DNA, 616 bp, Homo Sapiens
agcagttttcataatttaatgaaaaagtattggtaaaaaggggacatttgaaaaaggactgagcttatcttggaaaactggactatataagacaaaatgaaaaaaattaacaaagaaggttaagaggtaatacttcaaacaacaaaatgtagcaaatacattttggggtaattgaaatttacaactgaaggctccttcatttacctaggaatatcctgtaaaaatattacaactatatttccctgacgaatgatattttagtcaatactctcccaatggcattacatatggaatttggctgaagcactgttttgatgtttgcttttcctcccactcagaattgaaaggcatgaagggacaaaggctaccgcactggcctctgacataaggaatttataacacagctccatcataatttcattaccatgaaggtatcaaattaatatctactccagagaactcaaagaaaaagcacagaaacctagtgcataaataggggaaattctcttcctcattttgatagtttttttcccaaacaaaatacaggacacctaccacacatgctatggcatgtttacacatgtacataggcacaaaagaaatattttgaagccaa

SEQ ID NO: 243166 - DNA, 711 bp, Homo Sapiens
taagggtatacatgttcgacaggaaaaaacacatgcattttcatttgcttttacattttagatcaattcatttatatatcaatttcatttagattcctacctggccttgatgaaatcctactcttgctgatggcaaagaagtaaaatatagtggcagaactatcctagaggttagccataggaggattatagagtgagcaacatatttttatatatttgttgagggtccctactgaatattataacactgaactatgaaagcctcaattgctggactgacaacaagaattttaaataacatttgtcttactcacaaaatgttataaagcttaagatggaaaaatacaaaatgttttgacattacctaaagaatcatgaactcttgttaggtatatgatggtggccctgaacttgagccaacatctgtaatcacttttatcagtcaaaaagccatgttcttttatatagcctgtagactattaaaatacaaaaatgtggtaatggataaacaactatacacaaagccctcacacttcaaatactgtcctggattgatgagagaggagcagaattcaaacatttatctgcaatcctaatggttaaaattttaccaggaacagacctgccactctcttgaaatactgtctctgagattaacatacgaacagcatcatctctgttggaaggctacattcccttatgatgctgatt

SEQ ID NO: 243167 - DNA, 1450 bp, Homo Sapiens
ttgggtcgtttgctgcggggagggaatgaatgggcgctgggaacacgcccgcgaggtggggacgcgccggccgtagcgaggtccttagcgtgtgagtggccggggtcgggtcgcttccccgcagcatggaggacgatgcaccagtgatctacgggctggagttccaggcacgtgccttaacacctcaaactgcagaaacagatgccattcggtttttggttgggacgcagtctcttaaatatgataatcagatccatatcatagattttgacgatgaaaacaacattataaataaaaatgtcctcctccatcaagcgggtgaaatctggcatattagcgctagccctgcagacagaggtgtgctgacgacctgctacaacagaacttcagacagcaaagtcctgacatgtgcagccgtgtggaggatgccgaaggaattggaatcaggcagccacgagtcccctgatgattcatccagcactgcacagaccctggagctgctctgtcaccttgacaacacagcccatggcaacatggcctgtgtcgtgtgggagccaatgggagatgggaagaaaatcatttccttggctgataaccatatcctgctgtgggatttacaggaaagctcgagccaggctgtgctggccagctcagcgtccctggaagggaagggacaactgaagttcacctcaggacggtggagcccacatcataactgcacccaggtggccacagcgaacgacaccaccctccgtggctgggacacccggagcatgagccagatctactgcatagagaatgcccacggacagctggtgcgggaccttgactttaatcccaataagcagtactacttggccagctgcggagacgactgtaaggtgaagttctgggacacccgaaatgtcaccgaacccgtgaagaccctggaggagcactcccactgggtgtggaacgtccgctacaaccactctcatgaccagctggtcctcacgggcagcagtgacagcagagtcatcctttccaacatggtgtccatctcgtcggagcccttcggccacttggtagacgacgatgacatcagtgaccaggaggaccaccgttctgaagagaagagcaaggagcccctgcaggacaacgtgatcgccacctacgaggagcacgaggacagcgtctatgccgtggactggtcctcggctgacccgtggctgtttgcctccctgagctatgacgggaggctcgtgatcaacagggtgcccagggccctgaagtaccacatcctgctatgactcccgggcctgggttatccagggtcccattgagtgggttttcctcttgggcagattctcaaacagtcgcagctctttggaggtgactcgtgtccacgtggatctctctctgggagagcgctggtcccctcctgtagcagcagcattctatgaatgggggt

SEQ ID NO: 243168 - DNA, 780 bp, Homo Sapiens
tggagacttccaaatacttagaaagagatgcagagaacattagaatcattaaaaatttgagaggcgggggggacagttgtacaactcttgagcaaaagttgacttataagctaatattaatatttcaaatttgtacgacaaacaaatgtgaagatataatgtgtattttatttgaatgtcttccctatcacaaaatcacatgagtaagttgagttggtaaacatttatttatttttatcttttctaaaatgctgaaaagaatttttctcccacactaaagagggtttgccaagtttctgcctggagcaatttgttatggctgtgtaataaatcccagaaagtttgaatttttaatggaaacactgacagaataaagagggtgtaatcctacatatgtcatttaaaaatctgagcaaaccatagtgtgcttgcaaaacaaatatactttccttagattgcactcacaaataaggctggggagaccacaaaagtaaaacaaactcaaaagtgaaaaacactcacacaatagactctgaggtcagctcaccacacccagactaaagtcactgggctctgtgcgtgtcaccaagactcttaaaagacatacttctgaatcatctttcttgaccctccaccaaactgtagccaagacaggcttcctgggaatgaaaatgacattagcattagtcaagagtgaaattaaagtcattgtactcaaacatctgccaacagtctgtgatttcatagtacccacctctgaaataagactctgtctacatt

SEQ ID NO: 243169 - DNA, 1019 bp, Homo Sapiens
catgtatatatatcaagttggcagtataaactacttgcaagtaactttagaacacaagtgtttgcccattggtagtgagatggattctaagttgagatattagctagaacattccagttggtaagttgtcatacatatttaagaaatatgaatccaaactagattgtgataattccctcataacttcacctccacctgagtttcggactctgctatccagctgcgtactagtcttcatcagatgacacaggcatctccaacaccgcatgactggaacctgaactcgcttatcttctgtttcccctaaatttgttctttttccaaattttctatcttggagttgccctcttggaattgccctctaccatctatctagacacttttatcaggaacccagagaaccatctttacctcttagatataatcagtcttgtaagtcttgcccaattttctttcctaaaactttaaaaatctgtcctctctcctctactaataccacaatgttagttcaggccttcatcttcctcaacaactaagacatcctcctaactggttgtcttgcctgtagctttttcctctcatggccatctgccacacagctgtcacttacctgtattacaaactgatgatgtcattcctgtgcttaaaactctgtaatacctggtatgtcagtcttaatcccttcacatgatttgtgagatcctccacaatacgggccttgtcttgtgcttcatatttctgatctactgaagtgactgtggttctctgatgctacagagtgcctttgcttctttgtgcttttgttccctctgtgtgcagaaaaaaatctcacccctcacctcctgatttattaagttctccaggaatattttcctgatgttaagtaggtacttccattcagtatgtatatttttatcactgggctgatgatcacactgttgagttactgaatgagaactttgtgctacccttactcatttctgttatggattaaataaacataaaaatagggaatccaa

SEQ ID NO: 243170 - DNA, 1027 bp, Homo Sapiens
ctttgtacaaaaaagttggcaagtctctctccgaaaaacccagaagacaccagcaccaggggcctgaaccaagactccacagatagcaaaacgcttcaagaacaaatggatgagctgttacagcaatgcttcttacatgccttgaagtgccgagtcaaaaaggctgacctccctttactcaccagcactttccttggcagccacatgttctcctgctgccccgaaggacgacaactggacataaagaagtcaagctacaaaaagctctctaagttcctgcagcaaatgcagcaggagcagattatacaggtgaaggagctgagcaaaggggtggagagcattgtggctgtggactggaaacacccgaggattacatctttcgtcatacccgagccctccccgacctcccagactatccaggagggtagcagggaacagccctatcaccctccagatataaaacccctctactgtgtcccagccagcatgaccctgctcttccaggagtctggccacaagaaggggagctttctggagggcagtgaggtccgaacgatcgtcattaactacgccaagaaaaatgacctggttgatgcagacaacaaaaatcttgtgagattggatcccatcctatgtgactgcatcttagagaaaaatgaacagcatacagtcatgaagcttccatgggacagtcttctgaccaggtgtttggaaaaattacagcctgcctatcaagtgacccttcccggacaagagcccattgtgaagaaagggagaatctgtccaattgacatcaccctagcacaaaagcgtctaataaaaaggtgaccgtggtccggaacttggaggcctatggtctggacccatactcagtggctgccatccttcacagcgatgccaggctagcaccaccgtcaatcctgcccctggggccaaggacagccttcaggtgcagatccagggaaaccaggtccaccacctcggctggctattgcttgaagagtatcagctcccccgaaaacacatc

SEQ ID NO: 243171 - DNA, 955 bp, Homo Sapiens
tttgtacaaaaaagttgggccattggcaccggtttagacctgtactctttatcagcagaggtactgtaatatatttgtgatccttcagcttccaggcttactcctggtctctgccttcctatctacatatccttttaaaataaaattttaactatctcctgaaaaattgttgagtaggtcacgcacaatcaggagaaaaatctattcatgacatacaagtctctgtctaatctgaacactgcacctgtctctggcctttttttcttgtcatttcctagaccttaaaaaatgtgtattgagaaagaactctgttagctatacagaagatgaactgggcaatatagagtagcagcatggagaccagtctgactgaactaaggcagtggaagtgtggatgaggaagagaggtgaaaattgagaagcgctatcctttctctttgggcattattaggaggctcacagacaagtccaggagtctggttataccctcctgtgccattcaaccaggtggctttcccatgactgtgatgaataaaattgagaagcccctgcccttttcagagcagagggtgaggagaaagctaccattttgtcctcatccttacccccgttgacttggcgagagatttgacctttcaggttttgatcctgtcattttctaggatgtggtgcacgcactttgctgttgcgcatggtgaagtattgtgcctaggtcctgggtcttcatctgtttggctctgctactgtttcctcctcccaggaagtgtggttagacaaataatgtgttttaattacctgtcacactcaggattaatacatactcaggttaactgtagagaggcattggctttcagaacactcctcgtgacaatttaaaccattttctttgtctagagtctgcctttttctttttacaatttcttttatttcaacactaggtttcaatatggtgttc

SEQ ID NO: 243172 - DNA, 913 bp, Homo Sapiens
  misc_feature (453)..(654): n is a, c, g, or t
ttggatgtctttggcccacttgtagtttctcaagaaagcatgttgatacggacagcccctactctcatatatggtgtattgaccttaggcaagagatgtggtttctctgagctccagatatgtcatctataaaattggtgttaacaccgtttatctcatagggtgctaagaagattaaagtactgcccagagtaggcactcagtcaagttctctttcctctcctgatacctacccccatcctttcctctaggttgcatatagttctttactcccaaaggagatcacagtacatagaaaatcccatgaatgtccttgctcttcgttgttacctccctccccctctatcccccacacataatgccttagatattcagtaggttttattgattagaggtgaacttatttggaaggaataaaaagacaaagcaggagaatggtcaagaacatgagtnnnnnnnnnnnnnnnnnnnnnnnnnnnnnnnnnnnnnnnnnnnnnnnnnnnnnnnnnnnnnnnnnnnnnnnnnnnnnnnnnnnnnnnnnnnnnnnnnnnnnnnnnnnnnnnnnnnnnnnnnnnnnnnnnnnnnnnnnnnnnnnnnnnnnnnnnnnnnnnnnnnnnnnnnnnnnnnnnnnnnnnnnnnnnnnnnnnnnnnnnntatcactgccctttgttactgtggttaacaaacacttgctgtaatttctctcttctaacttataggacaaacaaataatggaaatttttaacataagtatgtagagattgtggtaccacagtgataaactgatttttatgcttaagttaatgactctggtttatgtatgacaatttattcagtatgagaatctcagaaaactaatgtttttttctattccttaaccttcctaccctttttttggtaaagaaaattaccg

SEQ ID NO: 243173 - DNA, 825 bp, Homo Sapiens
ctttgtacaaaaaagttggattagaaagcaatgagtgctttggagaaatgtaaggcaggcaagagtaagggctgaagagttgactggtaaagagaatgtttagggaaggcctcagtgagaagttgtgaagaagttgatggaaagagcctgtgggtgtttgggggaagagtgttgtaggcagagaggatagcaaatgcaaagaccttgaggcagaagcatgcctggcttgtttgaaaataggaggaggctagtgaatggagtggagtgagtgctgggattacaggcgtgagccaccatgcccagccctcattttcaacagttttagaaataattactatctgaaaagaaccagaatgacagaatcttagcactggtagttttacatagggtggtgttatggtcctagataggtgtcctgtagaaatgttaaacacgggtgagatgtgggaagtggctgttttctactggagatggagaggagccacctccccacgctgagcatctgtgggcatcatgaacatttggaacttaagccacaatcatttgaatttttttggatgccccagttgttttccttctgtcaccaacaactttgggacttccctactgcagaattgtcgcatattaagtaggagacctcagttgttatggagtttttctcctccctagatacctagatctgtgaaagaaatccacatagcaaacgcttgtctagagctacatctctggacattttttttccttttctgtagcaatagtggaaaaattcttattcttacagtccaaatatatgtaagtgtacttattcttaaaagtttattttga

SEQ ID NO: 243174 - DNA, 821 bp, Homo Sapiens
ttggcgcagtttgaaaattatctgcaggaggagctgaagatccgccgctcgctcttcgactaccatgacacaaggatccacgtttgcctctacttcatcacgcccacagggcactccctgaagtctctagatctagtgaccatgaagaaactagacagcaaggtgaacattattcccatcatcgccaaggctgacaccatctccaagagcgagctccacaagttcaagatcaagatcatgggcgagttggtcagcaacggggtccagatctaccagttccccacggatgatgaggctgttgcagagattaacgcagtcatgaatgcacatctgccctttgccgtggtgggcagcaccgaggaggtgaaggtggggaacaagctggtccgagcacggcagtacccctggggagtggtgcaggtggagaatgagaatcactgcgacttcgtgaagctgcgggagatgttgatccgggtgaacatggaagacctccgcgagcagacccacagccggcactacgagctctaccggcgctgcaagttggaggagatgggctttcaggacagcgatggtgacagccagcccttcagcctacaagagacatacgaggccaagaggaaggagttcctaagtgagctgcagaggaaggaggaagagatgaggcagatgtttgtcaacaaagtgaaggagacagagctggagctgaaggagaaggaaagggagctccatgagaagtttgagcacctgaagcgggtccaccaggaggagaagcgcaaggtggaggaaaagcgccgggaactggaggaggagacaacgccttc

SEQ ID NO: 243175 - DNA, 406 bp, Homo Sapiens
  misc_feature (293)..(301): n is a, c, g, or t
gaaaatgttagcatcctcataaatattttgttttattgggatacaaaactgatttcgcaaactttgcaaaggcacattttgggtgggcacagtggctcaggcctgtaatcacagcctccttgcttcctataaggagttgattaggagtatccaagcatggactattatcagggctctctttactactggatacagaatcatcagcccctttaaatccaatcagattaccattaagaaaatatccaaaatatatacacaaaggaaaagattaggaaattaaacaaaaccctacnnnnnnnnntcagctaaggacaaaagaatgcagtatttcagaagccccagaaacaattcaaaaaactaattcttagaactttcttattctagtaccattcttggtaccaaaatc

SEQ ID NO: 243176 - DNA, 321 bp, Homo Sapiens
actgtcttactctgttggaggaggtcttctagtactaaaaacattgtaaaacaaggtagatttggaaagcattaacatatactatcattttattctgtctacaatgggttgtgaaaagaaaaccattttgttcaatttctaactccacgcagtaaaaaataggtaaaatattgattaaaggaaaatttgagaaaagaatggtaacaatttacaaatatggcatcacattcagtcagatgacctcaatctaacctattcctttctcaacaaccacaacagcacaacaataaaataagtcaaagccaacttttttgtacaaag

SEQ ID NO: 243177 - DNA, 905 bp, Homo Sapiens
ttggccctttttaaagaaaataatcttgtggttacccaatgttgacaatgttgaatgcttacatcatgaatgtagtgctgactgctgaggtacagatctttgggttcagcatgcctagcctagtaggtactatgtgactcattcttccatgagtgtttttctgtttgactgctgtgaatctttcatgtatgaattgaattatcatttggccttcacttggcaagaatttgacctataagtccacctctgtgcttttctcattagtctacaatgatttaattcagacttgcttcttggttataggatagtcattattaacaagatccacagtatgctattattaatgaaaatgtattcagaaatttgtagaaatagcttgtattttgaatatgtgtatcctaacaaatgagaaaagacaatacaaattaatcaaagttcaaaactaatgaaaacacattagagaaaatgtaggaattgttttttaaaagacacagaatcccttctacttgcacaaccctaacacagacactgttagagggctagaattttcagtctgctattttttatgcatatagatactttcagattttatggttataatgtgcatatcatttcacatacctacttctcttttcaggctacacataagacagctgtctccatttactctgccataggagtaaattaaaaggcaaaaagtatttattcagtaattatgattagagtgctataaagcttatgaattacatttaaagtacatttgttttggaaagccatgttgcattatatcaattgacatttctttagtaatcccatgtcataaagagaatacagatttattttggaaccactaaattatataaaacatctgcacttaaatatttttgtaataattaataatgaaa

SEQ ID NO: 243178 - DNA, 366 bp, Homo Sapiens
ccacgctgggggacggagtaagactcagtctcaaaggcatgacgaaaatagcaaaaatgctttagtgttatacctgttacgaatttaatggaaattacaagtaggagcccattacaatctctagccttaaaatgctgaaaacatacacagtgtgacaataagtaaacttcgagacccaataagggggaaagtccaacgtggaaagtatttggtaggagtgaagaacagagtgacaactgcttagtcccactggatatttcgctcctcttcaggaagaatactccagtttggggaggccatatcccgggccagccagttaaaatcgtcaacatcgttccagttattttccaacttttttgtacaaag

SEQ ID NO: 243179 - DNA, 241 bp, Homo Sapiens
ccataacaagtagttgttgcttggggagcagtatggttattaaacagtcttatctgtgatacactttaaaacaatactgggttaaacaaagggaagggaaatcaaaagacttaagtagcttcttggctccatcttcctttaatactcggtgcacaaacacgtaggaggtgacaagacaaagatgaggcgaggcaagctccaggctcccttgagagaaaaaaagcctatcagcatttctatc

SEQ ID NO: 243180 - DNA, 1612 bp, Homo Sapiens
  misc_feature (230)..(253): n is a, c, g, or t
gcagtaattcagaagaagaaagggaaatgacagtccactgcaggtaggtctctgcccatttgcattcttcacacttttagagttgaggccaggctgtagagctactccatagccttggaatagtgctttgctttatatttctagagaaagcagtaatttccaactagttcagtgttcctcattaatatggaatctacctacacaccaacactctttctggtgttctgtgnnnnnnnnnnnnnnnnnnnnnnnnaaaacaactcaactaatttactgatttatgctactttgtgattttgcgtgttatcacttccggatgctctaaaagggggggaaaaaaacctcaataaacgatatgctttttacatgtcaggacaacacagaccacagagatgaacctaaatgtaaaagagcaaaaaattttggtgatggtgttgcaaaagtaatgacatgtgatttaaaaatccatattaatgtagaccatagtttcagggttgaagagtaaaaatgcagcaagtgaagatcaatgtgcatttgaaaataaaggactatagaaacgttgttcacaaattttaagactctcaggtattaaagtatattcaaaacagagaacataggtactgttcagccaccagatgcaaatttcatgagatatccctctctggttgtctcgtggatcccagagcccagcaaaccttgggaatacatttgagttgggcacctgcctctaagacaccccaggagaatcctctctgagcactgtggtgatgcacagaacctgtgaatccccattctaaaatggaatctgttccagaagaaactcaggcctggagacactgcactagggagatagatttggtaacaagagtgaaaatacaggtctcagacaggacttggcccaaagacagaaaaaacactctgacctcctggacagctaaagacagtggtatttaaaaaaaatcattttaggggatggaggttttatcctcaggggtatcatctaggtctttcatcctgatcttcctaggagactatataggtaacctaaaggtgcacatggaattgtcttgccagtggtttattcactgaaaacttattgttagaacattctggattgtgttcccagtgtgctttctcctcagccatcttgcaaagcaactgcctccagtccccttgtgccccagctctcctatgtgtggatttcatactagatgtagattgcacagtgatgaccacagtgcgtggaaaagcaggtgagaaaaatcacaggatcttattccctctttctgtttgaaattccagccctgcagagcaccgggcaatttattgctcttttccaccagttgtttctttcctgtagatgtctgacactgagtagagagaccctcactcaccaagcacaagacaagctgtggtgactccctgagagtctgcgctggcgctagcagcagctgatatggaagcagcatttctggggcgtcatcagtacatcttcatgtggagacaatttggggggcaccatctatttcctgggtcaagctctttgccacaaacccaattccctccacttgggatgcagaactcactgcaactgacagtcatatctctaatg

SEQ ID NO: 243181 - DNA, 1590 bp, Homo Sapiens
ttggcctttaccacctgtgaactgggggctttaaaagtttgctccagcggctcttatcacaggccctgggctgggagacccctcgagaccctaggagttcccatgtccctgagagaggaggaggcatggggagtgggtcggctcacccaccccgggcctggggttgtgctgtagtgaggcccacacgctcctcaggccgatcccctgtgccaggtgaggccaccgattgggcctggatgggatggggcccggccatgcctgaccagctgggcagaggagggccatgctgcagtctgctttcttgaccccctccccagcccttgcaaggcagcccgcattcccaggaggggtatgctgacccatcccattgggcacctgccccacccttgctctgggcctttgtgggagacctgggatctgcgatgggtccactgccttttggcaggtgggtgaggtcagaaggctgcaggggctggagctggctgggccagctgggtaggactgagcctcaccaaaggctgtggggaatggcccgggggcgggtagccccaattaaagtcgttgtgggggagtagccacaagcctgagcctgccttgaccttgccagcctatccacaggcctcccctctccaaggaggacagacacagcagaggggaaacgatcctggggcttcttggagggaagggtagctgaatccaaagccctcacccgattccagctcttgtgcgactgatactattacacctgcttcctggtccctggagggcgtgtccctcccccaggacaaaacctggagctcttccagcccaccagctcttaggcaataatctcatcttccgggaccacgcccctgacaagccaggaaaagccagctatgaccttgtactctcaagtccctggggcagggaagaggttttatttaagtgattaaaagcccaggggagcttccttggaacaaggagtgggttcacaccaaggggaaggccagtggccctgggggaggagcagggacccctctctctcttactcgcttcctgggtttagaactcaggaccccgatctcagtctggagctccctcctgcaccctggctggcggtgtgctgggtgacaggactctggaggggtaccctgagtgcagctgtcggaggaggcagggcggtggggggggcagcacagaagcctctaaggccccaggtgcagtcctggacctcgtggagccgcatggagtgaggagaggtgcggatgcccagaaacagatgtgggatgagggcactgggcagccacagggtccatgtggaggaggacaggtagtcaaggagggcttctggaggtggtgtgcagggcccatctgatggccagaggaggccaggcagagctgccagtgccagcctggaggtggggccaccttcgtgcaggtgtctgggggtggagagcatgtgtgatgggggctgggtacagtgggctgcctcagagcactttgggcaggagtgacaggtacccgccagcaccctgagcagccatgctggccaccatcctggaagagaccagcgcaggtgcagagggaggacgggagacccttgggggcttt

SEQ ID NO: 243182 - DNA, 1594 bp, Homo Sapiens
ttgggcactgattgctggctcatcgctgtgcagaatatgtattggctggtgtttgactggaacacacccaagaaaggtggcaggaggtcacagtgggtccgaaactgggctgtgtggcgctactttcgagactactttcccatccagctggtgaagacacacaacctgctgaccaccaggaactatatctttggataccacccccatggtatcatgggcctgggtgccttctgcaacttcagcacagaggccacagaagtgagcaagaagttcccaggcatacggccttacctggctacactggcaggcaacttccgaatgcctgtgttgagggagtacctgatgtctggaggtatctgccctgtcagccgggacaccatagactatttgctttcaaagaatgggagtggcaatgctatcatcatcgtggtcgggggtgcggctgagtctctgagctccatgcctggcaagaatgcagtcaccctgcggaaccgcaagggctttgtgaaactggccctgcgtcatggagctgacctggttcccatctactcctttggagagaatgaagtgtacaagcaggtgatcttcgaggagggctcctggggccgatgggtccagaagaagttccagaaatacattggtttcgccccatgcatcttccatggtcgaggcctcttctcctccgacacctgggggctggtgccctactccaagcccatcaccactgttgtgggagagcccatcaccatccccaagctggagcacccaacccagcaagacatcgacctgtaccacaccatgtacatggaggccctggtgaagctcttcgacaagcacaaagaccaagttcggcctcccggagactgaggtcctggaggtgaactgagccagccttcggggccaattccctggaggaaccagctgcaaatcacttttttgctctgtaaatttggaagtgtcatgggtgtctgtgggttatttaaaagaaattataacaattttgctaaaccattacaatgttaggtcttttttaagaaggaaaaagtcagtatttcaagttctttcacttccagcttgccctgttctaggtggtggctaaatctgggcctaatctgggtggctcagctaacctctcttcttcccttcctgaagtgacaaaggaaactcagtcttcttggggaagaaggattgccattagtgacttggaccagttagatgattcactttttgcccctagggatgagaggcgaaagccacttctcatacaagcccctttattgccactaccccacgctggtctagtcctgaaactgcaggaccagtttctctgccaaggggaggagttggagagcacagttgccccgttgtgtgagggcagtagtaggcatctggaatgctccagtttgatctcccttctgccacccctacctcacccctagtcactcatatcggagcctggactggcctccaggatgaggatgggggtggcaatgacacccctgcaggggaaaggactgccccccatgcaccattgcagggaggatgccgcccccatgagctacgtggagtaactgggtttttcttgggtggctga

SEQ ID NO: 243183 - DNA, 996 bp, Homo Sapiens
aatttgaaaataggcttatttaaccagtggtattgtctgacatcctatacggcataactgattacagccaagttcatgaatacaaataaaatagcaatttccctcattctctctttgttttctgttcagagaaatcaggagatgggagcattatgctcagaaaccgaagagctcttccaagagctccagcttagagtccaggcttccagagcatgcagcctcctaacacgtatgtggtcacatgtgcaaagacctttattacaaaatattcagagcagtatttctgtaggaaatcacacgagcatttacaaccaaacatggctgataaaattcatcttgctgtggatggtgaggatttgaactgcaataaaggagatgaggcctttactttaaaggttcactttccttgaaagggggagagtcccgggtgagagggaatcgccatcagtctgcctccttccttcttgctccagttgactcagggggtccaccctgtccctctggagtacatgtatcactgcactgattgagaaatggaaacaccttggcccaaatacaagattctgtcacacagccaacactggaagtgactttatactttcttattacacaaaaggcttaaatatatgagtcctcatgtagaacaaaatgcctgaaattcagcaagttatgaaaacgacacttctccacccctgaggatattttatctttataaagttgaaaatacaaaatattaaaataatttgccctttctccccatcaaaaggaatcacattctcaaaggattcctacaatatacaaaattctgaaacaaaatttatttctccccaaaccaagaagtcaatgttaagctgccaagaagacccttttccataggagtggaaaagacaccttgttacttttttatttaagtaatcatatttagagaaagacagcaaaaggagtttctggccttatgggctttaattttttactttgattttcagcatttcccaa

SEQ ID NO: 243184 - DNA, 686 bp, Homo Sapiens
aacaaaaaatacagttatgctttaacaaattcttagcaatgtggcccacgctttttaaaaaattgacgtgttggcagtgtttgttagaactctgacgtacatcccaaatagtaataaattcagtatgaaattatacgcataaccttactcaccatactactttttctcccaaactattgtgacttctttttgctctctgattaaaacaaacaggtaacatccttacacctttgctccatcccttgggctttaaaaagaatggctgtagttagttttgattcactatatactctctgtacttgaggaagagtaagctgtgtttaaaagtgcccttttccatgtcgtcatgtaccaataccctctgcatttcaaaatgttgactcagatgtttttccctctacagaactagaaaattgtccccccactttggtctatttactcatttgaagacaaacagggttactaagagtttcacataagttatttctttagagtgacgaagtgttagtttacttcttgcttagtggagacaaaaattgtgagataaagaggaaggaataggatgtacacatttacccatcaatatagcacccagtgttatttcagcaggacccttctgttagcatctaaggtaaggttaggacagtcaagataaaatactggatccaacttttttgtacaaagtt

SEQ ID NO: 243185 - DNA, 926 bp, Homo Sapiens
ttggtgctgcgctcctctaattgggactccgagccggggctatttctggcgctggcgcggctccaagaaggcatccgcatttgctaccagcggcggccgcggcggagccaggccggtcctcagcgcccagcaccgccgctcccggcaacccggagcgcgcaccgcaggccggcggccgagctcgcgcatcccagccatcactcttccacctgctccttagagaagggaagatgagtgagtcgagctcgaagtccagccagcccttggcctccaagcaggaaaaggacggcactgagaagcggggccggggcaggccgcgcaagcagcctccgaaggagcccagcgaagtgccaacacctaagagacctcggggccgaccaaagggaagcaaaaacaagggtgctgccaagacccggaaaaccaccacaactccaggaaggaaaccaaggggcagacccaaaaaactggagaaggaggaagaggagggcatctcgcaggagtcctcggaggaggagcagtgacccatgcgtgccgcctgctcctcactggaggagcagcttccttctgggactggacagctttgctccgctcccaccgcccccgccccttccccaggcccaccatcaccaccgcctctggccgccacccccatcttccacctgtgccctcaccaccacactacacagcacaccagccgctgcagggctcccatgggctgagtggggagcagttttcccctggcctcagttcccagctccccccgcccacccacgcatacacacatgccctcctggacaaggctaacatcccacttagccgcaccctgcacctgctgcgtccccactccccttggtggtggggaaattgctctctgggcttttggtttgggggcgctctctctgcttcttcattgttccctctggctt

SEQ ID NO: 243186 - DNA, 924 bp, Homo Sapiens
agttggctttaggttagttggctagtagccaaaataggaaatgttttagatcctattcccctgattttcaggttctaaaatggactgactgggtggtctgtttcagacatcttcccctccccactccccccacctccaacccttcacacacaaagagttacacaggaaagaagaaaaaaagggatttcttgctggtcctcaaattcgtttgtgcctctgactcttatcccaggagagacccagaagtgcctattgaatgtaacgttccaagtaggaaagcattttaaagtgtgtatttagaatgtatctggaattgcgtaaatatatacatagatctagattctaaaaatatgaaaatatgaagcaatacaatttatgcagtatttgaattgggctcaaaaaggaaatcaaatgaggagccgtcatcaaatcacagtgcggtagaaggtgcacctggtgtttggctacagctccatctgccattgctctgttttccctgtgatctaagcctggaactagtatgacaggaccctttgacagagatatccttagaaggaccacttctaatggccacttttcatacctccccatcaattaaaaaccagcgtggtgaaagatcagaggggcgagctggggtcaggaattgggtatgagctttccttgccacaataatagggtcacttctgcttttaaatttgaatgtgaatttgttgtttttaagcctgtacattatttttttggaaggaattacctatttgtggataatattagtaaactgaatgtaatatacataatgtatttggggattggagtcactactccaaattgattaattgcctgctagaaaattcatgtggccacaaggatttttggcacttttctccctgcagcttcctcattcttttctcttcttcaggtttactc

SEQ ID NO: 243187 - DNA, 568 bp, Homo Sapiens
aactttaacattttattttgtgtaaaaaagggcaaatttagtgaattattttcatcttgtacacaaagttataattttaatgcttttcacatccatgctgaaaatttgcaatttggtaaaaatgaaaggaacataaatttttccaaaggaatttttcacgccattatatatacacttcatgagaaagtttcaaacactttctcaatgatcacgagttaccaagaaaataaaagattaaatttgtacagatattgatctatatatcaaatacatacagaaatgatgtaaaaaccttatgcagtttactttgacctctgtcctcaaaagatttgcccagggacagatgcttttcttttgtataaatgactgtggctttatttaaaatatgaaaatcaaaggaagaaacccagtttaatcacagtatttttaaaatcccttcccaatattaaaggatcattaccaatatatagcaccataatacaaatattgatgggagagggtattcacatcacgcaaaattaataataataataaaaacaaacaaacactgaaaacccgtgttagccaa

SEQ ID NO: 243188 - DNA, 284 bp, Homo Sapiens
actgcgcccggccagccctgttgtctttcaaagaacctcggccccactgatggctgatctcactcccactgtctcgtaaaattacactccttcctggggatccctcttcctgcagccttgtccttggggagtacagggaagtacctgcagtgaccctgcccccatgaccttggccaggcaggatgattccagagcccgtactgtggggatcctcactgaccagcccagccccatccgcaagccaggctgggcctgggcataacttccctgggctctcccaagac

SEQ ID NO: 243189 - DNA, 1027 bp, Homo Sapiens
ttggcgtgcccgcttccaaaatggcggcggcggcggtatctggtgcgcttggccgggcgggctggaggctcctgcagctgcgatgcctgcccgtggcccgttgccgacaagccctggtgccgcgtgccttccatgcttcagctgtggggctaaggtcttcagatgagcagaagcagcagcctcccaactcattttctcagcagcattctgagacacagggggcagaaaaacctgatccagagtcttctcattcaccccccaggtatacagaccagggcggcgaggaggaggaggactatgaaagtgaggagcagttgcagcaccgcatcctgacggcagcccttgagtttgtgcccgcccacgggtggacagcagaggcgattgcagaaggagcccagtctctgggtctctccagtgcagcagccagcatgttcgggaaggatggcagtgagctaatactgcattttgtgacccagtgcaatacccggctcacacgtgtgctagaagaggagcagaagctggtacagttgggccaggcggagaagaggaagacagaccagttcctgagggatgcagtggaaaccagactgagaatgctgatcccatacattgagcactggccccgggccctcagcatcctcatgctccctcacaacatcccgtccagcctgagcctgctcaccagcatggtggatgacatgtggcattacgctggggaccagtccactgattttaactggtacacccgccgagccatgctggctgccatctacaacacaacagagctggtgatgatgcaggactcctctccagactttgaggacacttggcgcttcctggaaaaccgggttaatgatgcaatgaacatgggccacactgccaagcaggtaaagtccacaggagaggcactggtgcaaggactcatgggtgcagcagtgacgctcaagaacttgacaggtctaaaccagcgtcggtgagaggaggggtataagctacaatgcctagaagagaatgagcggacagattg

SEQ ID NO: 243190 - DNA, 955 bp, Homo Sapiens
  misc_feature (336)..(467): n is a, c, g, or t
  misc_feature (532)..(636): n is a, c, g, or t
gttgggcgtcagaaaccctgccccagcccctcggatttccccagggtggaggtcccttcaaacacagcccctcagcttataggctgtttggaggccagacaggaagagttccattcattcaacatgatcccagcagcagtagcgggatgagaaactcacccccaggccgggggtgcttggagagcgcttgagaggatttaaatgccctataccccacatccctaatcctggaccaactagaaacagggggccaccttcaggaaaattaagagcagtattttccagagtgggtgctgcaggattttaccctgtagctgttttaaaaagtagtttggnnnnnnnnnnnnnnnnnnnnnnnnnnnnnnnnnnnnnnnnnnnnnnnnnnnnnnnnnnnnnnnnnnnnnnnnnnnnnnnnnnnnnnnnnnnnnnnnnnnnnnnnnnnnnnnnnnnnnnnnnnnnnnnnnnnntttagctgggcgcagtggtgggcacctgtaatcccagctactgaggcgggagaatcgcttgaacnnnnnnnnnnnnnnnnnnnnnnnnnnnnnnnnnnnnnnnnnnnnnnnnnnnnnnnnnnnnnnnnnnnnnnnnnnnnnnnnnnnnnnnnnnnnnnnnnnnnnnnnntccgtagagtgcctcggggaacctagtttgggaaatgctcatttagggacctgtcgtaatgtgtgcaggggtcctctcacagaagtgtcctaattaaccacacacacttctgctgctggagctctgagcacaggcagaatgacactaaaatattcagcattgaaaggacacaagaagggaaccatttgcagtttcaaaatactgcttcacgccaggctgcatgttgccttacgaacgctgggcaccttggcgtctctcatccaaactcttccaaaactcccacttattctttgctcccttgatggaaaagcagtgccaa

SEQ ID NO: 243191 - DNA, 958 bp, Homo Sapiens
gagcatgattccctggaagtaagtcacttacaccaacccaagttctaattctttaagatgtagtaaagacaaaattgttcttgctatataaaatggaagaaaggatttgcagagttcaaggatgatatgctctagctctatatgcactccgctatcaatctttccttttactttctgccttgaaaaaatcattttaataaaatcaaaaattttcattctaaaatatagttcaatgatttcactaccctttatgaacaaaaacagcacgaatcctctaaagaagaaaattgagccaaattgttatgttttgcctagatattcacacaatatttcacaccataatagaaaaaataatttttccatgagaagtcaagagacctgtattatataatagttcaaacttttaaaaattaacatgtacaatacactgcagtataacataatttttgttggaggggtagatgaagatagtggctcagtttcctttgtgtaaagcaagtgaacttggtcgatttaacttaaaatttctattagcacttaatatctgcaaattttaatttagggctcaacatgtggccttgccatttaaaagagctatcagccttaatagctaacacaaattcttttatttcagtgtattatataggagaaacaaaaaatgctataaaattcatgtttctaatgaacaaaaatgttaaggtttatgactatgcattgtatagaattacctaatatttttatatctgaagtagaccttttgtaagtacagtacctacatgtttttttcatacattcatacttgccttcgcagtttcacatctgtataaatcttatgatcgttctctaataagtacacaagattaacactacttatgaaatatggacaaatatattactactcattataacccatccagattattagtttaactcattcaattactacaaagatccccaa

SEQ ID NO: 243192 - DNA, 1626 bp, Homo Sapiens
caactttgtacaaaaaagttggctttcccttcaacgacccggaaggaactgcagagttggaaggcagagaatgaagccttcaccctggctgacctgaagcaactgccggagctgaacccaccagtgctgatgcccagagggaatgtggggactcccctgcgggtctttttggagttgatccgggcctgccgcctaccccctcggatcatcacccagctgcagctccagttccccaagacaggttcctcccggcgctacggcaatgtgccttttgagtatgaggactcagagactgtggagcaggaagagcttgtgtatacagcagagggtgaagaaataccccaaggaacctacctggcagatataccagccagcccctgtggagagcctgaggaagaagtggggaaggaagaggaagaagagtctcactcagatgaggacgatgaccggggtgaggaatgggaacggcatgaagcgctgcatgaggacgtgaccgggcaggagcggaccactgagcagctctttgaggaggagattgagctcaagtgggagaagggtggctctggcctggtgttttatactgatgcccagttctggcaggaggaagaaggagattttgatgaacagacagccgatgactgggatgtggacatgagtgtgtactatgacagaggtactgggcaaggagtggcaatactggaggtgaaacaggtgccctggccttgcagtgacactttaccagagctagcaaaggctgagacaggatggtggagacaaggatgcccgagactctgtccaaatgcgtctggaacagagactccgagatggacaggaagatggctctgtgatcgaacgccaggtgggcacctttgagcgccacaccaagggcattgggcggaaggtgatggagcggcagggctgggctgagggccagggcctgggctgcaggtgctcaggggtgcctgaggccctggatagtgatggccaacaccccagatgcaagcgtggattggggtaccatggagagaagctacagccatttgggcaactgaagaggccccgtagaaatggcttggggctcatctccaccatctatgatgagcctctaccccaagaccagacggagtctctgctccgccgccagccacccaccagcatgaagtttcggacagacatggcctttgtgaggggttccagttgtgcttcagacagcccctcattgcctgactgaccgggttgggggcttcctttcatagctacatgatgaaaaccctctgccctggcctcatctaccactgaagcagaaaggagtctgggagcagcagtcttcgtggctggttcagggtgttttgttccgagcctgcctgcctgccggttctatacctcaggggcatttttacaaaaagccccctcccgtcccctccccttggatattaggggtaacgaccgcttgtctttggtctctaaccctaatctctgggcttgccctttgcctcctgcagaactttgaaaagctgggttgagtgaggctatcagcacagccttccttggggactctgaggtgtcccacgaacggccaaaaagggggaaagggactctgggccaggagagatttgtggtgcttgg

SEQ ID NO: 243193 - DNA, 1749 bp, Homo Sapiens
  misc_feature (106)..(116): n is a, c, g, or t
aaacttattccccattttaaatgtattttaatatttaacccatggcgtttttaaacacaaatttaaaccaagagtttcaaattgcatttcaccccctcccttgagnnnnnnnnnnncacattctttcactatatcacaaatatctttttacttcttattcattctgattcgttgtaatctatttgacttttcttttgaaagacattgacttttgttctaatatttgaaatatttcatatgcctacaacagaggtctaccaggatttctttttcttagatgcctaagtaagttcttgccctttcttatgtctattatcatcttcctttctttcacccttgttttgctggaattcatataaggatgggtaggaaatgaatgttctgagtacttgcctacctatttgtcactaattggaccaatcctttggctaggcccaatttacagatttatgatcaattgcccccctaatttgttaccacggctccacttattctaatgcaatctgatgttgctgtggatgaacagttaataaaataatcttccccttctggatttgattaactctagttctgttcacctagtgacctggtaagaataatatgtcaagtatgctgctagataacactgctatgattaagggatcccctgactaataaaatctctctggactaggaaagttataattatcttataggaaatcatagctttgagtttctcaagtgtagtaacttgtaactagacatgtcctttgcaggcatctggaaatgcatgtttcaaaatacgtctctcatagaacacgagatattttaacccaaggtagatcccacactcacaaggttgaccttatctccttgtacttgagtgaattgctacatggactgctgcggactctcaggagaaggctgcctgaagttaccctgctgtgttcagggcacaggtatcagatgtggtctgtgaaagtcttgtgagttggaatgtttagaagaacccaaaaagatcctgtggtagaaactgcagttgctaatgagaagtctgatgccagcgtagttacccttcctttgtagatgacctgacttttcttctttagtttcacaattatgtatcaaggttgaagttttttccattctgcttggtatttagtgaatcctttcaatctataaagacttactttttgccttagcttgagaaaatacttgtgtgtcatatcttatgtaatttttgaaactccaattagttacaagtggtatttcctgaaattattcctcttcatcattttatctcattctaagactttttactctttttggggggagacctctttgaatttatattacacccctacaattgaatttttaatttcaacaatcataatcttaatttctaaaaactctttttgttctctgatccttttctacaacaatttatctcatggatgcagtttcttcacaagtctctgaaaatacaaacacttggtttttaaatttgtcatcatttcttcaatgtttcgttttcctctgaaattgattattcaatttctatattgtgaactttctctttcatgtttctagttttcaatttgacaatccttaattgtatatttatatataaaaaggcaataatgcattagtaattccagacatctagtatgggttttcttcattaccatatacatacattttcatttttctaaggataattttaatatatgacttctgaactatttatgtagcgatgttatactcttccaa

SEQ ID NO: 243194 - DNA, 882 bp, Homo Sapiens
gataaagtgcctgggttccttgtacccggaagctttcatggtagcccaagatgatagcttttgaacttctttatgaaagaactcctctgttgtttaaggcacagtttggggtctttttctgtggtggcaagagggaggtttctgtcacacgtagctgaacatattaaatgattagaatagagggaatagattagtaattgattcagttggtacttgttgatccttttctgaaagatgtccttgcacacacaacaaagatctaagaaagaagttgatgttaaatccccatttcacacatgagaaaagcaatgtgggagctgagactatgatttatctctcattcttactcagatctcaatttgctggacaagtttgccttttctaaatcaatgaggcccagtcccaaaggtttttaccatagaagaatctaggtttactcatgtaaacactgaataattttcagttctagtgactgcctgggcaaaatccaagtaagcctcaaatttttcagactctggtatgatttttctcaggtttgactctctaggtagcgaggtaattagactccctgttcttttcaaggtcaaagaccactggacaaaaatatgagaactttgtccaccctttgtggctaatgagcttgactctcaaagggctatttcacctccttcatgagttgtcatttggagtccactctctcagtcatggctttgcagggaggtttggagctcagtccagagcaagctccccagatgacagctacatgctctataacctatacgaccaagagaccatgttgcctctgtctaccagctcctttatggccccgtggtctccttgttgttatggggagtttctcagagtgttctgctcaaaatccaa

SEQ ID NO: 243195 - DNA, 591 bp, Homo Sapiens
gtttttaaaaagtcacaatttttataaaaaatgatttttgttacattcttttgagaagtgtttcagtcatacatacacccacacaccccactcaaccttgtatcaaattccaaaagtgtaactaaagtataagaatatcatgactagttaaaagatagcaaataccataaggtacaagttcaagtattagtataacaagtatctgagtaacaaatgtccttggaaatggggggtaggaggagatatgattagtcacaggtttggttaactgccctcaaaatttacaagttaaaatgttttggctggtgagcacatttcagttcttaggggaaaaaaagcttttaatggcaatttatagaaatcagaatccaggctaatgatttttatccttcacacagtaaatgcagcccatccagaatcctggagcaataaagtaagaagtaattcaaatatctgcttgtgggtcaataaaaagggtttctgaagtatcaagtcttgtggggacagcccccaaccctaagggcaggtagtattctatctcctggctggctcatcacattcaaaacaacctgtttgtacaaagttggcttt

SEQ ID NO: 243196 - DNA, 979 bp, Homo Sapiens
aaattgatgagcaatgcttttttcataatagaacaactttgtacaaaaaagttggggtgttgatgcccaaggagaaatgctatttattttggagtagtagtaaaaagggctcaaaggataaggaggccattcaggcctattctgaatccctgatgacatcagctcccaagggctctgtgctgcaggaagcaaaactgtagggtcctgaggacaccgtgagccagccaggcctggccgctgggcctgaccggccccccagcccctacaccccgcttctcccggactctcccagcggacagccccccagccccacagcctgagcctcccagctgccatgtgcctgttgcacacctgcacacacgccctggcacacatacacacatgcgtgcaggcttgtgcagacactcagggatggagctgctgctgaagggacttgtagggagaggctcgtcaacaagcactgttctggaaccttctctccacgtggcccacaggcctgaccacaggggctgtgggtcctgcgtccccttcctcgggtgagcctggcctgtcccgttcagccgttgggcccaggcttcctcccctccaaggtgaaacactgcagtcccggtgtggtggctccccatgcaggacgggccaggctgggagtgccgccttcctgtgccaaattcagtggggactcagtgcccaggccctggccacgagctttggccttggtctacctgccaggccaggcaaagcgcctttacacaggcctcggaaaacaatggagtgagcacaagatgccctgtgcagctgcccgagggtctccgcccaccccggccggactttgatccccccgaagtcttcacaggcactgcatcgggttgtctggcgccctttttcctccagcctaaactgacatcatcctatggactgagccggccactctctggccgaagtggccgcaggctgtgccccccgagctgcccccaccccc

SEQ ID NO: 243197 - DNA, 813 bp, Homo Sapiens
  misc_feature (272)..(489): n is a, c, g, or t
ttggatttatttccaaacctgtctttcaacattgtatattttggactggcataaagtctttcatagctataagagagaaaaaaacccattgagtccaacagagtatcactaatgcctgtaaaacctcctgtttatataatggtatggagaactcttcatttttatataactatcttttattgtatagatagcacacatagaccctctagatacttggatatttatcctgagttggaacaaataaaagggtaaaaagatagtctatttaaaannnnnnnnnnnnnnnnnnnnnnnnnnnnnnnnnnnnnnnnnnnnnnnnnnnnnnnnnnnnnnnnnnnnnnnnnnnnnnnnnnnnnnnnnnnnnnnnnnnnnnnnnnnnnnnnnnnnnnnnnnnnnnnnnnnnnnnnnnnnnnnnnnnnnnnnnnnnnnnnnnnnnnnnnnnnnnnnnnnnnnnnnnnnnnnnnnnnnnnnnnnnnnnnnnnnnnnnnnagttagaggtttctgcaggattacagagatgtgggaacttccagccattgacgtgtggaggttaggatatgaactactgtgaggtgcactttcagaggttgaggctaatactccttttcctacttcccaaggaggtgaagtttcctgaagacagtgcttttttacatgtagagttttttgtggttctgttactctgttgtctccattagtcaaggaacacgttttgccatcaatataatatttaacaaactatagtagtatagtttggaaagtagaaacgcccttttatgaatgtattattatatttttggaggcagagtctca

SEQ ID NO: 243198 - DNA, 1571 bp, Homo Sapiens
  misc_feature (1295)..(1303): n is a, c, g, or t
tttctgtgtgtctaaatgatacatgtcttgaatttggttctattaaagctttaaatgaccatttctgtacacatggctatttcatttatttagtagttttgaaatgttagcaaatataaggtatttgtaaagcatctttcattataaagagattagtaatattcaccaatcatgccaatgagattatacactctgccaaagactactagaaaaatttgatcattattaaattcaatgttatttgacagtgtgaactctatgtaacagcacaaattctggactttgaatctggctgctgtcctcacctgaaccattaaaatgaccttgttaacaaggaaggaatcaatggggaaatatcacaaccagagattggctgtgtgtccaagagtgctttgtcttgttgccaggatcagactgtgaaatcacagaggcaagctgatgtcatcagaggtgactctgcctatttcaagtcctataatcaccccatgggattcaacagcagtaggaaaacatcacattctcttaatggacaccccatatttgtagaaacagttatgactattagcatttgttatacaaacccaatctatttgtgctcatctgtagaatcctacagacactagagactaaatgatattaattttaggaggtgtttctaaaggagaaacagacaacatttggttttattatcgtttgtatccctcagaagttgtgtgtagacaactttcatctaatacatcaatatcgacttgtccaagtttctcgatgaagtgaaaggatctgattattggctgtgtcttagcgtctgtaggaagcttctaggctatttgtgtacccaaatttaaaacttgcaccttgtttcattgaataagtgtttttcttatttgtgacttggaaaaattagtgttaatgtgatgtaaaagacctattatcataggcacaagtaatgaacactattggtcatgacagattaaaatttccttggaaagaaaaatgatagtatcagaataagaatacatgaggaatatatacatatacacctgcttcacacagaaagctttctgtaaaaaaatacaaaagcaaccagtgctgtatattatgtaaactcacaaagtgtaaaagtgtactttatacacaaacatgaagcataaattaaaaagtaggacaacagcaaaacattttaaatatagaaaaatttgaacatatttttgttaaataagaataaataattttatcacacaaattcacataccagttgcaaaaacaataaattactttttttcagtgctgcaacnnnnnnnnngtttgtgatttatcccctaattcctagtttagtgggataaaactgtttccacaggaaggcaaaggaacataaatttattgaataaattataacaatgcccacatatttctaaacagcaaggcagggcttaatttaaatttttctgatctagaagaaataaatgtcattttttctggctccctttgtacttaataaaacttattatggagtgcttagttatgtaagtgagattagattcttacaaacctgagcattttcagacgaattc

SEQ ID NO: 243199 - DNA, 1460 bp, Homo Sapiens
ttggcccaaagttgagcatctgattggttatgaggtatttgagtgcacccacaatatggcttacatgttgaaaaagcttctcatcagttacatatccattatttgtgtttatggctttatctgcctctacactctcttctggttattcaggatacctttgaaggaatattctttcgaaaaagtcagagaagagagcagttttagtgacattccagatgtcaaaaacgattttgcgttccttcttcacatggtagaccagtatgaccagctatattccaagcgttttggtgtgttcttgtcagaagttagtgaaaataaacttagggaaattagtttgaaccatgagtggacatttgaaaaactcaggcagcacatttcacgcaacgcccaggacaagcaggagttgcatctgttcatgctgtcgggggtgcccgatgctgtctttgacctcacagacctggatgtgctaaagcttgaactaattccagaagctaaaattcctgctaagatttctcaaatgactaacctccaagagctccacctctgccactgccctgcaaaagttgaacagactgcttttagctttcttcgcgatcacttgagatgccttcacgtgaagttcactgatgtggctgaaattcctgcctgggtgtatttgctcaaaaaccttcgagagttgtacttaataggcaatttgaactctgaaaacaataagatgataggacttgaatctctccgagagttgcggcaccttaagattctccacgtgaagagcaatttgaccaaagttccctccaacattacagatgtggctccacatcttacaaagttagtcattcataatgacggcactaaactcttggtactgaacagccttaagaaaatgatgaatgtcgctgagctggaactccagaactgtgagctagagagaatcccacatgctattttcagcctctctaatttacaggaactggatttaaagtccaataacattcgcacaattgaggaaatcatcagtttccagcatttaaaacgactgacttgtttaaaattatggcataacaaaattgttactattcctccctctattacccatgtcaaaaacttggagtcactttatttctctaacaacaagctcgaatccttaccagtggcagtatttagtttacagaaactcagatgcttagatgtgagctacaacaacatttcaatgattccaatagaaataggattgcttcagaacctgcagcatttgcatatcactgggaacaaagtggacattctgccaaacaattgtttaaatgcataaagttgaggactttgaatctgggacagaactgcatcacctcactcccagagaaagttggtcagctctcccagctcactcagctggagctgaagggaactgcttggaccgcctgccagcccagctgggccagtgtcggatgctcaagaaaagc

SEQ ID NO: 243200 - DNA, 1377 bp, Homo Sapiens
ttgggtcgggggcctcatcagaaatgttacacacggagtatcaaactctgctgccaagtttgctggaacattatcagatggcttagggaagacgatggacaatcggcatcagtcagagcgggagtacatcaggtaccatgcagccacaagtggtgaacaccttgtagccggcatccatggcctggctcatggtatcattggtggactgaccagtgttataacttcgacagtggaaggtgtgaaaacagaagggggtgtcagcggtttcatatctggccttggaaaagggcttgttggcactgtaaccaagccagtggcaggcgccctggattttgcatcagaaacagcccaggcggtgagagacacagccacactcagcggccccaggactcaagcacagagggttcggaaaccgcgttgctgcacggggccccaggggctgcttccccgatattctgagagccaggcggaaggacaggagcagctcttcaaactcacagacaacatacaggacgaattcttcatcgctgtggagaacattgacagctactgcgtgctcatctcctccaaagctgtttacttcctgaaaagtggagactacgtggatcgagaagccattttcctagaagtcaaatacgatgacctctaccactgccttgtctccaaagaccatgggaaggtgtatgtgcaggtgaccaagaaagccgtgagcacgagcagtggagtgtccatccccggcccctcccaccagaagcccatggtccatgtgaaatctgaggtccttgctgtcaagttgtcacaagaaataaactacgcaaagagcctctactatgaacagcagcttatgttaagactcagcgaaaaccgagagcagctggagctggactcctgaagccccgctgctgagatgggcgctcccgacacagcgcagacccaccaggaggaaagaggcccagctctcagctgacgatggaggcagaaccggagtcgggtttggggaagttgtcaaggaatgagggaaagtaaatcctcatgaggaaaagtacaaatggaaatcgtattaatttgtgaggcagggagttattttagattatgggaaataatttttaaaggtattggttaaataacgtttaaaaacatgtactgagatgaatctaatttttagattgccctgtattttgttaacatgtatatatgtacaacagtgtgtttgtaaatatataggaacgtttctgaacagggtctgtgctatgtgtaaaggtttgttaactgtaaagtaatataaagttatattggatcttctattgcactaatttctagatgtctaattcagatactgtctatagaaaggcattcttaaaagttaaagaatgttac

SEQ ID NO: 243201 - DNA, 1252 bp, Homo Sapiens
  misc_feature (360)..(455): n is a, c, g, or t
actttgtacaaaaaagttgggtcaactggaatacaagtttcagtatgcatacttcaggatgggaattaagcatccagacattgtaaagagtgagtacttgcagtattcactaaccaagattaagcagagacacatttacctggagcgcctgggacggtaccaaacccctgataagaaggggcagacacagatccctaacccattgctcaaggacattctcagagtttcagaagctgagtttttggccaggacagcctgtacttctgttgaggagtttcaagtttttaagaagctcctggctcgggaggaggaggagtctgagagcagcacatctgatgacaaaagggcaagtctggatgnnnnnnnnnnnnnnnnnnnnnnnnnnnnnnnnnnnnnnnnnnnnnnnnnnnnnnnnnnnnnnnnnnnnnnnnnnnnnnnnnnnnnnnnnnnnnnnnaggatgaggacgacgaccaggaggaatagctgtgatggaaggactagagcgaaagggcccagagatatcaaggaagcttttcattctcttaaagcttttgggtcctttacttgaatcttctcaagttattttttattctaaaactggtctcttgatgaaaaaaattataagtcacctgagaggcagacagatcaaaccaaacaggaaacaggaaatgcatgtttgatctgttgtcacgtgtctgtggggagggccctgtcccatcctgaataagatacttatgttgagctattcacatcaaggggactcaatatatcaacaattggttttatttttttctcttttgaatatgttggtgataattccgtgacagttggaagatggggttcattcttccggttcaggaatcactatgtatttccttcttgtgataaaaataaaattacgagaaggcaatgtgaggttttagtacatcatagcactttattttatgaaaacatgtagcagattttccacaaaaatgcttatttttaatccaaaagtatattgcttcataatggtattcagtgcacagcagagtaaaagaagttaattcatgatgtactggttaattttgcatggcttcttaaggccagcaaaatgctggcagttttctttatctttgtgaagaacaagcccttcctgtttggggaagttggcttttatgtcagctcttggccagtggtcacttccaagcctggtgtctccagccctgtagtctgtagtgccagactgtgctggcctggaaagtgctgggg

SEQ ID NO: 243202 - DNA, 640 bp, Homo Sapiens
ttgaaacgggtaacttacacactttataatagaacaacaaaaataatgttcaatatatacagccttcgcatggactatctgactatacacaggcagagtgataacacaatataatcttcatcataatctgtgcacaaaaagacaccaaacagacaacatgtgcacatcacagtgaaatgacatcacaggtccagtgaaaattcagcataatacaaaatggactgctctattgcaaatgacatctttctaaatgcccagctcttactcagtagtaatttacccagagtctgaagcagagattggttgtgtggctataagtctcttgagtgagacaacctctgcagataagtttgctatcccctgcttcaaatacaagttctctgggtcagaaactttgtagccactgtctttcatttcaacaactccagttttgaaactattctgagttttgccactcagttctttttgatgccagtgctccgatttgagagaccaatcttgaatgttagtcacttgcactgagaaaggagtaagagaagaatgtaccatacttggggcactatgcttttcgagttcgaaatgtcttttagatgtcatgtcaataggtgaggaaagtttttgcgtggcctcaaattcccaa

SEQ ID NO: 243203 - DNA, 1262 bp, Homo Sapiens
ttgggtctttgtgtcaatccttaagtacccatgtctttttcatgtctaaccattgggaaggtagaggctggcagggaagacaaatctgctacaagtccatgggaagaccctacaatgaaatgttcattggttggtatactgttttagtcttgaattgccaactttccaactgatctatccatattccttaagtactaaagacaaaatagagggcttctttttctctcttaatgtcttgccttctggttttcctggtttgcaagactaagtgtacctaatctcaccatctcttcacttctagctctctgaaacaagggtcacactactcagagggataaccccttacagtggtctgaggagtaactatttcctaaagtattctaaaagagtaggaagagagaaatggtagcctgctgcttctcacagacacctcacatcctcacttgggatggcatccacatagaaaccctgcatttaggtaaaatttgcctgactgaaggggactcagtcctccaaatcaaggtcaagaagatatctgcatgagaccttaagaactctttattgccattatttggagagggcgggggaattgtcctaatcacacatttaacacagggaataagtgctgaagtgacccagatcaccaagcgcagttcctcatcatactttatttttgctttccttattccttggcactgactaagctaaagttaagaagccgacttcataagccaacccctgtgatgggatggaaaaatgggcttttgcagagggtttattaatagagatggatatactactcacaagttctggctcatggctccactgagaaggccatagtaataaaatgatcttatgaacactgttccccaaaggccaaagcctgaagatattgccccttataatccaatcagccttatattttaataagtcctgaatcaacctgactacggatatatggggccaccagggtgcatgggtgcatgtctgctcagcctagccctggaagtgagcactgccggccacagatcctgggaaaggtggtagtaacccagaagatgtagccttgaagggaggatacctatcaaaatgccaaagctgcagggacacgaagacggttgaaaattcaacctatgtatactagatccttccagtttgatggtttggtcattcttcttcatgattataccatggagaattttctgtgacaagggtggtcatggaagtaagtgagtgatcccctggtttctcattccttaaag

SEQ ID NO: 243204 - DNA, 937 bp, Homo Sapiens
ttgggttcgcgggggcagaggcattcttgccgctggcccagtcactatgtagtggaggggcagacaccctcccgcaaattctggaaggttcttagtctcgactagggcagtagccccaggactcctagtcgccggcttcaggtcactgccggctgaacggagctgccgtcgccatgtttggctgcttggtggcggggaggctggtgcaaacagctgcacagcaagtggcagaggataaatttgtttttgacttacctgattatgaaagtatcaaccatgttgtggtttttatgctgggaacaatcccatttcctgagggaatgggaggatctgtctacttttcttatcctgattcaaatggaatgccagtatggcaactcctaggatttgtcacgaatgggaagccaagtgccatcttcaaaatttcaggtcttaaatctggagaaggaagccaacatccttttggagccatgaatattgtccgaactccatctgttgctcagattggaatttcagtggaattattagacagtatggctcagcagactcctgtaggtaatgctgctgtatcctcagttgactcattcactcagttcacacaaaagatgttggacaatttctacaattttgcttcatcatttgctgtctctcaggcccagatgacaccaagcccatctgaaatgttcattccggcaaatgtggttctgaaatggtatgaaaactttcaaagacgactagcacagaaccctctcttttggaaaacataatttgaataaaataatttttaatggattctgaaatttgtcatgttttgaagataactgactccatctaaagtatgaggtcaaagggatcacgaaacctaagtttaaaactgcttagaagactgaagcttaattaaaatctttattaaaatttaaaaccatgaaaaatgaaa

SEQ ID NO: 243205 - DNA, 663 bp, Homo Sapiens
  misc_feature (208)..(239): n is a, c, g, or t
aaaaagttgggtccgctaaatatttaccttgaaaaaaagaaaagtgtgtatctagcttcttcagagatcaagtcctctggtaggaggcaaaggttctatctgcttagcaactagttaataagtggtatctgacacactctaaaccccgtgttcaaacgggggccttctggttttaggaaacttgtagaaacgaagcctgctgattgannnnnnnnnnnnnnnnnnnnnnnnnnnnnnnnaactttgaaagttaactcttcaaatgggagactctttgaaatgacatgttcctttaagggactgaagctttatttgcatatttttttcagatgtttcgagtaaacttgaaaagggtaggcacgaagcaatttgttgctgcttgtcacccccaagtccccgtggaggttctgtattttaagaaacagtgcgttgagtgtacagattttatttatgcgtaatttaatggggtctgtaaatactggtgcacttcttacaacttttttgagacatgggatccaattttaatattaacttttaatggtgatggggtaatctataacacatcataaggttttattcctatatatacagggtattaagaattaagaggatgctgggctctgttcttggcttggaagattctatttatttgaaactctctgt

SEQ ID NO: 243206 - DNA, 1116 bp, Homo Sapiens
ttggcaggcaatcttctgaggcgggaactgtttggctgccccagtgaggctgatgtcaacagtgaaaacctccagaagcagctgtctgagctggacgaggacgacctgtgctatgagttccggcgagagcgcttcactgtccaccgcacccacctgtacttcctgcactacgagtatgagcctgcagcagacagcacggacgtcaccctggtcgctcagctgtccatggacaggctccagatgctggaggccatctgcaagcactgggaggggcccatcagcctggccctctacctgtcagacgccgaggcccagcagttcctccgctacgcacagggctctgaggtgcttatgagccgccacaacgtgggctaccacatcgtgtacaaggagggccagttctaccccgtgaacctgctgcgcaacgtggccatgaagcacatcagcactccctacatgttcctgtctgacattgacttcctgcccatgtatgggctctatgagtacctcaggaagtctgtcatccagctcgatcttgccaacaccaagaaagcaatgattgtccccgcgttcgagacactgcgctaccggctgtccttccccaagtcaaaagcggagttgctgtcaatgctggacatggggaccctcttcacattcaggtaccacgtctggacgaaaggccacgcacccacaaacttcgccaagtggcggaccgccaccacgccttaccgggttgagtgggaggccgattttgagccgtatgttgttgtgagacgtgactgcccggagtacgaccggaggtttgtaggctttggctggaacaaagtggctcatatcatggagctggatgtgcaggagtatgagttcattgtgctgcccaacgcctacatgatccacatgcctcatgcccccagcttcgacattaccaagttccgttccaacaagcaataccgcatctgtctcaaaaccctcagggaagagtttcagcaggacatgtcccgccgctacggctttgctgccctgaaatatctcacagccgagaacacagctagcaccaagaagcccactactaggggagacatgctgtaggggaagtgccactcgctgtttggggcc

SEQ ID NO: 243207 - DNA, 613 bp, Homo Sapiens
  misc_feature (261)..(337): n is a, c, g, or t
gtaaggctggaacataacggtaaacaacaggcacattgttaaacttggaatccttcctaacaaccgaggattgtttttcctggaccacttatgtgtcatttacttgggatggtttcttgtacacctctctagtttgcaagagtttaccagtctggattctcagaacaaacagttttggcttaagctgaggagactgcttttttaagtatggtctccatacattatctagtttaaccatcaccacaatgttagccagtagannnnnnnnnnnnnnnnnnnnnnnnnnnnnnnnnnnnnnnnnnnnnnnnnnnnnnnnnnnnnnnnnnnnnnnnnnnnnatcaagtgagctgttttctcataaagcttgggagcataaagggaaggcgactggatttagaactgaactggaactgtcttccagggctaactgggaatattgttcctaccagccaaactatgcctctcctgttctttggactctcaggttaacaagcagacatttcacagggaacaagagtaacagactgactgtgggtgtcagatacatgtttgagagtgaagagttttgaacaacagaattttttaaaatatccatccactgcagtggctcaca

SEQ ID NO: 243208 - DNA, 1018 bp, Homo Sapiens
  misc_feature (281)..(753): n is a, c, g, or t
gcatggagctaggtcagaaatagctacagactgagagtaatcactgtaagtagtgacacaaagactaatctttgtgcagtgtggaaagtacagctgggttgtttctttgattcctcctgccccattgagccatacctacagagagcagctgtgaaaaactatcactttcaacaatgaagaatagtaatatgtcataatggagattatgaagttcagaaaggggtaaatgcagttttggggagggctgagactaagagagaacacaataagacaggcaattnnnnnnnnnnnnnnnnnnnnnnnnnnnnnnnnnnnnnnnnnnnnnnnnnnnnnnnnnnnnnnnnnnnnnnnnnnnnnnnnnnnnnnnnnnnnnnnnnnnnnnnnnnnnnnnnnnnnnnnnnnnnnnnnnnnnnnnnnnnnnnnnnnnnnnnnnnnnnnnnnnnnnnnnnnnnnnnnnnnnnnnnnnnnnnnnnnnnnnnnnnnnnnnnnnnnnnnnnnnnnnnnnnnnnnnnnnnnnnnnnnnnnnnnnnnnnnnnnnnnnnnnnnnnnnnnnnnnnnnnnnnnnnnnnnnnnnnnnnnnnnnnnnnnnnnnnnnnnnnnnnnnnnnnnnnnnnnnnnnnnnnnnnnnnnnnnnnnnnnnnnnnnnnnnnnnnnnnnnnnnnnnnnnnnnnnnnnnnnnnnnnnnnnnnnnnnnnnnnnnnnnnnnnnnnnnnnnnnnnnnnnnnnnnnnnnnnnnnnnnnnnnnnnnnnnnnccctaaacctagccagtaatggtgccttggtaattaaaacaccatgctgatgagtatatgatttctagctagctttatgaaccccatgatagaatttggatatgtcagtccaaatttatcactcttagtggaaaatcagggtacgttcacttcattgttaagaatacaacagtaacattattcgcctttgtaacttaaaacacatcccagcgtcactaccatttgtacccccgccctccctctcaaacccattgcttccacactg

SEQ ID NO: 243209 - DNA, 344 bp, Homo Sapiens
aactttgtacaaaaaagttggctctcacacatgtacatgcgaacacacacaacacgcacctcgtgagacccgggacctgccccggacccccagttcctgggttgaacgaccacatcatgccacggtgcttgctcaggggaagccacgctccctctgtggggcctgctggggcctgggagccccccactgagcccacaatgccacggaaatccttgttggctgcccccgagaggggccttcccagctgggaagagctcagagctgacagctgcctcctgccatgtcaaggccccccaaagagcctcaggggctctggggccctggagggtggggttggggggtgg

SEQ ID NO: 243210 - DNA, 799 bp, Homo Sapiens
ttggccctggctttccatgctcctctccctccacctcctggcttcaactgggtgagggccgtattcctgccactctgctccgcctcagccttgagaactccacgtgggctgggtgggaaggtgctgacgattttcacactgtgtttaccactccatcacctctccatcacctctccacctttgcttcgacaggtcttcactcacgatttattcctccaggtctttgattggagagagtaactttttaattctgttgttttgcagtttggctctgtaggagtgagtggcgattcaaagatgccggcgtcccgcagtgtgcggttcgtgcccttaaccacccgcttctttgtttcccgcccctctgctttcgcaggagctcttgtgcttgagttcagtgttagtggtagcgtggctcactccacttggaggtggcggccgtctgaccgtgtgttactgctttgccgacggggcctcccggccctgatgcgtgtacactctgcgggctgcaccgggtggctctggttgggggcgaagctgtgttgactgggagagcgttggaaattgagacatggagagatgacgggagtgcgtttctctgggtttgatctccatcctgttttctcccagacacaccacacctaccttgggggaatgccgttgcctgttccacccctttgttcacttcgcgttaactgctgtggtaatttttcaggatctgtgtgaagaatggtaatgacgtagatgaaaagaaaatgtactgttgtgtgtttcattttgtgtgattcctaaccaaaaaatg

SEQ ID NO: 243211 - DNA, 1840 bp, Homo Sapiens
ttgggtggagacacttactgcttctagtgaaggaaacaaagaagtcatccctgagcatgtggctgaattcattgaaattcccataagtgtaccagaagatgttattgaaaatgttattgaaaatggcagtcctaataattctttaaataatgttttcaagcctttaactgaatgtggggatgattatgaggaggaagaggatgaagaaggtgattatgaagaagatgattatgacctgaatcaagaaacttcagtaattcataaaatcaatggaactgtgtgccatccaaaagacatatatgccacagatcaagaaggaaactttaagtgtcctgctcttggttgtgtccggatatttaaaagaattgggtttctaaataaacatgcaatgaccgtacatccaaccgatttaaatgtgcgacaaacagtaatgaagtggagcaaaggaaaatgcaaattttgtcaaaggcaatttgaagattctcaacattttatagaccaccttaatagacatagctatccaaatgtgtatttttgtttgcattttaattgcaacgagtcgtttaagctgccgttccagcttgcccagcacacaaaaagtcacaggacatttcaggctcagtgtagttttccagaatgccatgagctttttgaagatcttcctctgctgtatgaacatgaagctcaacactatttaagtaaaacaccagagtcatctgcacaaccaagtgaaacaattctttgggatgttcagacagactcaaatcctaatcaggaaaaagactcatctagtaatgagaaacaaactattagtctgccagtttctactagcaaatcaaggaaagagtctacagaaccaaagacatgtatagaaagtatggaaaagaaaacagacagtttagttcagaatggaaacgaacgttctgatgacactgtttcaaatataagcttgatagaccaaaagatgcctgacatagagccaaattctgaaaataattgtagtagtagtgatatagtcaatggacacagtgaaatagagcaaacacctttagtttcatcagatcctgctttgaaaattgatacaaacagaatcaggacagaaaatggttccattttgcccagtgttgtaccacaagaacacaacaccttgccagtatctcaggcaccttccaaaccaaatctgacaagtgaacatacttcatatggcttaattttaacaaaaccatacgtcagaccattgcctcccagttaccttgatgaacggtatcttagtatgccaaaacgcagaaaatttctgactgatagagtagatgcctgttctgatcaagataacgtgtataaaaaatcagtgaaaagattaagatgtggcaaatgcctgaccacctactgtaatgcagaagcacttgaggctcatcttgcacaaaagaaatgtcagacactctttggatttgattcagatgatgaaagtgcctgatgaaaatggttcagaaagatctgtcaatcaagcagtagtgtgaaaaaagcactataagaaaatgcatcatcagtttgctatttccctgatggccttaattttagagtggtcttggattactaaagataaagacaaagcacattttctagaatgaactcacagagatgtgctggcttagactccaaaaaggattataaaactcccaagtaccagttttccagaaaaccacattttacagtttatgatgattaatagcagcagcatgttcagtttcgcttatatgagaaacatgtttaggcaactagtcagaaaaccagctaatggccttaacgaaagggaaaagttctaacccattattaaaaagtg

SEQ ID NO: 243212 - DNA, 1750 bp, Homo Sapiens
ttggctcatacagtgccatacaatgacttcattctgatgttcagtaaataagaaagccagtagccattgtctaatcttatggcaagtaggaactttatgacctacgtgtagtctctttcactgagtaactgatgagtgcaggacattagcattcatatttatcatctttgaccttgcaggaagaatccttgttaattctctgagtcacatcttaagaagtacagtgtatcctgccttctagtgacgggtgtgctttgttgtaggagaaagtatgggcacaacagactgtagagggcagacgtctcatctcagacttgaggctttctctcagtcagtcattgggtcttgtttgggttattttgtgggaccgatgattaatgcagcgtggatgttggtgtccgtttgccagaactacattgcttagcttgcttggaagctggtaaggggaaagagtaaaaagttagttacctgtggcggaattctaggtgttagtgattctgcctcttttaaagtgtctctgaacgattctaaatataacttttttcctttatagactgactttaagacagctgattcagaggtaaacacagatcaagatattgaaaagaatttggataaaatgatgacagagagaaccctgttgaaagagcgttaccaggaggtcctggacaaacagaggcaagtggagaatcagctccaagtgcaattaaagcagcttcagcaaaggagagaagaggaaatgaagttcaccaggagatattaaaggctattcaggatgtgacaataaagcgggaagaaacaaagaaagaagatagagaaagagaaaaaggagtttttgcagaaggagcaagatctgaaagctgaaattgagaagctttgtgagaagggcagaagagaggtgtgggaaatggaactggatagactcaagaatcaggatggcgaaataaataggaacattatggaagagactgaacgggcctggaaggcagagatcttatcactagagagccggaaagagttactggtactgaaactagaagaagcagaaaaagaggcagaattgcaccttacttacctcaagtcaactcccccaacactggagacagttcgttccaaacaggagtgggagacgagactgaatggagttcggataatgaaaaagaatgttcgtgaccaatttaatagtcatatccagttagtgaggaacggagccaagctgagcagccttcctcaaatccctactcccactttacctccacccccatcagagacagacttcatgcttcaggtgtttcaacccagtccctctctggctcctcggatgcccttctccattgggcaggtcacaatgcccatggttatgcccagtgcagatccccgctccttgtctttcccaatcctgaaccctgccctttcccagcccagccagccttcctcaccccttcctggctcccatggcagaaatagccctggcttgggttcccttgtcagcccccacggtccacacatgccccctgccgcctccatcccacctcccccaggcttgggcggtgttaaggcttctgctgaaactccccggccccaaccagtagacaaactggagaagatcctggagaagctgctgacccggttcccacagtgcaataacgcccagatgaccaacattcttcagcagatcaagacagcacgtaccaccatggcaggcctgaccatggaggaacttatccagttggttgctgcacgactgggc

SEQ ID NO: 243213 - DNA, 330 bp, Homo Sapiens
actttgtacaaaaaagttgggtgtagcctcaccctcacgattgactggcctgcttggcaaggcaagtaacggcggcgcttcaagatgcgctgcctgaccacgcctatgctgctgcgggccctggcccaggctgcacgtgcaggacctcctggtggccggagcctccacagcagtgcagtggcagccacctacaagtatgtgaacatgcaggatcccgagatggacatgaagtcagtgactgaccgggcagcccgcaccctgctgtggactgagctcttccgaggcctgggcatgaccctgagctacctgttccgggaaccggccaccatc

SEQ ID NO: 243214 - DNA, 1020 bp, Homo Sapiens
  misc_feature (147)..(233): n is a, c, g, or t
acaaaaaagttggcaaagtgctgggactataagcttaagccactgtgaccggctgcttttttcctagaatatatagtttgggtttcttttccactcgtgatgtgatttaaaaaattgaacctgttgtatatgaatgtggttttgtannnnnnnnnnnnnnnnnnnnnnnnnnnnnnnnnnnnnnnnnnnnnnnnnnnnnnnnnnnnnnnnnnnnnnnnnnnnnnnnnnnnnnngctttctttggagttcttggtcttagtgtctaaaatagtggccataaaggaatttggaagttaagttgttcttgctgacccaaagaaaaatcagatgtttctgtttaggacactgtatgtgacaaacaaggaagtttttattaatttatttttttgaagaagaattgatgagagaataatgagaattcctccaagattaaaagtaaattataagatcctgtgctattttaatgtaagccaacatttgaatttaatttgacttctattttcagtaaattagagtgaaattttagggatgtctttatctcctatagtgtgtgttttgccaagatttattaagggtaattttggattttagaaaatgtacagtttctaaaggcttgtgaacgttttatattgatagaaaatgtaagtaagactagtaacacattattttctccaaaggatcctgtgactgacacaaaaaatatgatataatattgaatctgcccaaaagatgcactgttaatctagggttatgttatgttgttattttattaggtatgtgatactatggtgtgaattttagaatataggtaattatttaagtaattactgtaattctaaacatcttctgagatgttttctctaaagcagaaactcagcttttactcatgtttagataatgtgatatagctgttctagatatttgagattacggttgaggcaaattgttgacatataattaaaatgtattttataactaaaatttagaagaatggaaaaagtttacattgtatttataaga

SEQ ID NO: 243215 - DNA, 895 bp, Homo Sapiens
caactttgtacaaaaaagttggctcctggtgggccctaggatggatgacactcaagatactacagatgtgggtgcaggcatgcacacacacgatggaatatggccattcctacacaggtggggtagagagtgggtcagcagcctggcacctcacagaggtgggacctaagaggactcatgattatgcagagaattggattgggtctctgtcatagattgagtaatctcttcccttacctcaattccatctccacccatctctacatctgggcacagcaacccagagatggccaaaagcattcaagcctgggggaagatgtttgactattgctgctcttcaccagaacctcacacctctcctgggactggaacccttcagtgggtgtgtggccagttttggaggctggaatgatgggccagggtgtaggattcattctccatgtaaagtttcctttcatcctgcctagccatccccaaggtttatttccagaagaaaggaatatctctacttggatcaattctggtcatttcaagaggatggaggcctcaagtgtgggaacttcccctactccctggatgtgtgtacctagcacacttccttctcccacccctttttccagttggatttgtttttctgttctcttctgtcctgtcttatactgcaactgtgtctcctaggggacagatggccttctttgtcatcttcactctccacccccagagaggagtcagagccataactcaatcactcagcccctccaaagatagttgatgtgtgataatctcataatgttgagaaccctgatgagatacattgtcttcctctccctacaatgcctctggggccaaggcacccattcttcttgctatcctccatcccccttgaagcttccac

SEQ ID NO: 243216 - DNA, 1118 bp, Homo Sapiens
ttgcccattttagatttgaagggaaggtctcaagtaagcttggaaccaattagaatccaagaggtagcaggaagatccaacccatcaaagcaggtggcgtgggtgccactgggaggggatctggggcctgtcttgagccgtaaatcttcctccacctgagacgtgcaccccactgtaccagagatgcctaagactccaatccttgggttctggctgtgtggaaaatgtctctacacagtcaagcttcagctgactacatgtcaaagagagacaaagttaagagcagcctttcatggtgtcaagaagcagttagcatcttgacttcccctccactcactcgctgacctgctgcagcctccccgggcacctcaggcatagaaaatgagctcagggatctgcccaccctggaccccagtcccgttggtgctgtccgaggagcactggaactggaaggccacctttccacactgcacttccgtcatcccctcctgcccaaagtagctgagttcgctgccgtccaggacggcactggccgtgtagaaggtgtcttgttcaacctggaccgggtgttcaaaccagaccgggaaggtgttactggatccgtctgacatgaacttggtcaagttctgagccagaaccaccccgagccgcttgagctcaatcttcacgctgtactcagccttcccagagctggagccatacaggcccagccctgcaataaatacccttctgtccactgcaaactggatgctgtcgcagcgcccgcggtaccgccactggttgctgcggtaggcagaagactggaatcggtggcacctctgcggggcgaggcccttcctcttggtcaggggaaagtccaggcggggcttgttggtggccgtgtaccacaggaagatgctgtgggtctcctccagagtcaggatgtctgactgggcagcgccgttggcaaactcctctagggtcatggttggaattcggaccagatagagggctcgccccagaacatgcctcttgtttcgtggggtgattggcagcccctgcctcttgcactccgcctcggcccagttcaggacggcctcgaagaccaccgcctctttggccaacttttttgtacaaag

SEQ ID NO: 243217 - DNA, 1892 bp, Homo Sapiens
ttggcttttggcaaaagtgggccaaaaaggctgacctagacatggatctgctcaacagcaagaataatttggtaattgacacacctagagtacgaaaacaaacgcgccactttagcactctgaaagatgatgacctggtggaattctctgatttggaaagtgaggatgatgagcggccacgctcccgcagacatgaccgtcatcatgcctatgggcgcactgactgctttcgggtggaaaagcatctcctggtatatggttggggacgatggcgagatattttatctcatggacgcttcaagcgacgtatgactgaacgagatgtggagaccatttgtcgggccattctcgtgtactgtcttctacactaccgtggggatgaaaatattaaaggcttcatctgggacttgattagcccagctgaaaatggcaagacaaaagaattgcagaatcattcaggtctatctatccctgtgcctcgtggacgcaaaggaaaaaaagtaaagtcacaaagcacttttgatatccataaggcagattggatccggaaatataaccctgacactttgttccaagatgaaagttataagaagcacttgaaacatcagtgtaacaaggtactgttgcgggtacgaatgctatactacctgaggcaggaggttattggagaccaagcagaaaaggtgttagggggtgcgattgccagtgagattgacatatggttcccagtagtggatcaactggaggttccaacaacttggtgggacagtgaggctgacaagtcgctgctcattggagtctttaaacatggctatgagaaatataataccatgagggcagacccagccttatgtttcctagaaaaggctggccgaccagatgacaaagcaattgcagcagaacatcgagtgttggataacttctctgacatagtagaaggggttgactttgataaagattgtgaagatcctgaatataaaccactccaaggtcccccaaaggaccaagatgatgagggtgatcccttgatgatgatggatgaggagatctcagtgattgatggagatgaagcccaggtgacccaacagccaggccatttattctggcctccgggctctgccctaacagctaggcttcggcgtctagtaacagcgtatcagcgcagctacaagagagaacaaatgaagatagaggctgcagaacgtggggaccggcgaaggcggcgttgtgaagcagccttcaagctgaaagaaattgcacggcgggagaaacaacaacgatggacaaggcgtgaacaaactgatttttatcgagtggtgtctacgtttggtgtggaatatgaccctgacaccatgcagttccattgggatcgcttccgcacttttgctcgactagacaaaaagacagatgaaagccttaccaagtacttccatggctttgtggccatgtgccgccaagtatgccgccttcccccagcagctggagatgaaccccccgaccctaacctgttcattgagcccatcactgaggagagagcctcacggactctctaccgtatagaattgcttcggcgcttacgggaacaagttttatgccacccccttttggaagatcggctggcattgtgtcagcctcctggtcctgaattgcccaaatggtgggagcctgttcggcatgatggggagcttctaagaggggcagcccgccatggggtgagccaaacagactgcaacatcatgcggacccagacttctcttttctggctgcccgtatgaattatatgcagaaccatcagcaggagcaccagctccatccttgtcacgctgctctactccactgctgcaccagcagtatacctcacgcactgcctcaccactgcccctgcgcccaga

SEQ ID NO: 243218 - DNA, 329 bp, Homo Sapiens
gctgtgattttgctgtagattgcaatgaatctgtagatcattttggggaaaactggcatcttaaccatgttaagtcttctgatcaatgaacatagaacgtctttcctttaatttaggtgtacatctgctttttaaatgttactgggcagggagcttaaatatcagatggttctagtttattctcaaacacttgggtaacttgagtaaagcccattaagcatgtagatgtcactcagcaaagcctgaggaggacagtccctacctttgcagtacggacagttgctcagcataactcagaggtgctgccacaggtttctggttttcctttc

SEQ ID NO: 243219 - DNA, 899 bp, Homo Sapiens
atttggagtgcaaacttaaaaaccaagaacaaacaaagcttttcatcaagaataaaacacaaatctaaacaattccgcaatcatgcattttaacagaaagtacaaatatgaatacattataatttgtaactgcatttaaaaattaaaatatttctctccaaatccaaaacaccacacaatctttatctgttctcatcttgttaccttagaaacatttgtcatatgctatcaggaaaatataggcaagacttactaatcagttattcatgatcaaagaaacatgattctccttaactgtgactttttgaatcatttatctgtatttctgaaatatcacacaattatacctctactctagagaaaaaaagaataaatacaaatatcaaggaggcaggaacattcatggaattaaagcaaaagtcacaagtgtttgacttagaaatgtacatattgtagtaaatttttaaagtacaactttagttgatggctgatgtgtatgtaataactgtgagcaatttaaacaggtataaaaatgtgagatcaaaatctttaggcttaaatacttgaaaagtcactatggatatggaaagatttgtttacataaacatgtatatttttagatggaaaatcaaggggtagtggcatctccctggtcccttaacaatatttggatttttgcaaagaattagcagcacccaaccttaagtgttaattatgtgtttctaaaggacctataacagatcagttggcagtgttctagcttttgggagttgggggcagattgggggtgcaaatatctgagataagatagtacatgcactcacacatttaaaatcaccattctaaatgggaaaaaaaatcacatattggaaaagtctaagaaactcattcttaaccaa

SEQ ID NO: 243220 - DNA, 692 bp, Homo Sapiens
aaggagcgggggcggcgcgctaagatccgtcggcctgcccttccgggcaaacaaacataagacgaacagcgcaggcgggtcgcgcggctcgggtgcagctcgggctccggggcaggcaggcggggatccccaggacgccccggcgcggacggcggataccaggcccagcccgcgcccctgcccctgcccctcagcctgcgtccgtgtctgcatctgcgcggggcagtcgtcggggcacagcgggcagccccgaggggaccccgcgtcaccgcgctgccggcaccggcgctggagactctcctcgctgaggcctagcacggccgacaggtggccgatatagcggatagccaggcgcagcgtctcgatcttggtcaggctctggcccgcgggcgccacggacggcggtagaaagcggcgcagctcgtgcagggcgcgggccagcgtgcgcatgcgcagtttctcccgctcactggcgctctgcctctgcccgctgcccaggcggctgctgcgcgcgccgcgcctacctacggagggggcgcgggggtcccggagggtgcctggccgcgcggggctcgccacggggctgtcggctggggtgctgccccatgagtctggggacgagacgagggagcggccgcagtccttgtcggagggcggcggccgccgagttgggccccaggccgcagagccaa

SEQ ID NO: 243221 - DNA, 1132 bp, Homo Sapiens
  misc_feature (339)..(429): n is a, c, g, or t
gtgttgggaaaggtgttaagttcactatggcagatacaagttttctaaaaattctaattttttgctttatactttctatttggcagaaaatactgttaaattattgtctttctgaagtgatgagctcagtttgttcattttttgagaaaatgcttgtcaaataaccaaatctgaataactatggttatttggtccttttgagtaaacattgtgttccatgaaagtgactagtgcagatcacaactcaggacactcacacaagtgcttttcctccagatgaccatcatacttcaggatgcaccagaaatgcttgatactttgtttccaagtcatcacacnnnnnnnnnnnnnnnnnnnnnnnnnnnnnnnnnnnnnnnnnnnnnnnnnnnnnnnnnnnnnnnnnnnnnnnnnnnnnnnnnnnnnnnnnnnaagtaccttttgggcaaggttttataaaattaataatttttactgtctaatttaggacattctttggtgaaactggcatttattccccctgtaagtttgtagcagtgaagaatgccgtgactgccagcatagtctagcaccagcaattttacccagatgtcaacacagtgaagaaggcaaataacatcttggtattattatgaaatattatcaaaattatgaaaataattttgagcttgcagacaccctgatagggtctcagggatcccaggggactgcagacctcacttggagaatcagtgctttagggagatggctgtcattctgctacttgtagcatttacaggtaaatgtgctacatgctaagacgtatatgtaccaggtctttgtgcaaaattgtaatcaccaccatttattgcataaactagaaaacatatcattaggtatcagcttattcttgtagatggactagatatgagaaaggcgttttatttaagggagatatttttatgcttttatttgtcccacttgtcaaaggtatatggatattggtgaggaagctaggctctaagccatttctgaaactatcagtgttgaataaataaggtacataaggaagctaacacttgcaccccttcctttgtaactcttctaccgccttgatctagtgagccctgaaagctcagtgggctgaggaaaccaa

SEQ ID NO: 243222 - DNA, 968 bp, Homo Sapiens
ttggtgcatatttctccaaagaaccatccagaacctgagcagcctgtcttcagacagagagaggcccacggctgtttcttgaaatctggcgctgggaatggccatgtggaacaggccatgccagaggctgcctcagcagcctctggtagctgagcccactgcagagggggagccacacctgcccacgggccgggagctgactgaggccaaccgcttcgcctatgctgccctctgtggcatctccctgtcccagttatttcctgaacccgaacacagctccttctgcacagagttcatggcaggcctggtgcagtggctggagttgtctgaagctgtcttgccaaccattactgcttttgcgagcggcctgggaggtgaaggagcagatgtgtttgttcaaattttactgaaggaccccatcttgaaggacgacccgacggtgatcactcaggaccttctgagcttctcactcaaggatgggcactatgacgcccgggccagagtcctcgtttgccacatgacctccctgctccaagtgcccttggaggagctggatgtccttgaagagatgttcctggagagcctgaaggaaatcaaagaagaggaatctgaaatggccgaggcatcccgaaagaagaaagaaaaccggaggaaatggaagcgttatctcctgataggcctggcgactgtcggaggcggaacggtgatcggtgtgactggaggtctagctgcaccccttgttgccgctggagcagcgacgattattggcagcgccgggggcagcggctctgggctcagcagccggcatagccatcatgacctcgctgtttggtgcagctggagctggcctgacaggatacaagatgaagaagcgagtgggagccattgaagagttcacgtttctgcctctgacggagggcagcagctgcacatcaccatcgccgtcacggggtgctcgcttctggcaa

SEQ ID NO: 243223 - DNA, 509 bp, Homo Sapiens
ttggagaaataataatattaaaaagatctttgcattctggcagttcttttaggattataggttgcaaattatccaaatatatatcccattttttaaagcataatatcttttttagttgtttttctgtgaagcttttggttaataaatagggtcaactaattggagacttttctcttccaattagggcttttaatactaacaaggataactttattcattcctcgtattctctactctaacaaatatgaactctgaagttgaaaagtcatttatgttccgctttcaccaaagtgacgtgaggctttaggtcactgtttcacttcaaagtactggatccaaagctttgttgaaaatgctgtttgatgaattcactgaagaatatagaaaggtggtcaggtaaagtctacttttattttgtcaagcttaataatttgtgtcatactttaccccagtatatataggcaaaccaaaaccttatcaaatattaaattagttgtttaaactttgct

SEQ ID NO: 243224 - DNA, 569 bp, Homo Sapiens
  misc_feature (47)..(66): n is a, c, g, or t
ctttgtacaaaaaagttggcgcacaactttgtacaagaaagttgggnnnnnnnnnnnnnnnnnnnngatgcccaagtctgatgagacacacatctcataaattctcagacactctcagcttttcctcccgtagcacttattacacaacccagcctgtcagtaagtctgcgtctccctctagactcaaaggctctgtgcaggcggagactgagtcattaaacgttgtctctccccagccacttgcctagcacctgatgctcagtaagtacctaaccagaatagatgaggcagcaagagaatggcgctcggtgtgtggggtaaggggagtcaggaggaggacgggctgctcgtgagacagggtaggatgggctgtgcctggtttcctctcaagcccccaggctgctacccttggttctagccacctttcctcccaccctccttctcatgcaggctgccaaaaattgcactttgggtctgagattaggagcgcctggccatgtctgaaccccgctcctatcttagtggccgcaggtggctcccaggaaagcatccaacttttttgtacaaag

SEQ ID NO: 243225 - DNA, 1705 bp, Homo Sapiens
tccgaaagttttcctcgtcattcccaaacagcattcagcaccaaatgcctgtgtgctcaggtggccgccacgtacccacagcgatggacgggtcaagctccgcgatgctcatgcggcacggcgggtgctggcagtggaagctctcgtccgggatgaagcagccatcagtgggctccacggctggctgcgtggtgtgggggtccaggtagatgagctcctcacctgggaggatgaggcaggtgggcaggtgggtggccgagccggcagaggaaagggacagaggaggccgcatttcagacccactgcacccacatcacactgagaagcagtgggcaggaggtggggagggagccgagggcaccagaccatcagggaaaggggcacacaggaggccgcccgcgaccaggctgaaaatgaaccccagggcatgctgcttttccaccagtggcctcaagtggtcacctggggtgtggtacctgctcatggaatgcccttaaaaggcccaggcccacagggacacggtgggaaccctggactcaccaacgtagccgatgaagtagtgggcgctgttgggcttccctccgatgacgcccagggactggggcatcatgaagcagtgctgtggaggggcgggggactgagcacaggtcccaggtgggagcagacggtccccccacccactgccataggggaaccaagggcctgctgaggcccaactgggtgacacaagaggggacaggaggggacatggtaccaaagagcttactgtccaggaaagaccacaggacatcccacaggcacaagaaacccaatctgcaggctcagctcagggaagcttcatgtcagaggtgggctttggggaggccgggagtgagggggcctggcaggagatgtgagcaggggtgcgggaggtggccatgctgagtgctttgaccttcagcgtctccacgtaggcctcgttgatgtccgtgagccccaggcgcaggggaatgagaagtaccaggggtctccatggcgacggcctgttggtgacctcagctccggcagggaatccgttgcagtgccggtcggaatctgcaggaaacgcagtggcgcctgcacagggaacgctggtcctgcacaaccttctgatttcctccatcacaacagtgttgtccattgcaatgtggaccgccaaggagctccacgtatcgaagacagcaagcttcttcaggacctgggcgacagtgttgggcccgtaccactggcctatggacttgccttcgccaactcccatttgcgctatctggtgaatggagtagtaactgtccttcctgtcgatgaatgcgttgaggacgctgaagtagctgtctggctgcctcttcctttgtgtccacctccaatctcggcctaggtgccggcacaccagggcttgggcaaagatcatctgtccacaccgcagcatgcagccccagcctgtgtccgaggtggggcctgtccccccaatggctggaaagtttttcctgtatgtaaaccaaagtctagatgccacatcagacaagatctcgtccttttctgtgaaaatgctgtattttctacccagtatccaaacgggctctgaggtctcaggaaaatcttcaaactcagcaaaccggagagtgtcgtaggtcagagtagctgcgtccatcttcccagtccggccgccgactgacccgagcggcgccaa

SEQ ID NO: 243226 - DNA, 1167 bp, Homo Sapiens
  misc_feature (315)..(326): n is a, c, g, or t
  misc_feature (329)..(403): n is a, c, g, or t
tcaagctaacattcatcctttcctctttttgaggggattgagggtcctaatagaagaatagaaggcagaatttgacatgatcagtcatgaagcataatgtccatccttcatttgtaacaaacacgtgttgaaggatccctgaactgggagcacctgctgggaatctgtaagtgtggcagaagctgaatggtctgcttgtttcaaccacttaggtttggctttttttcctcctatcatttcggttctgtaggtattccattggcagctgtttgcatgcaaaggaaatagtacagtagttacaagttaactcaacannnnnnnnnnnncannnnnnnnnnnnnnnnnnnnnnnnnnnnnnnnnnnnnnnnnnnnnnnnnnnnnnnnnnnnnnnnnnnnnnnnnnngagtgacagagtaagaatgcatctcaaagataaaagataaataagaggacccaggaatacaaattatattttcaaacatgtgatttaaaagatgataatggcagattcctttatagacaaaacagatatcttctacttgaattcctttgtaagtatggatttttaaatattgttcacctaaaacactcatgaaccatacaatgaacacctagaacccatggatttggaggcttctctgcagcagaagacatgaagatgataaagcctgaagatatcccctctttgggagctaagatgacgggaacagtacacctcagaatgttcacaaacacacacagggtatcattattccctttccccgtagtgtgaggcagaaacaacagccagtttgccaagtcacattcttttctccgaacaattattaagcatcagtctaacaatttgactacatgcgcatgaagagataaaatagtatgtctatgacaccgactatttatgggaaaaaaagcaaatactaagctcagctacagttccaacctcattcatatcactttggaaattatttaggggaagggtgcaatgagggtaattatggattgaatgccaagccagatttcaactgtcttggcttctgtcaggaaaaaatgctatgtaaagagaacttagtgttgctaatattcccataattgccatcaactgttctctagctggtgtgagttggctgaggcatttttaacatgaaggtgtggctagaaagatgccaa

SEQ ID NO: 243227 - DNA, 1186 bp, Homo Sapiens
ttggattttttattggctgggatcttgatctgtatcatgaagaatcagatcagaaagctcaagtcaatacttccgatctgaatgaagagcttggacaggtagagtacgtgtttacagataaaactggtacactgacagaaaatgagatgcagtttcgggaatgttcaattaatggcatgaaataccaagaaattaatggtagacttgtacccgaaggaccaacaccagactcttcagaaggaaacttatcttatcttagtagtttatcccatcttaacaacttatcccatcttacaaccagttcctctttcagaaccagtcctgaaaatgaaactgaactaattaaagaacatgatctcttctttaaagcagtcagtctctgtcacactgtacagattagcaatgttcaaactgactgcactggtgatggtccctggcaatccaacctggcaccatcgcagttggagtactatgcatcttcaccagatgaaaaggctctagtagaagctgctgcaaggattggtattgtgtttattggcaattctgaagaaactatggaggttaaaactcttggaaaactggaacggtacaaactgcttcatattctggaatttgattcagatcgtaggagaatgagtgtaattgttcaggcaccttcaggtgagaagttattatttgctaaaggagctgagtcatcaattctccctaaatgtataggtggagaaatagaaaaaaaccagaattcatgtagatgaatttgctttgaaagggctaagaactctgtgtatagcatatagaaaatttacatcaaaagattatgaggaaatagataaacgcatatttgaagccaggactgccttgcagcagcgggaagagaaattggcagctgttttccagttcatagagaaagacctgatattacttggagccacagcagtagaagacagactacaagataaagttcgagaaactattgaagcattgagaatggctggtatcaaagtatgggtacttactggggataaacatgaaacagctgttagtgtgagtttatcatgtggccattttcatagaaccatgaacatccttgaacttataaaccagaaatcagacagcgagtgtgctgaacaattgaggcagcttgccagacgaattacagaggatcatgtgattcagcatgggctgg

SEQ ID NO: 243228 - DNA, 1179 bp, Homo Sapiens
tttttgttccacactatgtgagctccagataaacaatcttaaggagcatcagtgtgctcgtgaccatggcagccctaggacttgggcctttagacagaggtgatggggcaaatgaatataccccagatccagttttaaaaataaaaacttcctgtaattatgatacaatactgtgcagcaagtcactaggaattgcatgctgctcctatttgtggttaaaaccctgtcccactcttggccagagctgaaaggtaacatacaaggaggtggctgtggctaaaaccaggtaccttagtcaagcatggcctgcggcagtgatgctgacagtcatcaacccaatgcagggaatgcagggccccagagctttggctcagagcaaaggtttcatctcaccccaacttcaaaccaagccctctgtatctttgagtttatgaatacaagaaactagtgattaggaatctctatgaggaatctggttgggtagcaaagctcaggtccctgcaggccaccaccctgactgcaggaaaacagaaaggtgcaaatcgtatcaagtaaaaggttgctcaagtggaagatcatttcctggggaacttcagcggcctggatcttaatcacatggatgaaggctgggactggatcccaaagaaagggcctgggtcccaggtgcaatcagtcttcttgaacttaccatctccttctcagtcatctcttgaatggtggctgagcatacatttccccgggggacgaatgtaaacattattcaacagatctcagcttaggaaaacacagcttgttatatatttagtgtttaacattccagtgcaggcagtatcttagcatcagactttcctcattcatgagtagcagtttagaaaggaatacatataggatacttgataagactgtggctgaaaagaccatttgtgtgtcagacagctggctctatcctccaatcagtggagcacccaggactatcgcaggagaggtggaacagatgaagtgtaagttctctgtaaatctgaagagtccgtataatgattgttcccacttaaccccttgggccacatcttgatatggagaacatttccacctcttgcatcaacctgtgctctctttgttttggatgacgttctctccagagggttcaagagcctccttagccaacttttttgtacaaag

SEQ ID NO: 243229 - DNA, 1452 bp, Homo Sapiens
ccaaaatagtgcgaccatttttaaagctttattccatcttttgtgccagaaccaattttgacagactcttctcctgggttagtaaaaggatatgccgttcctttcagtcttactttctttgcagttggcttgacgccatctctctcgtaagaaccagcacttcatttgatggcctgcttttattataaaagagatgggccaaaggttaaagaaatagccatttcaaaccccatgacttctgttacaaaatcataatatccaagcatttacttgaagcatagaactacatgtaatgttatttcattgaggtccatcactttacccaatgttatacacattctaaatgggaggttatataaggctagggcaggacctagaactccattacattaggttgtggttacatgtgctcatattctctgggtcaagagctgaaccacagcatgaccagatccgtgtagtccaaataacaaggaagaatgattgactctatcttcatcattacaattatccccttttctgcctgctttttttcatattaagatggctttgtatttgacacagtacaacaggccttgctgaagatggttgcccttttgggagcactaatctttttggcagatactggtttccctaggcctgaatgaaaaggacattggtcacatgagcccttctgatatcagcagttcccttaacttacatgtgatttcatctgattaatacagaaagctaagaggacacagtgcggtagctatgaaatcactttagttcatctattaattctgataaccagtgatagaatctgtataaaatttctcctcatacaagcgtataatctggcccatggccacactcctttagaggctgcacatcatctaacattttagggggacctgatatattgaggaaagcgctggatgaagggaaaaagcagggatccctttctctggacctggtaccaacctaggttttgctaccgtagggaaatcacttcgcctcagggatttggactgagcgattcaggctttctctctcatgttgagtttttctacatccttcaagttcaagggtcatcaatgaggcctcaaagaactgacaggcttttgtaaaacatcatctacatagggagggcctgagtaggccccctgcccaccaaatagatgactaaagttaccagagccctggaagttgtgctgggcccagcagaccagagaactcagtagtgcacgcctctccctctgcagggcttcatgactcagaacactgcaaagcagaatgaacactgtcttaagaattttgacctcaccgaataccgtcaggtgctgagtgacctttccattcagatctaccagcagctcattaaaattgccgagggcgtgttacagccgatgataggtaagctggcagcaggagagctacatcactcatcatggtgtctgaaatgagggccaa

SEQ ID NO: 243230 - DNA, 596 bp, Homo Sapiens
taaaatgtctgctcttttcccatttaatgataaacttcgtgtatgttgttctcatgcatacttgtccagaacacaggacatagtagatattcaataaatatgtgttggaagatgaaatcagatacaggtaacagatctttagacatcaaaataagcctatacttatcacagctgttgagagaaacatttttgagtgacctccacaatgcatataaattaggattaaattcataatttcataggtttaacaaagactaataaactagaagggtgttagcctctctatggacttaggcggagagtaccactggtgaccctgtaagaactatttaagctcctaaattcttcaatgccccagattgctacaactgaattctgcaaataagacagtgaagcatcaactaaataagaaactgcatgttaaagtgtgttggtagttacaaactagatttggggaggggatggacaaagaagaaatcagagaggaggtggactttaaccagagccttggaggaaggggagaattctgacaggtagctatgctgtggaaggacattctaggggaggaagcagcagaaggcagagggaggacccaa

SEQ ID NO: 243231 - DNA, 601 bp, Homo Sapiens
ctcaaattgagacagcttcctttgaatttttctacttttatgaaaagttgctatgtataaatactgtaattctagcctctgctttactgaagccttttcccccagtaaactgtggagtactcacaggttcacaaagaagaactgaacctcaggtaagctataaaaagaaacaaagcaactgtggtgttacttctgttggaaaatttaaaaaaagcagttatccaactttcaattccatttataaaatgtaaaaattcaaaagtatacaacatagttcactgatatcccaacaattcattgccttttaagatcaaatagctgattacctgtttctaaacttgaattattgtctagtgagtaaaaactgaaggcaaacagagtgttttgtggaactgggaaaaaaatggattctgtggtgatctctagatggtacactggatgataagggtgtttttttcagatcacctaaagaagtcagaacactgccttcctcttaacctctaaggtagttccatatttctcaaggagggcaaagtttacaaatacccctttaaatccttatttcaatactgtagaatttgtgtcttatatttaaagggtg

SEQ ID NO: 243232 - DNA, 1169 bp, Homo Sapiens
  misc_feature (58)..(71): n is a, c, g, or t
tatcaataacactaaagccaaaaaaacttgttagaatttccagccttctactatattnnnnnnnnnnnnnntcacatctcttctttggacagtcccaaaaatgacaagcgatgattgtgtttaagcaatggaatctctgaagaggaaggtcttttggtgagcctgccatggcgcagcagcccccaggagagggccccagacaccagctgcagcaatttccaaagacggcatttaaaggctgtgggctaacaccatgttttccagcctatgtggggatatgcctcgtgagttgctaggctgacagcacatcccagcctctgcaccccagactctgcacaggaactctggctacatggatgactgagcagatagagcagctcaggcccaggcatctactggtatccacagctcaagcaaaggtcaggaaaagaaaatctctttggtacaatggtcaaacaaccccgactatctaaagatgaaataataatgccatacctgatcctggtgatcaaagaaggtgtgaacacaagtcctcgttccaacatcccaaacttttacacttttgtcagacgaactattttaaaaagtgaacattagtatcggtttgaagttggaaggacttcgaccaaaaatcctttgatgacttacattcttctaacttcagaccccccaaccccatgcctcggtacaggaaatggccaggtatcagcatcattgggtggctttctctcctcacagggtagccattttcctgaaattgtgatctgcctggccctcatattaattgttctccaggagtctcagacacagctacctatttccagatgggagggaggcctgttaaagcttcaaaaccaaggctcgcaggaggcctctaaagcactgtgcaatgccttcaagttgtccatctcctgctttccaactgtcttggccatcccaggcctgaccaacactgggatctataaacaacattttacaaacatttacatattttaagttaccattggaacacaagtctaccttagagtcactttggtagaagcctcaatttataatgaaaaaactaagagttttactgtttaaaaggattacttgttgacttttgttccagctaaggtcaactaacatcactaaataaaaattttaagaactgcagaaaagaaagccaa

SEQ ID NO: 243233 - DNA, 913 bp, Homo Sapiens
ttggcttcttcaggatgtgaaggtcttccgggccctgatcctgggggagctggagaaggggcagagtcagttccaggccctctgctttgtcacccagctgcagcacaatgagatcatccccagtgaggccatggccaagctccggcagaaaaatccccgggcagtgcggcaggcggaggaggttcggggtctggagcatctgcacatggatgtcgctgtcaacttcagccagggggccctgctgagcccccatctccacaacgtgtgtgccgaggccgtggatgccatctacacccgccaggaggatgtccggttctggctggagcaaggtgtggacagttctgtgttcgaggctctgcccaaggcctcagagcaggcggagctgcctcgctgcaggcaggtgggggaccgcgggaagccctgcgtctgccgctatggcctgagcctggcctggtacccctgcatgctcaagtactgccacagccgcgaccggcccacgccctacaagtgtggcatccgcagctgccagaagagctacagcttcgacttctacgtgccccagaggcagctgtgtctctgggatgaggatccctacccaggctagggtgggagcaacctggcgggtggctgctctgggcccactgctcttcaccagccactagagggggtggcaacccccacctgaggccttatttccctccctccccactcccctggccctagagcctgggcccctctggccccatctcacatgactgtgaagggggtgtggcatggcagggggtctcatgaaggcacccccattcccaccctgtgccttccttgcgggcagagagggagagaagggctccccagatctacacccctccctccctgcatctcccctggagtgttcactttgcaagctgccaaa

SEQ ID NO: 243234 - DNA, 724 bp, Homo Sapiens
ttgggtgtggggcacccctcaccaagtacagtccgcagcgggtgggcctgacccacaccatggagcatgaggacgtcatccagatcgtgaagaagtaacggcgcctgccgggcctcccgcccacctgcctcgtctccctggggaggtggtcccactgggacacacaaacacccaaacagaaaaatacaaatacacgtaccccaggaaggggtccctcaagtctctgctatttacagaagtttcttcagtaggcagacgaagagtgtgttggggcaaaggggctcggttggaggcatttcccataagactgagccctctcatgggggttttgagtttgtagtgctgagcctgcatctgtgcctcccagccccctgcactgagggagcaagttgcccacatgcccgccagccagggcctaaagcagatggcatgctcagtgccaggctggtagctgggcctgtttgggtccctggaggctgtggctgctgtcatggcacctcagtccctcagctcttgccagcttctctgacacttgggttgggggcccttccaggaggaaacccccttgggtgccccacacagggctctccatgatgggaaccagtggttagtggcttcaaaggcccagctgacaccctccacagcctaaggggtgtcctaaagtgcctccccctgtattccccctccccgggcagcccctgcccagcacaaaaccccaggaccc

SEQ ID NO: 243235 - DNA, 886 bp, Homo Sapiens
ttggctcctccacttcatatttcatacccatctttcccttcttcctcctctccttcacaaatccagagaaccttggggtggttgtgccagcctgcctttggcagctgcaagctgaggtggcagctctgaccacctctggccccaggccctcagggagaaaggagcaacacactgcccctaggcgtgcgtgtggcccagtttctctctgctctccattaagtgcattcactctgcttgccttgggcccagcccctggtgatcacagggttcaaacagtgtcctcctagaaagagtgggagagcagctcacttctctgtgttctgcctcccctctggtctccagagttttcctgtcctctagaggcaagccaggccagggagctgggagcgagcaagctgaggccacgtccacaaggagcttttcatgcccctgtgccgcatagcctcacctctttcctccagagtggctctctgcggccctgtgttcctgctacagagtgttcttttctggagtcaggatgttctcggtcaccctcctggttctgccctgtcccattccaccccaccccagggggaacagtagcttcaccttgttattcccattgctctcctggctcactcttacggtcggtctccagtgactgaagcattccccacccttggaatttctcatcttctgcctcccttcctactccttttggttttgtggggagaggggaaggatcagggggccaggccagcagctcgggggccacaaggagatggataatgtgcctgttttttaacacaacaaaaaagcctacctccaaaatcccctttttgttcttcctggacctgggcattcagcctcctgctcttaactgaattgggagcctctgccacctgcc

SEQ ID NO: 243236 - DNA, 971 bp, Homo Sapiens
cacaccaagctaccctcagccccttgggccaccctcccatgctcaattggtgccccatagttgggagggggccgaggtagcaggaacctgacatgtcagcaccaccctgaggatgcacacacctggccaggttgtgacagcacccaagctcagccacaactttgctccgaactggagcaggcacttccaggcctgcatgggcaggggactttccaggcccccgagagcacacagatgcctggatctggagctgcagctgggtggctgcagctgcacccaggagcacaagctcctgccctgccaacatggtaaggcagggttcctgctgggatcacctattgccggcccctgccacttctgcagagcctgcaaccccccagccatgcttcccttgctgcagctggtgtccttgcagcagctgctcaaggagggccaccaccatcaacaagtctggagataccggttgggaagctattagtatcactctaaaaatagtcatttcacccatagaaatggataagatcattaaggggatcatgtagaagataacaacagatagacaatagcatttaggagctggaagaattctaatactaaaaaatagtcaaaatggaaaataagaacagagaatcaattctagaaaccaaggagaaactttaaagcatgctggagagtggtaaagtgaaagatcacgtccatttacaaatattcaaacaaaactgtatttggctttttctatatgatagaagaaccacaaaattaataaaataaactaccaaccaacctcagtaacatcaaaattacatgagagccaagaattttagttgccaaatagcatttatttgagtacaaaatcctggcaggcaaaagcacttgcagacccgactctctgagaacttacaaacaaaaagtgaaaagctcttagttcattttgagtcagaacaataaggaaattatgaaatctaagccaa

SEQ ID NO: 243237 - DNA, 276 bp, Homo Sapiens
tggagtataaaaagggtgggaaattgtcaagcggcgatcatagtaaaaatacagttcattatatacatatttgcaccaccaactctcaactctgaaacagtatttacacttttgttacaatcctggttagagaacaatttttctttaaaagctcggcctgatggcaaatgagaatttcgggtgaattcatagtcctatgaggttcttaggctgaatattccaagaggagggctccagcttctatttcatccacagatttcggtttaaaaaatccaa

SEQ ID NO: 243238 - DNA, 820 bp, Homo Sapiens
  misc_feature (333)..(358): n is a, c, g, or t
  misc_feature (544)..(553): n is a, c, g, or t
cccataaactcttagattttccaatattttacaattgtttccaggagtttctctctcctctatcaaaagtgaagccaagtggggagtgaacagagaggcccctgaaggagagaaggcaaagaacaaggcttaagtcttgaacagtggagttcaagttatcacagtagtggaccaagctgcacctagctgtaggacccgaggcagatcatcagttgccccatctttaaagagggggtgatgctgaggccgactgtgagcatgccatgagatcatgtaaacctagcatcacgctcagcacaccgtgcattttatcacctcctgccttctatttgnnnnnnnnnnnnnnnnnnnnnnnnnnggtatacatgcactttctgcaccatttttttggtggaatcaaagaactgtagctttaggtttaatcactttcatgtagtagatatcaagacagaggctcagagcggggaactgatgccacaaatgtcccagagctagtgcaggttcccctccttcctatcgcaccagggctttctcaataacacannnnnnnnnngcaggaagatcttaatggatttgcttgtgagttggccgtcctaactagtccttcctttcagtgatacagaaaatccagagggctggcaagctgttctgtgggtatatttgaagactttgctggtttattttcttgcaatagtgacctttgtaataaactgggtattggatgagagtgtcccactccttcacagaggagaaaatcttttcttctttttttcttcatatatttaagaggaatcaggcaaggagacacattaagagccaa

SEQ ID NO: 243239 - DNA, 929 bp, Homo Sapiens
  misc_feature (584)..(694): n is a, c, g, or t
gacagtaaataataaaaactaaaatgcattttaagtaccttgcccccacctctacataaaattgtctagaattacagcaaaaaaggtcatctaaccttctaggaatcaaaggcccaagcttgtttttctacccctttaactggtatttatttctcagaccgttcagggaaaacctgttgaacaggtgagaatacaataacgtggctccagtggagagtcagaggggagctgtacacaaagcagccattgagagagcaaaggagcaaggaggcttccccttgggaattcacttaaccaagcccaattagacctcatcagttttccccaacattaacaaaccacgagagaaagggaggggggcatagcaaggctcctctgggatacagccaggtgcacaattgcagaatggataatctagttcatgttttatcctcagaagtccagactttatcctcttaaatttatgttttcacaagaaaacagcacttaaggcttctatatataatcactgttacttctgatgaaatttagggaagaaaggttctagcctgggctttctcattcctggcacaattagcagctgnnnnnnnnnnnnnnnnnnnnnnnnnnnnnnnnnnnnnnnnnnnnnnnnnnnnnnnnnnnnnnnnnnnnnnnnnnnnnnnnnnnnnnnnnnnnnnnnnnnnnnnnnnnnnnnattttcacatgttgtagaagggacccggtgggagataactgaattacaggggaagttttcccccatactattcttacggtactattcttatggtattcttattcttattcttattcttataatgaataagcctcaagagatctgatggctttataaggggaacaccctctcacttggttctcattctctcctgtctgccgccatgtaagagccttctgccatgatggtgagccaa

SEQ ID NO: 243240 - DNA, 1028 bp, Homo Sapiens
ttattgttggtgaggcagtttagttatgatacaacaacacaaatatcccataataattttaaataaacaaaaacatttctccctggcaacaatataaagaatatatttttttctgaaatcaatgagaacattgctacatacagatttactcaaatactgaaaaacatgacttaaggcatctgccagaaaaacagatgtacatatttatatgaactaagttatgcaagaaaaattattgcacgaaatcctattttcaaaataaaatattcttctgtctaaatgtatataattccttatttcttcatcaaatcacgttaactgacttgctcaaaaccactctgcctcttaaataaggtgtaacaacatacactaacaatattactgggtttgacccaggaacattagtactgacatagggtttgtaaaaactatttcctacattaagaagtgctttggaggaaactagatttggggattcattttacattcttaaatattctgatttacaaatatcttaagattcagggtcttttatgtcaaacaaaatggaatttgtataagaaaatttattcatgaaaataatcagtcttttcctgaaaatccacattttctacaagagaatgaaggtctattgattatgagacattcacagtgttctcctcttgatcaggagtctacttgttcaccttaattaagaaacaattcattagaattcctgaatcctattattaggatattcgcatagaatagcactagtaacagcagtcacatagtttttatttagaagggagagactgtttctacagaacgctgttattaatataaaaatagtaaaaattggattcccattaacatgcatccacaccttcagttactcctaaactgagtgtctttatcttattatcagataaccaggctgcacagggctctctataatggaatgatgctccttttcaatacttagagccactgtactcagtttaggagtaactgaaggtgtggattcccattaacatgcatccacccaa

SEQ ID NO: 243241 - DNA, 1707 bp, Homo Sapiens
gttctgttggccctttaacaggtgaaaccattttaaatagtatcaaaatataattcccaaatgggatatacttagttcatttctgtgctatctttgattcacaagtatctatcttagccaaagcactgtttaaaaggatattgcctcctagacatagtgccactgaaaaccaagatgtaaatcggtaacactatgcattaaacagaaagcttttgcacaaccacatatgtaaccgcttagtcgtatcaaggtccacatgtgaccagaaagcaggcagtccttaggtggatggccaggggccaggcagtgtgaggtctccaagaacccagggctagagcagctaagccccaggtcatgttatcagctacagctgtggaataagccaggtttaaagaaggacattctgcaaaagtgcaggacctatttcacaacttctagaagtagaaattcacatattccatcatgatcctccccaccatgcagagactatttgactcctaaggccacactgtttccatcccatagatttcacagaggtgattaggttctttgtagaatactttttcctcattctggaatgagggatactggagtcttctggtgtaatgtgcagtcaaaccacaggaaaggttccattccttacctaagtctcgttggtctaatacacctgccagctactgaataaaatgataatactgataaatggctgggcagaaatccaacacccaaatcagctgtcaaatttcaaaggcacatgatacaaaaatattttagacaatacactttataaaggcaactataagaaaccgttaaagttacatttttattaaacagccaaaaatcttaagacaaatacctacagaccatttcttcattggcaaatattttccagtcataaaaggtgataatttatgggattatattccagtttcctctcatgtaaataaatacatacactgaatctctaataccactctctctagatgtatacatctatttggaattgctttcttagtatgcactcagcaagcactagcataagaacacctgaggttctctgtcctcatttaatacctgtaagagaaaaggactttattctactgaattctgccctttttttgcaacaactgaattatccccatatttatttacaattttaagcttgattgctgtccacggagttactgttgcttctcaattataactagtgttagaaggcttgatttcataaatgttctttttaatccaaagatagatcatatatgaaaaccttcctcaatactcctttcaaatcagatgcatataaactatgatcccaatttccctgttagacgtatttctgttggatatttcctccgttgtcaccacagaggaagggaaaaagcagaaaagctgcccacctaacaaaggctaacataatggctaggctaatatattgacatgctatcatctttatgatgttttgaatctaactagcagacatacagtcaacttcctgttgaccatgtgcatctaatctgctttcttaattatacaaataatttttatttcaaattagcttctttctactactcagtataatcctctcacagcctggcatatacttggtagcacatcattcactagagagagtacgagagaaaattaggttgacaatatggggcaaaggggtagtctcctttaaggtgaggggaaaggagatgccaa

SEQ ID NO: 243242 - DNA, 903 bp, Homo Sapiens
ttttaaagtattacttacgtggaatctaaaaaagcctaatataccagagatagagaataaaatagtggttacccatggtggggagaaaatgaaggagatgtaagtccaatattcaacggaggagatacgtaggataaacaggcctggagatcgaatgtataacatgaggactgtagttaataatattgtattgtattagggatttttgttaaataagtagattttagctgctcttgtcacatacaaaaaagtaactaagtgagatgatagacatgttagtctgctttactatagtaaccatttttctatctgtatcccataacatcatgttgtaaacctcaaatatgcacaatacaatttattttaaagtaaaataaaataaaatgctcttgattaatttttgatggtgctttcacaaaaatcttttgtacatatagtttcagaaaacttaataatagacactaatccaaaagccttcataatatgcaaattaaataatgtgaatggaaaattgatgactttgttctcgtaaaagggagcagaggaatttagagagtgaaactataataataattgaactatttggctccactcagaagagaataattggccaatctttggctagcctccaaattgagtaataatctctgacctactaattcactccttccctgttttacagatggaattcataaattattctttacttcctgccctcaatgtaagtagaacttccaggttctactaagtatttgtcctatttcatttccatggtggctatatgtcaatggattctgtgtttacatatagtttaatcattttatggcatgtttcaaaagaaagaattatgtgagtgcattttttatgtagcccagatgtgtatgtaatcttattttgacccaa

SEQ ID NO: 243243 - DNA, 745 bp, Homo Sapiens
  misc_feature (298)..(333): n is a, c, g, or t
  misc_feature (657)..(665): n is a, c, g, or t
cagttttttgaataattgagataccaaaaatttaaacttcagtgagctaggagatttaactattaagaatatgtatagaattggtttttctacctcaagtaatacatttccactttaaatttcatttaaaaatccccaaatatttttcttaataccattcttgatatgttaaattaattattttagaaaaaccaagttatatatttctgcttaaagtattacttgtggataaaagttactacgtgaaagtcatctaaattaattaattctggaaacacaatatcaaataagaggtacnnnnnnnnnnnnnnnnnnnnnnnnnnnnnnnnnnnnaaggtattaggtagcaataggtgaaaaagctacaaatgaaaaattgtagcagcccccaatgaaatcattaggaactaaatgtctatttgtaataagtggcttcagagattccagaaaacaaattggagatgtgtggtaatgactataaccccctaagtaattcagtgattcaattatgtatagcatttgcagggaaaactctacatttttgtgtcatattagccaaacctgacttcactgtacattattttagcccaatgctaaacaagaaccactgctaatctgcacatatgaagcctgggaaataaggtcttcaataaagannnnnnnnnaacttatcaaaaacaaacatggattaaactttttataaataatgcttcaaagagatatcttttcagtagtaaaaacccaa

SEQ ID NO: 243244 - DNA, 144 bp, Homo Sapiens
ctcaaaataaccaatcttttcttttatggttagtgcttttaatgttttgtttaagggatctttgcctaacccaaggtcataaacatattgtcttatattaaatcttccagaagcccaacttttttgtacaaagttggcttttat

SEQ ID NO: 243245 - DNA, 989 bp, Homo Sapiens
ttggcttcatttgacgtgcactagtgttctgtgcccttccaggacaggatacctggaaagaaacccaagattcatagaacagatttgtatggtgtggtaccggcatggagaaaacacaaattgtctactggaccataatagataaaagttagaagtaaactattggtttccagtgactggcataaaaaaatagggcaacagaaattctcatccacagttactaaatattaaaatagctccaaacccaagtcactaaagctacccacatgaaagacactttgtgattccatggttgaaaacaagctctaaacccaatgggaatctttacagcaaagctggcctgtcattaatcagctaagggatatgggttcaaatgttttctgctgtatctttatatgggacagtcttattatcttatttcaaccgattctttgagtaaagattattttctcaattttccctgtggctgttgaaataatgtcgtcacttttgcttcatggagaattcttttttgtatctggtggcagaagctctcctatttccagatgtagaaaggacagagcacttttgaaacacatacagtgtcctgtgctcagcgttggctgtgtttttaatgcaatttgttatttaatcctcacaacagctctgcaagcttggggttgtggttcacaatttttactgattgggcgactgagatgcagaaaggccacagctactcagtttgtatgtgagcagtccaggttcaaacccatgtctgttggacagtaaactacttttctttttactgttacactcttattgtacctgtttggtactctcattaaaaaatatgtatagctgagtgatctcggccaagccacattatcttttctggcatactttatagtgcataaataagaggagtgaatgaaataggtataagcgtttaacctcatttttctttcaatatttgttcagtatatatgatgtactgaggatcaaatactaaa

SEQ ID NO: 243246 - DNA, 508 bp, Homo Sapiens
ttggatttactttcccgcatttaacatttttatagtgagactatatttgtacattatgtatgaaatttaaaagtgagtttaaaaataaagaagagaataaaatgaagacagtgcctcaaccaggttggcaggttctggagatgtggcttggagaaagagatgtacatgcaagacacaacaagaacaagtaaggccctgagcagagaaggccaggagttccctccatcctttgtctcttccttgggctagacggacagcagagaggaggacctgggcattctttggtccttgggcatgagctccaccctccttcttttgctagacctgtggacataccattttctgtacatagatttcaaccctccaccttaccctgctgtgatttttaggatcctgtcccccatggctcatgagatattggatggaattgcaagaatcagatagagatgaaaaactactagctctgatgaaaaatgcaggaccggcagccacaagggctttttaaatt

SEQ ID NO: 243247 - DNA, 649 bp, Homo Sapiens
caacttgatataatttagaaaaatgaaagagtatggttcattaaagcagatctcttttgggtagatggaccatcacaaaaggagctcttacatgcttttcccactcccatcccaagtccaccctcccaccaattgtattgtataaatcaataaaaagcaaaggttccagaacaactgaaagaaaaataattccaaactaagcagagtgaactttccattgggaatgaagacccatgggaaaaggcagcccagcccataactcctccctgctggaacacacaccgtaggtgtaggaactgcctgggaatcccattagaacacactgtttctcaggaagagaaaaagctgcattacaagaaaagttctcaggactttaggagttcttaggactgttatttcagagctatttattactgttattacagagctcttgttatttcagagctactgtagcccttgggcacaaccaacagaaagaggcaaagactgctgtttcctttgatgaggggaaagaggtccagtcccttccaaatgccccaggacatggcacagtagggatgtcatccagcccagttctggatttgcaccatttgaggttatagtatcttcatctttgggacacaattgctgttagcccaacttttttgta

SEQ ID NO: 243248 - DNA, 1111 bp, Homo Sapiens
  misc_feature (767)..(779): n is a, c, g, or t
tttgtacaaaaaagttggcacctgtggatgcagatttaggttagcactgttccagaatctgctacgcctgctgctcttgcttacgcaggaaagtgtggacttccatatgtggaggtgctgtgtaaaaaccggtatgtagggagaaccttcattcagccaaacatgaggttaagacaacttggtgttgcaaaaaaatttggagtattgtcagacaactttaaaggcaaaagaattgttcttgtagatgattcaattgtcagaggcaataccatctcacctataataaaactgctcaaagaatctggtgcaaaagaggtacacattcgagtagcttcaccaccaattaaatatccatgcttcatgggaataaacattcctacaaaagaagagctcattgccaataaaccagaatttgatcaccttgcagaatatctaggagcaaacagtgttgtgtatctgtcagtagaaggactggtttcatctgtacaagaagggataaagtttaaaaaacagaaagagaaaaagcacgatattatgatccaagaaaatggaaatggtctggaatgttttgaaaagagtggtcattgtacagcttgtctcactggaaaatatcctgtagaattagaatggtagctggtagggttggatgtgtgtagtttcaagatagaaagttggtcaagaagttatagtggtcacacctcatctatttactgttactcagttggtacaatgtaaaatgccatgcttatgtttataagttttgagannnnnnnnnnnnnctgaaaaggataccaaagtgcgataactgaacatttccaattgcatataatacaacaatatgtggtgttcttttttttacacaagcattggctagcctttttaacctggtcagagaaggcaggtggtcactgacatttcccaagtccatgctttaaagggtttgcaagaagttagggttaaggagaggtgatgccaacaagacaggtgagttaaatataccatttcacacaaagtttgaatagaatacattatacctcataggtgtctagcctctacagttctggctgtagttatgaccttggcttccctgtctaactgtagacaaatcttt

SEQ ID NO: 243249 - DNA, 1119 bp, Homo Sapiens
ttgggaagtgacctatttttgtaaggagcctcctcacaaagtcaccattctccaaaagactatccaggctgtaggtgaatgtgagcagagtgaatcttcagctttcaaagcagatcctaaaataagcaaaagaagaccatcgagagagagaaaagaaagttctgagcattaccaaagagacatacagacactcatcctacaggtggaagcactgcaggctcagctgggagagcagaccaaactttctcgagaacaaattgaagggctcatcgaggacagacggattcaccttgaggaaatacaagttcagcaccagagaaatcagaacaaaatcaaagagctaaccaaaaatcttcaccacacccaagaactgctctatgagagcaccaaagattttctgcaactcagatctgaaaaccaaaataaagagaagtcatggatgcttgaaaaagataatttgatgtcaaagattaagcaatatagggtgcagtgtaagaagaaagaagataaaattggaaaagtgttgcccgttacgcatgagagtcaccatgctcaaagtgaatatattaagtccctaaaagataagttagtacaagagaaaaagctgtccaatatgtaccaagagcagtgcatttccttagaagaagaacttgcccgaattcgtgaggaagagggaatgaggagagagatcttcaaggatcgcactaacaagatggggaagcgtttacagataatgacaaaacgctatgaggcattggagcgtcgacgtatcctggaagtagaaggctttaagacagatattaaagttctccgacagaaactgaaagacttggagcaaatgttgtataaggcaacagttaatgcccgggcaaaccaggatcttgcccttctgtgtgaggtccgtgacagcaatagacgggcacataagatacaaggagaactgaagaatcttaagtcgaaagtgtttggtctggagaatgaacttagactctgttaatgtctacttttggaaatggcccccatttagaagaggtgtgcttcttgaaacctgaggacaaggtcatctgctgccacaaaatgtaaacctgggttgactaaagtggtggtaatcattattgt

SEQ ID NO: 243250 - DNA, 321 bp, Homo Sapiens
  misc_feature (231)..(253): n is a, c, g, or t
ttgggatcgagcgaggagcccaagagcgagcgcgcagcacgaagctcgagccgcctccgccgcgcgaccccacctcggccgccgccgcctgcgccgcgagatccgccccggcctccccgagagcgagccccggccgccgcgaccaccagccgcgctaaccgccgaccaaccgccaccgaggcgcctgagcgagagcagaggaggaggaggcatgagtgaggcgggcgaggnnnnnnnnnnnnnnnnnnnnnnnctcccgcaggctccgacggaggcggccgccgcggctccccaggaccccgcgcccaagagcccggtggg

SEQ ID NO: 243251 - DNA, 805 bp, Homo Sapiens
  misc_feature (192)..(222): n is a, c, g, or t
gtacaaaaaagttggatctttcttatgtcccacattaaaataggaaaacatagccaagagctttaatttagcctaaacctatatcttgacaaataatcctgtgggtattttgcaatactgcattcaagtcaagcctaactattagcaaatacacaaatcaagagacatattttgtccttaataaaagataannnnnnnnnnnnnnnnnnnnnnnnnnnnnnntgagccaccgtgcccggcctgattctcttaaaattgaagaggtgctgccaaggccttcagatctaacgcagatgcatagaccttgttcctggtacttgttcagcctgtgctggggagccgtggtcccgagttccctgggaggctgacagggtcaagccaccctgcccaccaccctcccacttcccctcccctttcctctccagcattaggattcaagggaaatctgcatgaagccaattttgagggtagacgtgtggggaaaataaatcattatacagtaagacctggggcttgaggggtggggaatggggagggaagggcatagcctgctcctccatgagtctgacatctcggaaactgagcagctgccggacgcctgggtcaggaatccaagaccccacctcttaaggactggttcctcagaaagcaccctcagggaaaaaggtgaaaacattacatccgtggattctcctgccacaaccgcattggaagaaaaggcagccgcaacatctcaccgaggagtgaaggacccatgtcccaggaaccgcgctgcgccacctgcactcatccccctcacattctc

SEQ ID NO: 243252 - DNA, 1435 bp, Homo Sapiens
  misc_feature (457)..(479): n is a, c, g, or t
  misc_feature (501)..(513): n is a, c, g, or t
ttgggtgttatataccatatagaacttactgtcagtcaactataaacaggcccaattaaaaactgttccattactacgcaaacacatattagaggcctttgctgatgacacattagctggatcttagccaccccagaaagggtttgatttgaagctgattgttgccagatatgcatattggaatcccatctacccatagttcctctgaaggtgattttgtaatttgcaaaagggtataggaaaatatacctaaaagcgaatttgtggctgagaggataaacagaagctgtttgctcatgttctgtgccccacacccaccaatacctaaatctgttaaggaagacagaaaatgttttctttgtgctcattgagtagttccagacagaagaagaatatactctttaaaatgtatttacctgttagttggaagtacccagaattatcagaaacgaatgcnnnnnnnnnnnnnnnnnnnnnnngcttacacagcttcttagcaannnnnnnnnnnnngccgaaacaataaattgcctttagcagcagtttaaaatcctatcgtgaacaacctatattttcgccattttacaatggagagttgtgacaagtacaggttatcaagtttgcacttaactatgccaaaaaaagtttgaagcgctctattctcagacatgctgtattattacttctcattcaagattgaaaaatataaaggtatccaaactctgtcttaatgtaaatgtaactatttttccttcaagtgttgactagggagtcggtttctctcttaaagacactcactgtacaactgaaagcagctgtcatatttctggcaaaatgtgtttacgtatctgacaagttgtacatttgtgtatgaactgacataaaatgtgaaagcctgtaagtgtacatgtagtggtgtggtgttctgtctagaggatacaactgaatgtttttaatttgctgacttacagacacaggctgtttacaaaatgctagctggaaagtctgtaatgttcatgtcataacttttagttaattgccattgagcacctgttctgaggaggtgagatgtggacttgtgcttataaactggagagtttagtcataatccctcctggctttgtgtgaatagcttgctcactttgctggcctttgaaatgtgttctccgtgataagctatccatgtgtttgtgataagagtgcttgtcaaccatgaccatctttgagccttcctagtcctccacctggcacagtatttgaaatggcaaaggatgtgcttcatcctctaacagtgtacacttctcagagctgatattctggattttgactgtgcacatttcctctaattcatgtctgtagtccctatagaatgatctgtaataaaatagtatactggactgtgcatcaaagggattgtaaaattacagtattccaa

SEQ ID NO: 243253 - DNA, 506 bp, Homo Sapiens
ctttgtacaaaaaagttggccacggcccactcctcgctgcagtaacccctgggggctctgaccacctatgggggccgggcaggagcctctggggcctccactccgacatcaggacctgagatgaccgctgtgtggcgctctctccctgggcagggtggatgccacaggcccctctggctcccaggtgctgcttctccacaggtgcggcctggcccggcctcctaaaggccacaccctccccacgcacttcccaggccagaatccaaacatcgggaaccctgttttcttctgggtgtgtctcacttagaaatcgtggttcttccccgagggtgcatgttgcaggagggagagggcagggaagactcacagcagagcaggagggggcctgtgcttctcggggtctgcaccccaggcacagcggtgtcaccccgcaggaccgcgggcctgccccaacccccagcattcccgggtgggcccagaccccatcaccaagactggccacccgc

SEQ ID NO: 243254 - DNA, 1301 bp, Homo Sapiens
ttttccatctaacacatttaaattctcacagcataattgcaaacatgtacatattggttcccacgagaaatctgcaggtgacatttcgggatgtttggagtcaatcagataaagcacattatgacagaaaccataagaggggagctgggacctgggactgtgcagaatgaaaagccacggctacgggaagcataagcttgtgctgcaacggcatgtgcacatgacctgctgctcctggccctctacgaagcatgcccagcaagggaacttcctccgtccctcctccacgtgcttccttactaaggctgagagctcaactgaagaccttccccaataaatgacagatggctcttcagtcaggaatgcagttagtggtttcatgacagacacactggtcccacctggcttccctgctgaaccacccagtactgaataacacctgtaccaatgtgggatgacatcagctaggaagcaaagtaatttgcctggttgatgattattttttatacctaatgattcacccaatagtaaaggaaccccacagctaagatctaacaggcatatacctgctctgttagtttataagaaagactcgttctaataacaccaggtcttatattattgagcactaaggaacctccataatttcgattatattctacctaaaatttcaaagcacctccaagaatgaaagggtactatttctgctttgctaatttactcctgccagagcttctgtccttgaatatgagggctatcttcacctatagtaaatcccatctattagacaagactagctagcttatgtttggttatggggcaagggagtgggggagagattctgtcctttctggctatggcttctttctgcacaagcatgctcagcccccaccccagtctgaaaagatacacaaagggtttcctaggaagctacttatacactatgacccttaaacataatttttgtatttcatcttgaatattcatgttccctatactgccttcagaaaagcaatccctggtccacaaattattcatgtaacaagcatttttcaaaagcaaaatctgttaggaacatttaaaaatgaacattcctcactataacagcctgctcaaaacccaacaacctatttccagctgttaatataagtacataaagtcactaaaagtaagcgcagccacatcagcagattctctgctctcttgtcgtctttctccacccatcccaatgcacaactgtcaactgtgcttatagaccacctccagacctgatgggagctgccacaccccttttaacccaa

SEQ ID NO: 243255 - DNA, 368 bp, Homo Sapiens
actttgtacaaaaaagttggccgccccgcgcaccgcgcgcagcctgcggagccagcggccgtgacgcgacaacgattcggctgtgacgcgacaacgattcggctgtgacgcgagcgcggccgctcccgatgcgctcgtgccgcccccgccgtgctcctcggcagccgttgctcggccggttttggtaggcccgggccgccgccaggcctccgcctgagcccgcacccgccatggacaactacgcagatctttcggataccgagctgaccaccttgctgcgccggtacaacatcccgcacgggcctgtagtaggatcaactcgtaggctttacgagaagaagatcttcgagtacgagacccagaggcgg

SEQ ID NO: 243256 - DNA, 1336 bp, Homo Sapiens
tatttccaaattgaagaggcagtgtatataaaggtaacagagcttgtgataatttacagaaatgtttgctacaacatgcacattatgaagtatttcaaacatatacatattaggtttcatgctgaataaataatccccccaaattaatttttatttttacataaaaatataatattgcactcttaacaagaccagttattctgcatattttctctttagataaatgatgaaattcggtttttaaaaaaagatgagtagcaaccctattctaataggggactaatttaaagttctcagtaaaaaaatgaaagctagacaatagctgcaattttttgttaacaaagcaaatcacttcaacgtgaataggagtaatctcatctctgcacctccatggacctcaggattcacacctggcctgagcacacggtgatctaaatgcagcctaggtatcactacatgtgtatgcagtttaaggttaaagcatacatggccacgtgctttctctcgaatctatcttgacagcagagactttggaattatattttatatggtttttaagcagaatgttttagaaagtctggaagttacaaaagtagtactgtaaacaccatatgaattaaatttccataacaaatgcacaagttattcttaggcagggatacatatttttatcccatggtaacatattactgagcttatctgacagtgtttttcaaagccaataaagcagcaccccaagtaaaaatatacagacagccatcatatgggagagacagacggctccaagatgtttaggaattctgtctttatggtatgtaagtttgctgtggaatacacgagattttattattcttcctagaattctcagatggtataggttagtagaaacagaatgaaatggtttcctaaaagaattattctgcctcctgtttaaagtaagcttttataattctgttttggggaagaaaattcttcctgcagattagatcaaatgccttatttaggctgtgttcttaatacccatgcaaacttcttgcatactgaaggctttctattgcaaattggtacagattcaatgctctgtaaatagcagactttaagacttaccattgtgtttaaacctcagtgactcaactaaggatagtcaatatctagcgttacagattttaagtaaaatttttatgaagaaacagaatgtgtctgaaatccaagatacctgtattcttgtttgtggctgtcaaaaaaattctggttctcctttgagctaagaaagcaactggcaaaaactgcctaattttgagattcattcatagccaacttttttgtacaaagttgg

SEQ ID NO: 243257 - DNA, 918 bp, Homo Sapiens
ttggtgctgactgaggcgctgcagccaggagccgcggccggctgcccagcgctcgccgcctccgcgcgtccgcagccgtccccgcgccgacatgcgcttggccgccgccgcgaacgaggcgtacacggcccctttggcggtctcggggctgctgggctgcaagcagtgcggcgggggccgcgaccaggacgaggaacttggcattagaattcctcgaccactaggacagggaccaagcagattcatcccagaaaaggagatcctccaagtggggagtgaagacgcacagatgcatgctttatttgcagattcttttgctgctttgggccgtttggataacattacgttagtgatggttttccacccacaatatttagaaagtttcttaaaaactcagcactatctactgcaaatggatgggccgttacccctacattatcgtcactacattggaataatggctgcggcaagacatcagtgctcctacttagtgaacctgcatgtaaatgatttccttcatgttggtggggaccccaagtggctcaatggtttagagaatgctcctcaaaaactacagaatttaggagaacttaacaaagtgttagcccatagaccttggcttattaccaaagaacacattgagggacttttaaaagctgaagagcacagctggtcccttgcggaattggtacatgcagtagttttactcacacactatcattctcttgcctcattcacattcggctgtggaatcagtccagaaattcattgtgatggtggccacacattcagacctccttctgttagcaactactgcatctgtgacattacaaatggcaatcacagtgtggatgagatgccggtcaactcagcagaaaatgtttctgtaagtgattctttctttgagttgaagccctc

SEQ ID NO: 243258 - DNA, 739 bp, Homo Sapiens
  misc_feature (573)..(595): n is a, c, g, or t
gtaaattcacaaagctttggaaggagaagcaataaatttttgttttcaaatggcttgatgtaccttttttcctgttgctcttgaaatatgtttaactcctcatgagagaaccctggattctctatcccctagtccacaaaacaaaccaggcagtggtcagcagctacctttatttggatcacacacgtgagtcagacagtaccactaatcgggccaatatggcttgtgagcaaaatgggtgaaaatagagggaactgactgggacctgttgtctaacatcattttaaggttgaacttgagccaagacttagagaaagctgatggaatgccaagcatcaacgtgaagagaccctctatgcacacagtggatatgttatgcctggctgtagccaccttctcttctgaaaacaagatgggaatgacggaactgtattaaaagattaagttatccactagggagcatactagcacacttccagatcagccttgagatgctagacttcagatacagggacttgtgtcaggtggcctctagaaatgtggaagactaagatttagaaataaactaatttnnnnnnnnnnnnnnnnnnnnnnntttcgcctaggatgatctgtttacaacagaaacaaaaacattttccagtttaatccatttgactgaaagtcattgttgggctgacccttaaggaaaacttaagtttaaacttcctttgcatagtatgttttctcttttttccaa

SEQ ID NO: 243259 - DNA, 1625 bp, Homo Sapiens
ttggatttatagaaatcatctagtcttacccttcatcttacatataagaaaaatggtcttttcttctaatcacattcacaaaatatgatataaaccttgaccatgaatgtatgagcctaattagagaaacagaaaatcagcatgtcagttttccttcattcaaaataacatagtctttctaagcagtcattctggagttaacatgcctagttcagagccgctgtggatgctcaaatcatttctggaattgccttcaggacacaattatgagaaagtcagacttccaatattttgatcatgccttgtgttttcctacgtgtccttatcccactggattgtgtctcttactcccaagacttattccaaatgattttttgactcttttcattaatcaaattcaccccaaaccagaaagttttgccattagcgtagatattaaaaatattactggctgggaaagcactcctcaaagcagaggttctaaattaatttatctgttcttttaccatttgctcactcactcactcatggacccattcaatcatagaatatttaagatttatatgcccagaattataatagtgcctaggccttgataattagtgaatttgtacttggggtgaatgtgtaagtgtcaaaaggtaactattatgaaggagaaaataatcgatttaatatgtaaattctggggaggcatttaaaaaatcagtaatcttcaagttatatcttgtgtatcatctgtgttggatactctaatttggggggaaagaggctccagacagtttgctaaatactattttgaaagttatttttgggcattgtaaaataccttgcttcataccccaaagaataagatatgacagtctgacatcgattgtctgaaagtactaattgcatttaaaattctttaagttaactacaacctcccagactgcaaagcaaatttccaaaccccaggtcatacttttgtatgtatgtaaaagctttagcattttagggaaaaaaatcaatctgtatttcaaaaataaactttgaggtttgaaaataataacaatattaataatggtagtattaacatctattatgtataacttaatctcaacataatttattgaattagaatgaacctggaacactttttgatgaattggtatcctagaggctgtttccttgggccttaactgctggaggattaggtaatcagggattccaagtgttgtgatcttttttctgatgatgccacagtcttcagtgtaaaagttcagaagcctaaaagaacaagtgatcctgaaagtagctgattccagacaagaaaattatattagaactcatgatatggttttttaaagtatttgttattactcagaagggttcatgaatcagtttccactacctctattccttctattgaagctttcctcaaatctacttgtgattcctgatagctcactggcaactgtaccaaggtggccactgtatcatctactgatccttctgcacctagcactcttggctccagataacgcacagaaacctattttctcaccagctgtcttttcttctagggcatgcatttctatgttcacagttcatgtgtaaaaataaaaccaaatcctggattatca

SEQ ID NO: 243260 - DNA, 607 bp, Homo Sapiens
gcagacatatattcaggccatcaagaatgagaaaatgaatttgctaaattgatgcaacatcaatcaatagccagggcctgtcattcacagacaatcactccaccacacgcacacatacattcctacggtttgtccacaacttccagagctgaagagtagctcaaggacatcaaagggcagaggcccctaggaagggctgagccacaatgaagcagtgctccttcactcccgatttccatggctaccaccgtttttctctggcaaatcagagacgaattttaaagactgagtaaatctataaaagcgattaatcacagaagttcaatgtctgataaattattccaaaagtgttcctgggcactgagactcaccaagcatacattctgaaatcaaattctatttctatccaaaaagtgcagcccatcagtgttcttaaaggaggcaaatggttgttgtgaggtagcaaacattttccaatgcaggtaaggatgtagataccaggtaaatgttacagttgtgttcatactaacaataaactatggatgacgtggcacagagtcagtcaatgaggaaagatccaagggacattctgagccaacttttttgt

SEQ ID NO: 243261 - DNA, 1798 bp, Homo Sapiens
actttgtacaaaaaagttggctgagaaatccacatgcttcagaattcagagggttcagggaatggtttcggatagtaggctctccctgctcccttctctacaggaatctctggaaaactatcagaagacaaagtttgacaccttgatacccactctctgtgaatacctacccccttctggccacggtgccatacctgtttcttcctgtgactgtagagacagttctagacctttgtgatagaactaaaatgctctctgtactctagtctcctgcctcctcagctctgcaagtagtttagtaggaatgaagtggaagtccaggcttggattgcctaactacactgctaaaaatatttgtaatccttaataattaaactttggatttgttaaaatactgccttgatgtgaaggaggggaattaaggtttccataaggtcagcataagtcattccttagaaacagaactggcccttccaaactgaaaggatccctttgcctttttttacttcccttgctaagtgttgttcagctgtgcctaaaagggttagcagggttgaaagcctggaagagaaatgtcctttggtattctggaaatatgtgtcctcaggccagaatatactttgtaaattctcatgctgccagattatctgggtgtggtggcactagaatggagatacttcatgggaataatactcattgttcttgaccccactgggtcagtgctgaccctaccaccacccactctgcagcagcacccagatgctagccttgtacagaaaagccccagcatctctttacagtcaatgagctctctcttattgaggtatttcaaatatacaaacacttcagagctttttagatatgtgaaggtccaatttagtgaagcggattaacaaaacatgattctaaaagcctgcctcctctagaccaaggccatgtaaaagatttatgtaccaatcagcatcttttccttttaataatcttcaggatgttgtgttgggtccccagattcccatttgattttcttgcatcattttctcagactgtttgcttccttgcttcctccccagtgagtgccttgggcattttgtgtgtgcagatagagaagtacagagttactgcaggagccctcaggagtgagacaacaggaaatgacaaagtaatacagagctgcagtagctgggatgggtgaggaccccacttgggatgccccatggtagagtactggtgccttgggagggtagaactgctcaggtctagcacgcctcactgaagattggattcacctgctgggtgactcggatgaaggtagttctcctgctcaactctttgagcttagctgctcccacataggtacacgtagagcggatccctcctaggatgtctcggatggtatgttccacatctcctttaaaaggaacttccactgtctttccctctgaggctcttaaagtaggaaaaactttattatcttctccttctggattccttaagcccagggacttttccacagaccctagcattgagccccggttcaccatgcttctctgagaactgtaccatccccctctcagcagccatgagttctgcctccatactattactaagctcctgggcctccacacatacctgtactcagccacgcccccagcatacttcttcatggccatttcagaactcattccatagaagagcttgtacttcttgccatccctctcgatgagctcaccacctgactcactgtgcccagccagcatgccacccagcatcacgaagtcccaacttttttgtacaaagt

SEQ ID NO: 243262 - DNA, 741 bp, Homo Sapiens
gccaactttgtacaaaaaagttggatcaggacagggcttttgccactgcacgcttgaacttctccggacagaggaacatctgtaccctctcaacgatccagaagttgccacggctgctagttgcgtcatccagtggacacctttatatgtacaatttggatcctcaggatggaggagagtgtgtcttaatcaaaacccacagcttgcttggctcaggaacaacagaagagaataaagaaaatgacctcagaccttccttacctcagtcttatgcagcgaccgtagccagaccaagtgcatcttcagcctccacggtgccaggttattctgaggacggcggggcgctgcgaggagaagttattcctgaacatgagtttgcgacgggaccagtgtgtcttgatgatgagaatgagtttcctcctataatcttgtgccgtggaaatcagaagggcaaaacgaagcagtcatgatgagaagcacacctcagaaatcaggacatcccccctatcaggtggttttggagaaaacaaggaaggcggaagaatggagtgcaattgtgtgagcagaaaggggggcaggaatcccgggtgctccactgcttaaactacaggacctggttaactcctcaccaagcttcccacgaccctggttgcctatgggcgcgggagacattgtatacacaccatgctatttaaaatactttcaaactatattgtatatgctaattaaccatattggtat

SEQ ID NO: 243263 - DNA, 1609 bp, Homo Sapiens
gaggggcctttaaaggcaattatttatcattgtaggtgtgtttaaacaattgatattcaaaaacacaactttttgtgtacaaaattttacaatttttaacaaaagcagtgaagacaataaataacccagtggcgacctcttcaaagtgcagtgtccttggtcaccaatgcagatgctactggggcagccagaaggctcagagggtccaactccagacactgcatccatggctgtcctagactgagttgcacttgtaaaagagatggtcccacacctactaaaaaaacaagctactctagtatcaatatgacatcactcttttaccatcaatcatattgcaaaaccatagtatttaacgaccaataaacagccaaatacctaatgccacattgtcgttcaatttacctggctggttaatatcagtctgtgtttgagtatttcttttgagcacacaaaaacaaatgtatagtcacttgatgaggaaattcttcactttgactcaaatggattcaccatgctgtcagttatgaaaacaactctaattttaatctccacagggcaaccttcacttttcacagcagttctaaaactgacctacagaaaagttcaagattttttaaaaaatttggctaccatactatgtttcttatttaattttctctaatcaatactactcttacgttccaaatatttcatgggaaatttttccctcaaacttaatatgtttcttaaacaaattgaagccactaaagttcctgtttaaaccactgataactgccccagttaaaataataataatttaaaatgattacacttcaaataaaggtactaaaatcacgccccccaaatttgtaagcgcttttgttgttattgggtactcactgtgaatagaagtaaatgtacttgacctgtatgagaataaacattttatcaagtacagcaaaaaaaacggaactgattgtgaaagccatggggatgggactttaaaacagcggtaagacgctggtttatcaccagaaacctcatgtgcctctgtgcacttgaagtaaagaccacatttgagcaggcctggtgggctggcacaggcctcagaacaggtgctgtttgtgtgaattctcctccctgcattgtccattctgttctagggcagtctgattctggcaacaggagtctctaagttccaatcactcactcacaaaagagttttctgtaatcccttttgtggaaaaaaatggagtttttctgatatgcaaagcaacttctaccagtctgacaaagtaggtaaaatcgatgacaccctaaaataaaaacctggagtgaactggtgctccagaaagatgctgaatggccacagtgcatgtggtgatgtctccatgctgaggtttcaggcagcacagcactaagtatcaggtgacctgtggtcccaccagagcatagtcctcatgaaataggcctaaccagataccttttaactcatctttattttggttgcaaagatgtggtttacttagctacttactatttgttcccatttgaagtctcagagcttgccaagttaaacaccgccttcagtaccgagctgctatacaagaacgattataaaatccaa

SEQ ID NO: 243264 - DNA, 1113 bp, Homo Sapiens
ttgggtcaaacttggtggagcacaacggggtgctggagtccgaagctgggcaaccccaggctctgggaagcagtgggacttgcagttccctgaagaagcagaagctgagggcagagagcgactttgtgaagtttgacacccccttcttaccaaagcccctgttcttcagaagagccaagagcagcactgccacccaccctccaggccctgccgtccagctaaacaagacaccatccagctccaagaaagtcacctttgggctgaacagaaacatgactgccgaattcaagaagacagacaagagtatcttggtcagtcccacgggcccttctcgagtggccttcgaccctgaacagaagcccctccacggggtgctgaagacccccaccagctcacctgccagctcacccctggtggccaagaagcccctgaccaccacaccaaggagaaggcccagggctatggatttcttctgaggagcagcagagtcccttgtaaaagactgcttttgtacagaatgcgctataaattatacctttaagaatgtggggccttttttatgattttgtaagttcccataagttgtgtgcacgaggttctgagagtgcccgcaggctgctgcgtcctggcccctctgtagtggctgcgggcgtcttggttgaatcttttgctacaaaccatgtttgcgtttgagctctccaggattttacatttttgggtaacctcagtgattcccattggtgtaggaaatgagaccctctctgaagctgaggagagcacgttgatctgaactttaaatcaatcagtgctgctggcacaatgaaaggtggaactgcacttctgttgagctctcagttctgcggaatttggtactcattaccgtattcgccgtactaagttggtttctgttagtcttaacagtctgttttcttttaaaagcatgtagggcttcattgccatgttctgtgggtgtttggcaggttaccgatgggggaagattcttgtcacagaatcagcaataccatagtttttctacatgtgctcagctgggggtgtggacaggtaggggtggggaaagaagaggctctgcgttctggggggctttttcttctc

SEQ ID NO: 243265 - DNA, 1484 bp, Homo Sapiens
ttgggacgaaggcagcaacgccaagcagaaacagaagagagaagtccacagcccccaactgggaagtggcctagccttccagagactcccacagggctggcagacatcccttgtcttgtcatcccaccagccccagccaagaagacagctctgcagagaagccctgaaacaccccttgagatttgccttgtgcctgtaggtcccagccctgcttctcctagtcctgagccacctgtaagcaaacctgtggcctcatctcccactgagcaggtgccatcccaggagatgccactgttggcgagaccttcccctcctgtgcagtctgtgtcccctgctgtgcccacacctccctcgatgtctgctgccctgcctttccctgcaggtgggcttggcatgccccccagtctgcccccacctcccttgcagcctcctagtcttccattgtctatggggccagtactacctgatccgtttactcactatgcccccttgccatcctggccttgttatcctcatgtgtccccttctggctatccttgcctgccccccccaccaacggtgcccctagtgtctggtactcctggtgcctatgccgtgcctcccacttgcagtgtgccttgggcaccccctcctgccccagtctcaccttacagttccacatgtacctatgggcccttgggatggggcccagggcctcaacatgctccattctggtctactgttcccccacctcctttgcctccagcctccattgggagagctgttccccaacctaaaatggagtctaggggcactccagctggccctcctgaaaatgtacttcccttgtcgatggctcctcccctcagtcttgggctacctggccatggagctcctcagacagagcctaccaaggtggaggtcaagccagtgcctgcatctccccatccgaaacacaaggtgtctgccctggtgcaaagtccccagatgaaggctctagcatgtgtgtctgctgaaggtgtgactgttgaggagcctgcatcagagaggctaaagcctgagacccaagagaccaggcccagggagaagccccccttgcctgctaccaaggctgttcccacaccaaggcagagcactgtccccaagctgcctgctgtccacccagcccgtctaaggaagctgtccttcctgcctaccccacgtactcagggttctgaagatgtggtacaggctttcatcagtgagattggaattgaggcatcggacctgtccagtctgctggagcagtttgagaaatcagaagccaaaaaggagtgtcctcctccggctcctgctgacagcttggctgtagaaactcaagcggcgttgacattccccaggagaagaggcccctagaccggttacaagccccagaactggccaacgtggcagggctcacccctccagctacccctccccaccagttatggaagcccctggctgctgtctcactgctggccaaagcc

SEQ ID NO: 243266 - DNA, 1007 bp, Homo Sapiens
gttttaaaatgttccgtgtaacaggtcaatgtaggttagggccagccaaagacaaaagcaaagcatcaacattaagtcacaggctaggattatacaaataagaacaaacacaagggcttatggtactggtaggtaaacacaaccaaactaaactgtacttcaaatttgtttatataaaagcatattaaagctcactttaaaatagtgtccatcttttcttttaaacgggcatagactcatttgcagtcatgtacaaatatacctaatagctttcttcatcttttaatacaagtacaattccttgcttctttatgcaacctaacaaaataatatagaatgaagtcattagaaaaatatgaacctttctgaatctacattacatttttaatttaaattggaaaatacagtttagatcatatgaaacatatggatttcagacatgtattatctgtttctaacagattattacaggcggtctttattttggctgaaatgcaaaaatatgactttcttaataacagattagttaaaaatactttccattgatagcagtgctagtccctagaacaaaaggtaagcaaaacttatttgtaagttactgcctattcaatgcccagaatatgtagatcctaaatctaagcccttaatatacatctactttaaagataactgaaagatctcacatgcctgataatccttaatttaaaccgtcctgtaaacatagtcaaaatctgctaatagaaatacaattcaagtaaacattgcatatttgatttaaaccaccttacagttaaattcactcatgacacattggatcataaccactaatatgtaaaaagttttaaaaaaaatcatccttacgtatagatgaaaataaactttgtaaacttgttcatttaaaataacgaatgtactgcagctgctctttggtttggcatagtttcaggtactgaatattcaagtaaatttgttcccaggtaaaccaagtctcctaatttgtacaaagt

SEQ ID NO: 243267 - DNA, 1070 bp, Homo Sapiens
  misc_feature (95)..(121): n is a, c, g, or t
aaaaacagtaagtaaatttgtctacttagtattttaataatcgtacataacttagacatacacagataaatggaaaaaaagtcctcccaaacaannnnnnnnnnnnnnnnnnnnnnnnnnngtgctatctaggaatacaatttttatgacattacaaactcttcctttgcattaaagaattcattagtttggcactttggtaggggaacagggtttcaaatgcttacactacaatcttccatcacaacttcctactcttctgattctctcccattggaaactggaatcactgtagagatgggatatacagaggtggaaagtattcactgtttagcaactcttgcactagtgtttcctggcatacaaaactgcccccagtctacaaggggtactacatgcacatcaatgtatgatgatgactatttggcttaaatgggatacaatatttgaccagctcaagaaccttcagtgcttgactgaaatttctaagactgatatttcttactgaaatgttcctttgggttttaaactgaggtttctattgtttgctttcaacagacatatgtttgacatacaaaatatggtaaagatccactacttctgcagtgttatatttccatattattcccttattggcctggatttcctcatcaatagcacaattcattcaaatgtggaaagaaaggcattgatacactgatcagagtaaggaaagtaatatcatatcatcaaaagtcacattaatctaaatgacaaatttattctctgttggtttccaaatctgggatgttttctagaagttgcacaataaataatatgatgtaattacctaggcttaaaagaaaagcaccattctaggaagaagtaatccactgcagtgtagcagtacagactgggtaatgggaaagacctacagaccgttataagaagggcagcagggagcttttaaaatgaaaaggctagagtatcagtagcactatggaacttttctgttggaagacaaggatgaacaattcatgcttccaggcaatggaatggcacatatcaaatacgccgaaatacagagccaa

SEQ ID NO: 243268 - DNA, 576 bp, Homo Sapiens
gaatataattgacatgtacagtatacttcattcaacagagtacatattcttttcaagctcccaggagacatccaccaagatagactacatatttggccttaagataccccttacaaatttcaaagaatacaaaccatataaagtgtgttttcagaggaaattaaacaaaatcaaaaacagaaacgtagatgggaaatctcaaaataactggagattaaacaaaacacttctagataccagatgggtcaaagaagaagtctgaacagaaattttaaaatgttttgaactaaataaaaatgaaaatacaatgtatcaaaatttataggaagcagtgaaagtagtggttggagataaattataatattgaatgcctatattagaagagattaaaaagatttaaaattcataatctaagtttccatcttaggaaactagagaagaaagatcagtgtaagccttaaagcaagcaaaaggatagaaataaaaattatagtagaaatcaataaaatagaaaacaagaaaccaatagaaaaattcagtgaagtaaaaatgtgctaatttgtgcagcagcaatag

SEQ ID NO: 243269 - DNA, 769 bp, Homo Sapiens
  misc_feature (526)..(553): n is a, c, g, or t
  misc_feature (652)..(682): n is a, c, g, or t
tcatgagctgcagaaatcacttccaggatttgttcagatgagctgggatgctgagttctcataggattggccgtgcgcagtaagcagggtgttgaccaaaatggctgactaatgaactgaactgaaaattcaggctcatgtgaccagctgctctgaacgtagggcaagcaattcccaggatgctttatagatgctgctgatgctgggagagcaattaggcttctctctctcatcctgtacaacccacttccagactgtgctagtcaaactgtgatcagacataacacaatgcacatatcctcatcaattcttcttactttgggatcaaggactgaataaaaggatgacaattaataccggataataatctatagtaaagatggtaaaagaggcagttagattaatttaacaagcatataattcacctctttcattcttatctacatagctattaaaattctttactatgctaaatgttatgttttaagaaaagctaaagcataaaaaattgaggttctcagagggnnnnnnnnnnnnnnnnnnnnnnnnnnnnctaaagtagattttcaatttaaatatcttattcttgggcatttataatttccttctccaaggtacaaaaacctgaccttttaggttaggcagaaatgcnnnnnnnnnnnnnnnnnnnnnnnnnnnnnnntctttcccaattaatggcaatttcccccctttttgattttgttgtatttatcaagtttctgtattaagcataaaatacgtttcccaa

SEQ ID NO: 243270 - DNA, 793 bp, Homo Sapiens
gccatggcccctggtgaagcatatagaccccttctcaaaatgtttctaaattcataaaataaaatacacagggttacaaagaaaagaattactctgaaataaccaaatagccaaaaattaatttgtgatatagtaatggaggaaaatactcaatttccgagagaggtcagggaaaacaaagtataattttttctttccaactaaatccacagatccccagggtaagaatacctatttaagactaaactggcatttcttctgttatttttcaaaatgccatattattatcctgtaacttcgctgaaaaaggttgaataaagtaggatggctcgatctggcaaagaaacagctaacggatgatttagcatttgttttaatcaaagattttaaaactgttctctaaatagcttactgtgtaaagaccaatacaataggtgatcttggtaaaaaggactgcttttggatagttagtataattatactctaaacttaagatcctaaaaactgtgttgagcacctcttctggagttttattttgcatcacctgtcttagctggtttagttccatactcagccaagaactagggtggagttgatggtttattaagggctcaggcttactcttccagctctaggaatctgtgttcccaatgtagtttcaatcatttttcagtctccaaaatataatgttaataaatgacattaaaatattaatattatagttcaagtagtactgaagttatacatatggacaaatatttacaaattgtccaacttttttgtacaaagttgg

SEQ ID NO: 243271 - DNA, 1190 bp, Homo Sapiens
ataaaagccaactttgtacaaaaaagttggatccatgtggtaatggtagactttttaggtggcaatttctaggtctgaaatatagcagaggaaagggcgctgaggcagttgcaggcaggcagccctgtacttaccctgtactcacctcatccgacagacgctgtggatgaggaggggcttggcggaggcgtgagcaccgatgtccctttgataacctgcactcaccaagatgaactatttgccgccctgtcttttcctgggttggggggtggcatctgatggtggcagagtgcctgttggttcgcccgtgggtctcatggttcagacagagggaggtggacggcagggatcagggagccaggagcgcgcctcagacttgcagcaaccattgtgatttgggttgttcggaatatttaaattactgatcagaagatgaaagtagcttttctcttgggaagtcttgcagcccgtgggagtgataccaggagcaacacagagctcagcagcggcgccaaggtgttccctgtttcctcagcacgtgagccttcaccgcctgcttcattcaggagccagtgcagcagtaatacagtctatacattgttctgttttcaaatttatcctgaggctttgttgagcataaatgattatacgataaaggtatccgttattttggaactcatttcagttgggatctcctgtatgcagagtgttgcatttagaggtttgagtcccatcttggtttcttgccgtgctgactgtagccttcaccttgacttgaatgaaggtctgtggttggaatgtgtgaggagccgctgaggtgttcaggaggtgctgcctggaggtcggtttcttcctgggtgttacgggcaactgctcacacagttgtttctctgtgaacatttccagtgtttaatccaaaatgaaaacccaccaatgcttttgctaacttcagtgccttttataaatcatttttaaatttcctgaacttgctttttgaggatatacagggatattaagtagactcaggattgtttttgtttgtaaaaattctgaattgaaactttgttttaaaaaaaggcttctttctttcatatgacaagagataggtcaggaatattggaatcaaagatttaaatgttaaaattccattttgttacacaaagtgtgttcatttgttttgtaacatacaa

SEQ ID NO: 243272 - DNA, 595 bp, Homo Sapiens
  misc_feature (549)..(565): n is a, c, g, or t
ggaaaaaaatgttttcatccagagagtaaaactcaatgaagtggcacagcacgcagtacatttcaactttcccctcttaaagatttcagcctacacactccaatttcacactcaatgaaagcttaagcaaaatgttagcataaatcaaagttttaaatcattttagattgttaactagcaaatgtcctgcagaaattttaaaactcactaaataaattataaatctagttatgagaacaaagcacactgtggaatataaggatgcagaataaacagctattcagaaagtgtgtccaatttttgtcccacccctaagtcaagaggcaaaccatgaccccgctgtgggactgggctgtcaagcactctccctcctctgctaacgctgttgcctctgttcagaagaccttccctgccctctcttcacggggcaaacctacacctctcctccaagatccagctgagcctttacctcctctgtggcccctgatcagaatccccaaggcagaagtttttggagctttattcgtgcctttcttttgttgttgttcnnnnnnnnnnnnnnnnngagatggagtccaacttttttgtacaaagt

SEQ ID NO: 243273 - DNA, 244 bp, Homo Sapiens
cgagatggagtcttgctccttaaaatagccttcattatttggaaacttcagttatattttctagaagcattcttctttccaaatgtcaagggttctaatctttttagcctattttatagggagactcactcattgtcactgcctccaaatatctttaggcactttcattggtattagattttcttcagtcatggctatgactttttcaaagtggagttaacagaaccacaattttgtacaaagt

SEQ ID NO: 243274 - DNA, 1391 bp, Homo Sapiens
ttggtttccagatacatgaaagacaaacattcttagattcaggaatcaaatgacttagaattctgtacctagataaacttgcacacaagagtaagggtgaagtgaaaacatttttaaccaaagatgctcccagcaaaaattgctaaacaatgtatttagagaaggaagatagatccagaaggaaagtctgagatgcaaggagaaatgcaagcaaaaacaagtgatattcctaaggatgaatctaaaggagtattgaccatataaaataggggccagctaactgtggcctatttttgtgtgatcctccagctgggaatggtttatatttttaaatatgtctttaaaaaatcaacaaaagaatgtgcaacagaaaccatatggctgcaaagcctgaaatatttactatctagacctttacagaaaaagctttctgactctcagtttaaaacaacagcaataatgactaatttgggcaatataaaaaagaactgaaatactgaaaatgtaaggtacaagtgggacaatgagagttccagtacactgcagttcttatgttgtcaagccaatagcaatagaatgtgtaaccttcaaggcaatacagggaaatgaagacttaatctaagagaacctagggtcaggggaagcatagaaaaaaacagggtaaatacagaaatacagagcaacatggatgaaaatgatcccagcatgccagcaacacagtgacaataaatggacttaaactcatcagttaggagcagagattgtcaggttgcttttaaaaatacaggcactggttatttacaagaaacacacctgctacactggaattccgaaaagacaaaagtaaaagaatgggaaactacacgacaggtaaataataaccagaggaagccggatttgctgcgttggaagaaagagacctaaagctgaagcacttgggagacgggggcttgtcgcagtggagaaggaactataccaggatgtgcagcaggtccgtgagcttgagttgggcttttcaaacctaagaactagacatacctttttctcttcactgatcaacatgctttttggtatcttttcaccaaaatagacaagtgtttcctcccgagtctggagctgagaacctccatgatctgagcaggtgtcctggggggccagagggcaccatgcttcctgcctcacaacgcacactgatggccagctccagggcctgcaggactgcctggcgcacgaccgaaggcctcaggtctccagtgcgtgtcgcctgggctcctggagttggtagggcccctccttgttggtcattcttgcatgcgtgagccaaacacgtgggcatgttttgaaattggatctctgttcttcagaactgtcaccatttacagttcatccaa

SEQ ID NO: 243275 - DNA, 1093 bp, Homo Sapiens
  misc_feature (546)..(851): n is a, c, g, or t
ttggcaagaatacaaagtacgccttctcccctaggaattctcttccacagcacctgaaagagtttttgggccatcctcatcataacacacttctgtttttctcctttccattgtcggatgagaatgatgtttttgacaatctaaatgtcattgcagaagactctgagagcggcaagcagaatcctggtgacagctgcatcctcgggaccccgcctgggcaggggccccaaagctaggctctgagaaggaaacacactcggctgggcacagtgacgtactccatctcacatctgcctcactgagggatcagggcagcaaacaagggccaagaccatctgagccagccccacatctagaactcccagaacctggacttagccaccacagagctacattttaaaggctgtcttggcaaaaatactccatttgggaactcactgccttataaaggctttcatgatgttttcagaagttggccactgagagtgtaattttcagccttttatatcactaaaataagatcatgttttaattgtgagaaacagnnnnnnnnnnnnnnnnnnnnnnnnnnnnnnnnnnnnnnnnnnnnnnnnnnnnnnnnnnnnnnnnnnnnnnnnnnnnnnnnnnnnnnnnnnnnnnnnnnnnnnnnnnnnnnnnnnnnnnnnnnnnnnnnnnnnnnnnnnnnnnnnnnnnnnnnnnnnnnnnnnnnnnnnnnnnnnnnnnnnnnnnnnnnnnnnnnnnnnnnnnnnnnnnnnnnnnnnnnnnnnnnnnnnnnnnnnnnnnnnnnnnnnnnnnnnnnnnnnnnnnnnnnnnnnnnnnnnnnnnnnnnnnnnnnnnnnnnnnnnnnnnnnttgtgagaaacagaaatacttaaaatgaggaataagaatggagatgttacatctggtagatgtaacattctaccagattatggatggactgatctgaaaatcaacctcaactcaagggtggtcagctcaatgctacacagagcacggacttttggattctttgcagtactttgaatttatttttctacctatatatgttttatatgctgctggtgctccattaaagttttactctgtgttgc

SEQ ID NO: 243276 - DNA, 1042 bp, Homo Sapiens
ttgggggaaaaccagttacagggaggactaccacctattaaaagtatttttctggaaacagctggcgattaccctccaaaagtttaattaccattattgaaaacgcgtattggaactgccttggataatcttgggaagagggaaagaaaataaagccccaaggcctactcctccgtcccggtcagcaacatgaactcaggcctgggctccatgaactccatgaacacctacatgaccatgaacaccatgactacgagcggcaacatgaccccggcgtccttcaacatgtcctatgccaacccgggcctaggggccggcctgagtcccggcgcagtaaccggcatgccggggggctcggcgggcgccatgaacagcatgactgcggccggcgtgacggccatgggtacggcgctgagcccgagcggcatgggcgccatgggtgcgcagcaggcggcctccatgaatggcctgggcccctacgcggccgccatgaacccgtgcatgagccccatggcgtacgcgccgtccaacctgggccgcagccgcgcgggcggcggcggcgacgccaagacgttcaagcgcagctacccgcacgccaagccgccctactcgtacatctcgctcatcaccatggccatccagcaggcgcccagcaagatgctcacgctgagcgagatctaccagtggatcatggacctcttcccctattaccggcagaaccagcagcgctggcagaactccatccgccactcgctgtccttcaatgactgcttcgtcaaggtggcacgctccccggacaagccgggcaagggctcctactggacgctgcacccggactccggcaacatgttcgagaacggctgctacttgcgccgccagaagcgcttcaagtgcgagaagcagccggggccggcggcgggggctggagcggtagcgggggcagcgtcgcccagggtcggccctgagagccgcaaggacccctctggcgcctctagcccaggggcgactcgcccctccatcggggtgtgctcgggaagaccgg

SEQ ID NO: 243277 - DNA, 880 bp, Homo Sapiens
  misc_feature (153)..(171): n is a, c, g, or t
  misc_feature (337)..(356): n is a, c, g, or t
tttgtacaaaaaagttggctcttaaagtcatagcatgaaaataattgaactgtcctattcttagtagtttgaaataatagtatttttgtatgttttgggtgtgtctatgtatgtattaacataacagttttcactgcctaggtgttcataatnnnnnnnnnnnnnnnnnnngttctgagtgtacataatattcaataataatctcccaccaggtgtcaatttagattgcatattcctcattactgttcccaactgggattttgttttcttttaaagagacagtgatcgtgtttttctaaagatgttttctttctctctttcaatatcttaactcacnnnnnnnnnnnnnnnnnnnngtcttaattattaattcaggggtgtttgtccactgttgtcaaaggaggggcacaaggggaattggcccccggcctcctagaactttttgttttatgtactttaaaatgtgagtttgagttcttctttgtggaaacttaagatgtggtgtaaatgattctttccaaaattgtccagcagcttgaatgaggcagtgacaattctgaggtggtttattgggagtccttctacatttctcttaaataactctgcactctgggtggctattgtgtagccttactgccccagagtgcctgttagccaaatatttcccctctgataggaatattttctaagaatcagctgataacttgcgtgctggaccttgttatctgtgcccctgggagacacacgttttcttggttttgaaaacctgaaacacaggcaactttacattttggggaattagctgatgcctcctgaaaccctgaggaggtggcggggaatatgagcggtgttgtctctctcaaaagtgccctttagatga

SEQ ID NO: 243278 - DNA, 831 bp, Homo Sapiens
ttggaatttatttaccaaaacgaagtctaacagacactttattctgagcaatccaatgcatgatagaaaaacctttagatatataaaagattaatttgtgcacatctaaatgtttctaagggaacaaactactgaggcattgtgataagacgagagttgcaaacatagtaccataactgaatatttaaaattacatcttaacaaaggctaggagtagtgacttcctcacacacctcagagaatgtcttagagagtaaccccatagaacattgtatggcttcaacagaaacttcaggattttcttccacactgagctactgccctcaaacaaactttctcactccttgacactatcttctgtgcaaatttctgttctttctcttaatcaaggagctttgagaaacaatgcttttgccccaatgaccccttggttcccttaactacagatctataggagaaatgcaaagcagttcccagaagtcagaaccaaagcaagaatgttcagagtgcaagagctagagagctaaatcatgtgaatgtttacctctgtctacctatctgcttagggattatttttctaggattcatctaggattctatttacttggggtgaatgtacatggtagcttttccctagcacatgcaattaaattaatttgtcttttaagataataaaatagcagatacctaaatatcagagtggttatgcagcctacagaacagctgaaacaaaatcattgggacaaatgcccataattttcatgtaggaagatgaggcttcaaacagcataccacctgagtagttttccatagatgagctggacaagccaa

SEQ ID NO: 243279 - DNA, 452 bp, Homo Sapiens
gaacccttttctctcccacattcccctgggagcagaggataggcctgatgattgttttaaacagtagaaagggttcagctaagaactacagtccactctcagccctgtcatgtactataggacaagtcttcattcacaacaaatggatagcaacaccaatctcgtaacactgggaaaactgcatacaatatttagaaggaacactaatacagcagaatctgcacacaacggagtcaaagatctgaggccaaatcctactacactttacgactttgagttggtcacttttctgaaccttagcttctccatcagtgtaaaactgatgtaaaataatataaagctatatgaaagctgatgtgatgtacttgtgaaatagtatgtgcaaaaggactttgtaaaatgtaaagcactatgctggttattgtgatatctgagatatttttaaagttgca

SEQ ID NO: 243280 - DNA, 823 bp, Homo Sapiens
  misc_feature (330)..(517): n is a, c, g, or t
ttgggtgaattggatttctgtcccttaacactgaacaatttaaaatgaaattaaccaaggtaccccatttctataataccatcaaaaaatgaaatacatccgaacaaatttaataaatgcaatacttatgcactgacaactacaaaatgttgagagaaattaaaggtctaaataaatggaaaggaattctatattcatggattgaaaaacttaatattctgttttttcttttaagtacagggatgcaagttcaggtttcttacataggtaaacatgtgtcatgggagtttgtttcatcacgcaggtattaagcctagtacccattagttnnnnnnnnnnnnnnnnnnnnnnnnnnnnnnnnnnnnnnnnnnnnnnnnnnnnnnnnnnnnnnnnnnnnnnnnnnnnnnnnnnnnnnnnnnnnnnnnnnnnnnnnnnnnnnnnnnnnnnnnnnnnnnnnnnnnnnnnnnnnnnnnnnnnnnnnnnnnnnnnnnnnnnnnnnnnnnnnnnnnnnnnnnnngttgaacaaacttgcattagttgtttttcttgatcctctccctcctcccacccttcatcctcaggtgggccccagtgtgtgttgttcccctctgtgtgtccatgtgttctcctcatttagctcccccttataagtgacaacatgtggtctttggttttctgttcctgtgttagtttgctaaagataagggcctccagctccatctatgtccctgcaaaggacctgatctcattcttttttgtggctgtatagtattctatggtgcatatgtaccatgttttctttatccagtctatcattgatggg

SEQ ID NO: 243281 - DNA, 950 bp, Homo Sapiens
ttcctatcagttatgttatagtgatattaattaaagtggtagagccaaccaaggtggtatgtttcattctcactgaaaaaccttgggtaatctatttatagagggttttataagtatctgtaatctcaggttaaaaaggcctcactctgtttctccttaggaattctaagaattcctcgttaggaatttcagaacagcccttctgaagtatcttctcctggggcacttcatttttccttttggtctaagttacttattggaagctattttaagtgccagggcagggctctgcagaaattttctgaagtattaaataagaataaatcttatctttcaaatttcctttgcaatcaacctccccaaaatgagctttacaaccactaattgaactccaattctttttgtaaattagaatactgtggtggcatcattgcctcatcagttacaagggtcaagtgagtattataaacttcagaccttcacagtgcataaaggatcatgcaaagctaatctttaaacgattatagacaaatgtattttattatcatattggcatttgtattagttgctattcctaccaccatgtctatacatttatattatatgcaaaagatccacataaaccatttgtgtatgtttcactattcgaacaggccgcagcaactgtaacagctgcaaaagtaattaaaatattacttgggtattactaattgttctgtagacaaagataaaatctgaagatcattagcaaatacattacctttaagctgagttgctaatatggaacccttacatatatacccaatactaaaataaagctaactctgttttaagattctgggtcatatagcccattctaaacaaaatgttcaataatcaataaatcactcattgataggttaacaaagatattcaatgctgaatgtctgagagttaaagccaactttttt

SEQ ID NO: 243282 - DNA, 930 bp, Homo Sapiens
ttggcctgagtctcgaggaggccgcgggagcccgccggcggtggcgcggcggagacccggctggtataacaagaggattgcctgatccagccaagatgcagagcacttctaatcatctgtggcttttatctgatattttaggccaaggagctactgcaaatgtctttcgtggaagacataagaaaactggtgatttatttgctatcaaagtatttaataacataagcttccttcgtccagtggatgttcaaatgagagaatttgaagtgttgaaaaaactcaatcacaaaaatattgtcaaattatttgctattgaagaggagacaacaacaagacataaagtacttattatggaattttgtccatgtgggagtttatacactgttttagaagaaccttctaatgcctatggactaccagaatctgaattcttaattgttttgcgagatgtggtgggtggaatgaatcatctacgagagaatggtatagtgcaccgtgatatcaagccaggaaatatcatgcgtgttataggggaagatggacagtctgtgtacaaactcacagattttggtgcagctagagaattagaagatgatgagcagtttgtttctctgtatggcacagaagaatatttgcaccctgatatgtatgagagagcagtgctaagaaaagatcatcagaagaaatatggagcaacagttgatctttggagcattggggtaacattttaccatgcagctactggatcactgccatttagaccctttgaagggcctcgtagaataaagaagtgatgtataaaataattacaggaaagccttctggtgcaatatctggagtacagaaagcagaaaatggaccaattgactggagtggagacatgcctgtttcttgcagtctttctcggggtcttcaggttctacttacccc

SEQ ID NO: 243283 - DNA, 745 bp, Homo Sapiens
tttgtacaaaaaagttggcgggaatccccttcaaaaaacattcctctttgcactatatcaaccctatgggcaccaacgaatatctgtcggccatctgggctgttgggcagatcattcaggactacgacagtgataagatgtttccagctctgggattcggggcccagttacccccagactggaaggtctcccatgagtttgccatcaacttcaaccccaccaaccccttctgctcaggtgtggatggtattgcccaggcgtactcagcttgcctgccccacatccgcttctacggtcctaccaatttctcccccatcgtcaaccacgtggcccggtttgcggcccaggccacacaacagcggacggccacgcagtacttcatcctcctcatcatcacggacggggtcatcagtgacatggaggagacacggcatgccgtggtgcaggcttccaagctgcccatgtccatcatcatcgtgggcgtgggcaatgcggacttcgctgccatggagttcctggatggggacagccgcatgctgcgctcccacacgggggaggaggcagcccgcgatattgtgcagttcgttccctttcgagagttccgcaacgcagcaaaagagaccttggccaaagctgtgctggcggagctgccccaacaagttgtgcagtatttcaagcataaaaaacctgccccccaccaactccggagcccgcctgagctccagtgcccagcagcagcatgtca

SEQ ID NO: 243284 - DNA, 1398 bp, Homo Sapiens
  misc_feature (1181)..(1195): n is a, c, g, or t
aaaatctgagcttacatactggcaggcagactgatttaagtcacagatacattcattctggtatctcttattatcagcagcattcacagaacagctgactaggcttagagtttaatctgtagagaaagcagctgactacttcaatctcatgaataccatttctagcccaatggttaactagctaatctaagtggctcagcaaaagagataagtacttacagtggagtacctccaaataatttccaaatttccatcggtcaggtagacctcataagaaatactgtcacaagaatatcatcaaaatacaagttaatacgaataccactggggttattaatgatgcctcccataattggaaagtagatataagaagcaggagctctggaactaggaaagcaacaaaacacgctttctagatacttaccaataatgtctttaacaagtttctgagtggcagccattcgaggctttgggatttccagtttttcacactcatgatctgactgatgacggtgtctcaggcaaaaattcttctcacaataaggacatataactgccacaagttctctctcagcacagtctttgaaagagcatgggtaagatgtatgttgatctgtcttcagtctctcattgattacagtcacctgaaaatgcaaaaaggaggaaatgtattacatttcagacctaaaacaaatcaatgtgtcttattctagaaggcagtattcattttatttttgcttaaacttattagagcaagttacttactctcaaagattataaagaatgttttatgtgacaaatgattactatactgactgttccacactttcataattttcctactgtggtatatttgtcttctaagtcaagttgaaatgactatttaattacgctctataattttaacctgctttgtaacagtctcatacaaaggtgcccctatgatatgctcaggtaattatctcatcaaccctcaaatggcaagtcaacctaatttccacactaattttaggagatgaaacacttaactcagagaataaaacacttaaaaaatatttatttatttgtgagataaaaggttaaagacggttttcataatcatatattattctctatgccctatttcatatttttattaccagcaaatactccactacaggaagaaagattttataagactnnnnnnnnnnnnnnnttctaaatcagccaggctattctgagcattaacaaaccaggtttctaaagacgagtaaacgtagggaaataattgcttgaaaactacaaccaaagggaattcctttttataaataatagttacaccttgttggaattaatttaagtatctttttgaacttgttgcaatggcctaatgatgtttcaatatttaattaacgccaa

SEQ ID NO: 243285 - DNA, 1094 bp, Homo Sapiens
  misc_feature (104)..(144): n is a, c, g, or t
  misc_feature (295)..(347): n is a, c, g, or t
acttctgcctgttttaaacgagtttctcaactccagtcagaccaggtcttgctggtgtatccagggacagggtatggaaagaggggctcacgcttaactccagnnnnnnnnnnnnnnnnnnnnnnnnnnnnnnnnnnnnnnnnnttgctaagggcaaatgaacgaagcgccaaccttcctttcggagtaatcctgcctgggaaggagagatttttagtgacatgttcagtgggttgcttgctagaatttttttaaaaaaacaacaatttaaaatcttatttaagttccaccagtnnnnnnnnnnnnnnnnnnnnnnnnnnnnnnnnnnnnnnnnnnnnnnnnnnnnnaaatccattttaaagagaagcagactgactttggaaagggaggcgctggggtttgaacctccccgctgctaatctcccctgggcccctccccggggaatcctctctgccaatcctgcgagggtctaggcccctttaggaagcctccgctctctttttccccaacagacctgtcttcacccttgggctttgaaagccagacaaagcagctgcccctctccctgccaaagaggagtcatcccccaaaaagacagagggggagccccaagcccaagtctttcctcccagcagcgtttccccccaactccttaattttattctccgctagattttaacgtccagccttccctcagctgagtggggagggcatccctgcaaaagggaacagaagaggccaagtccccccaagccacggcccggggttcaaggctagagctgctggggaggggctgcctgttttactcacccaccagcttccgcctcccccatcctgggcgcccctcctccagcttagctgtcagctgtccatcacctctcccccactttctcatttgtgcttttttctctcgtaataaaaaagtggggagccgctggggagccaccccattcatccccgtatttccccctctcataacttctccccatcccaggaggagtttctcaggcctggggtagggccccgggtggggtgcgggggcgattcaacctgtgtgctgcgaacgacgagacttcctcttgaacagtgtgct

SEQ ID NO: 243286 - DNA, 906 bp, Homo Sapiens
aaataacacaccccaaattctatcaaaatattttggtcagagttgatgaacttcagaggtatttcaaaatgtcgacaaatcttggataccctttgacatataaattagccacctgggacaatattgatctcttttgcataaaatactgggtattctgttacagcaaaacttttccaggaaaaaagaagggacttgagcttcctttgtcctcttaaaattaggaaagggtctagataaagcaaaagtgcaaatctgtaggagatggctaaggaaggagagatagagtaccaccactgggggctaggtgtgttcatatacttcattttcttttgccatgccatcccacatagctaacaccaaggcattttctgaggcccctttctcatttgctctgtttggaattagaaaagttgctactctcagtgtctggtataacccagtttccccacgtgatcttctaccaagtcaagcatcctctgggcatctgccaggctcgtcagccaggctcctgtggtcctttgccttccctttcctaagagaccacacattaagtcactgttcatcctcccctgaacctgctcccaatgttcgcgccctcgagagagcagaggcgtctgtcccaacttttattctgaaagttccagcaacaatgaaccttgcacagttcactcagtgaaacaaaataatgaagaacatagatggcctcttgtggtcagcaaagccgagattttctcttttgctctcaaatgctgtcttgcaaaatttcacaagtacaaacatatgttatcatctgaccttttgaaaactattctgtgtatatataaattcacttaaagtgtactacaacttgtggctcctaaagctcactttatgctatttatatctttttgttataagaagacccaa

SEQ ID NO: 243287 - DNA, 902 bp, Homo Sapiens
tcctctcccagccccattcagctccctctcagcccccacaacagttcagcctcagattttttcctggagcctcatggctccctcgtcatctgcacaataggaagccttgccccgtactaaacagggaaaggtgagctggccagtcatgaatgccctgagctctgcaactcacccctgccctgcctcctgctcgctcctgccttcactggcctgacactgctgtgcagacctcattctcctctctgcgctagcatcccctccctgttctcttcaccctctctccaggtgtgcccttcgtcgtacccatcacaattctctccagggaaaagcaaaaccataatgaagacaacaaaaatactctcccagggatagcaggaattgcaccaaacggcttccttgccagggctttagcgggttttgactgggcactgagggtggcgagtccctaggtttgaattgcaaaggcacaggtgcagctgtcgagcagaagagtgggtggttaaaaagtgggcagatctcttggtttgttactccaacccctttctggcatatataaccccctccagacacaccgctggagacttgagccttcgtgaagtaaataccattataaacccctgcctccgagcaaaacagcagaaaaccttacacacagaaactagcgatcagattcctccagcagctttggcattccctctaacttctgcccctctttgccaaattttctaaaagtactttcactgtcctacttactaacctcctgtaggctggtgttgggacccaccacatgtccattaaccagctcttatcacactggttactgctgaatttccaagtctaatggacacttctattgtgtcttaataacctctgcggggcactgactcatcactcttccccaa

SEQ ID NO: 243288 - DNA, 691 bp, Homo Sapiens
ttgggtcattggaacaggcccacggcccatgtttggagcaataaagggagaggggatctccctctgggatgatgcccaggctggtctcacagatcgaggggcactggctggtgatgggtgcccccaaaagacagagcagcgtcagaggagaggagagcacaggatgaggctgggagctcctgggtgactgggaaggggaggcaagaagaccatagggtccgtgcaccattcccagtccaggacgagtccttggatggatttaggtagattgattatcagagtcagatttgtgtttttggaaaaatcagcaccggattggaggctgatgcgacgcccgattagaggagggaggagagggggtgatggccaagtccagggtaggtggggatcctggaggaagccgtgccttggggatggggaggacactcagattcagagcacccaggggcccagtttcctatgaaatgggagcatgaagttgaagtgagggctgagcagaggggagcagacacgctcggggactgtctatgggcattaaaaatgtataaccattttagcaacaggcggcgagtcaaaaaacaaagtgtgtttatctaaactgggcaattccacttctaggaatttatcctaagggttggttgggggaataatcaaagctgtaaccaaatctttataacaagggtggttagct

SEQ ID NO: 243289 - DNA, 912 bp, Homo Sapiens
ttggcaatgaggctgccaccctgaagaggaaatgcgagttcccagcaaacgtcccagcgctaaggtccagtgataagcggaaggccacagtcagcccagggccacacgctggagaggcagagccgccctccagggtgaacagccgcacgggagtaggtacgcacctgacctcgctggcactgccgggcaaggcagagagtgtggcatcgctcaccagccagtgcagctacagcagcaccatcgtccatgtgggagacaagaagccgcagccggagttagagatggtggaagatgctgcgagtgggccagaatccctggactgcctggcgggccctgccctggcctgtggtctcagccaagagaaggagcccttcaagaagctgggcctcaccaaggaggtactcgctgcacacacacagaaggaggagcagagcttcctgcagaagttcaaagaaataagaaaactcagcattttccagtcccactgccattactacttgcaagaaagatccaaggggcagccaagtgaacgaactgcccctggactaagaaatacttccggaatagattcaccttggaaaaaaacaggaaagaacagaaaattgaagtccaagcgggtcaaacctcgagactcatctgagagcaccggatctggggggcccgtgtccgcccggcccccgctggtgggcttgaacgccacagcctgatcaccctcagacacgtcccagtccagctgcccagccgtgccctttcccgccccagtgccagcagcttattcactgcccgtgtttccagcgccagggactgtggcagcacccccggcacctccccacgccagcttcacagtgcctgctgtgcccgtggactccagcaccagtttgcagtccagcccccacctttccctgccccttt

SEQ ID NO: 243290 - DNA, 847 bp, Homo Sapiens
ttggcccaaggccgcggccccgacgctgggcccgggagcggtccccgcgcacagcgcccggacgcgtaggtcccgaagtaggcccgcgctttgcttcgtaactggggatctctgaggacatcttagttctgaccttgtggaggccgcgtctctgctgcgtgttcgcgggccagtcgggccactttgtagaaatcatagccctctaaatcaagggacgaacgctgctggctggagtttgctggacactttcattccacctcctaacaaagagaattcctattccttgaggtcccttggggcagcagttaaagactacacgatccaggagcacctaggacctggggccaccttcctgcccgctttattggatggagcactgcctccccagtttctgggacaccttggggtgtggccttggtgagtgaaacttggggtgctgcctgctgggaaggaaatccggaaacgcagagaggactctctggtggtgacccaggccttgtcagatctgagattcttggaatctcagattgtgggggtgtggatggtgaatgaatttgggtatgcccccctttaccccagaactgaagaggaagcaaactacttgccacacttgaggctgcatgactattcagagaagggaggagccacttctgaattcagagtaggactgcatcaccaggcaaatacctgttctgagccagaaagactctggcttctgaggagatcctgagagtctgagtagtgccaggaagcagcctcagaatttgggggcccattacacaccccagccatgttcctgcgacggcttggtggctggctacctcgcccttggggccgccggaaacca

SEQ ID NO: 243291 - DNA, 638 bp, Homo Sapiens
cagacgtttctgttcttctctctctctccttcccacatcaaccacaaacgccatcgacctcctctgggttcccatgacagaggccacagttcaggtccccctcgcatcactcgaatttactgtcaaatgctccccgctggggtctcctggagtctctccccaagccagggggcttcctagtgcagcctgaacatctttccaaagcacgacaacctcactgcccacctgaacaacttccttagctgatgcctttctctatcgaggccagggtccacagtgtcaattctaccctctctacaatctctacaagcacactggctcgccatcttggtatttcctggctcggcttcactgctccttccaaatgccctccactcgactttgtgtttgtgttttctgtctgggtgtcccgcacacatgtggctctgaagggaaggacccattccttgaaatcagttcaccccacagcctctgtgatgccttccctcatcttccaacttctgcatgcccgtagctctctagttacatcctggacactgggattaggtcatctgccttgattactcccagtcccattagactagatgcctgtagaaggcagggtcctggcaaaatatcaatgtattcaatttctttta

SEQ ID NO: 243292 - DNA, 1507 bp, Homo Sapiens
ggtgcagaaaaataaatacgcatcatagttttaattaggaaagtaagggctttgaatcaaacccagctttgtatctcacttcatctatttattcatcatgtgacaatagacagttgagttaacccttctgactttagtttccccatctttatcatggagataatgagaccttcttcattggatattgtgaagattaaactggatatgattatatatcaccttgcacatagaggctctcaattaaaaaaacacttctctttcttctattctagcatatcattcatggtccaatcctgcattacagttggttgaatgcaggtctgtttctaggcagcacatttttgaaggcaaagttgttcatctctgtatttcctgtagaacctagggtgatgagctgcatagtctggaggcacaggaactgcatattatactaaattgagagctgagccaggatggccaaggctgtgaagcaattatccatggatttggtcatttgggctcttttggtagtatagttcctctcatgaatttccactctggtcttaaaacagcccatcatgtttttaaattagcttgcacaaaatacaactaatttcctagattctttggcaactgatcagaatactattctatgtctcgctatagaaactcctgcaggcatattgactataccctgagaaagacaaaactaaatgcactacatgatgctgggaaaacaagttgtgatgaaaacagtgctgagtcaaataaatatagattattaactccagcttgcccttgactggtcatgagaccttggacaagctacctatgctcattaagcctcaatttaacttcttgacatctcaactataaaaaacaagggtattttttgctttgtttggtaattttgaggaaaaacaacaacaaatgagagataattctactttagttgttacacagggttgttgggtagagaaggaaggtgatgccttggaacagactttaacaactgtgaggcaggataaaaaacaagtcctgaaagccatcactttttgaccatagtgagctcttcttttgtaacggttcaggcttctaaccttatttcctcctttggcaactgaccagctcacgcacacatactagtgatgaaatccacataactccatatcttttcctctacatggccaagagtttcagtgcaacaggaaagtgctgtcacggatccatcgtgcaacacatacagtgctgtaaagcaaaggcctcgtctgcctgcaggcagcaggaactgcacgcattacccttctgtctgatgtacagcctaactgcttcgtgcttcttctcatgtgttgagccacagctttcttgtagagtatttcaaaaatacagccccaaaacaaagcataatcgaaagtcatcccaggtgaaagtggttggcttgggggaggtcacacagtcctttcagttcaggtagaatccttgtttctaggtcatttgaccaacatcatcccaggctccttagggccaa

SEQ ID NO: 243293 - DNA, 1016 bp, Homo Sapiens
acaaaaaagttggagatgagtgtgtcagaaagcctgctcctacctctcgccagctgcgtgactttaggcaagtcacttaagtaccttatttcagtttcctcacctgtaaattgaacaggggttgaatggaataaaaagccctttgcaactctaaaagtcaattaacacacttactaaggtgttttaagtgaccaggaaggaaatcagaactaacctggattgttagcgaagaaaacagaagccaccaacaagcctatctgtcctttgcaattttgctccaagagcctattagcaatttgaattctgagcctctaagaaaacttatgctcaggtggcccctccaagtgttggtgccagagcactcttgccttgtatcctcacctacgccttccatgaactcatagcagtgctgtggcactgcaggggtgttttatgcattcacgttaggagcatgagcagaactgcatatgccagcaccacatgggcagcagagactccccactgccagatggatgataatggagctgcactgggaacaaccaggactgtcccagtcaacatgatacagatgaacatcctgccttaagtcactagctctctccaaagccagataaagtgggtttcttcacttacatctctctaatcttggctgccttattcaacctacagactctatgtcagtgctggattttctccccttgccctttaggtaagcagagtaggcaggaggagatttgaaagcgtgtcatacatattgccttgaaagaaaggacattcaggtgtcccttcggggttctgtaacaattaggctatgtgtgctgagagagggagcggagtcatttgctgatgtgctgctacctgtaactcaaatgcctcataggaataccagcggacaaacacatagaggaaaagttgaatctttcctatattggacaatcttccttcagtcttgtttctgcatcaaaaagtctgggacacagagtgctacaggatgcctgggctaaggactgtaacag

SEQ ID NO: 243294 - DNA, 1122 bp, Homo Sapiens
  misc_feature (465)..(474): n is a, c, g, or t
ttggaattaaaagcttttggtgaattttgaatgaagatagtaattagaatggtcttttgtattctgaatcagattaataaacatgtagttaaatgtcagttgagtgttcaaagctaagttagaaattaccctgtcctaagtactgtgaaaaatacaaaaactaccttttataaacatgatctgtcctccatgttctcacattgtagatatctgggaaaaagaaaaataatataaactaacagaatacttaaataatagcttgacagtaatttagaagagacaaaacctattccagtattgccatcctaatgttgtataattaaacatacatgatttataactttgaaataaattacatgatttttacaatttcaaaatcaattgcatatcatggcactattggaggtaagtctgttatttcccatgtgcactcatttggatgtttaaattctgatatgttggggnnnnnnnnnngcctataatgacttcatgaagcaaataattttaggaatttagaagagggaagttctcaggatggattggttagggtaagagttaggtagagaaatcgagatttgaagactggggaagatgtagggcgagtttatttggattgcattggaggcagagagtaactccatttggccgatgggggaaaatggtcaagggagggaagagaataatgttggtaaattggataaaggttatagaggggcatgaatacctgtttggagatttatcctggaggcactgagaactactaaagagcaatccaagcaatgtgctggaggattaacctgctagtgataataaaggattagatagaaagggctctgcctctcttgcctctgaggaagctgttttaatatctaagtgacaagaacttgaatttggatgagggcaatgaacaattaaaggatggatttggggaattctttaaagtaacaataggacttcttgacagattggattggtggtggtggaatgcatgggtgctggtgatatagcactagaggtagaacgggcagtcaagattagagctggaagaaagtggaaaagaagttggaaaagagagggcttttgtaaggaagaatttaattttattatggttaattgaagtgg

SEQ ID NO: 243295 - DNA, 1505 bp, Homo Sapiens
  misc_feature (705)..(717): n is a, c, g, or t
  misc_feature (904)..(920): n is a, c, g, or t
  misc_feature (1154)..(1192): n is a, c, g, or t
ttggagcgtctgtcccgctggaaggagaatactccctggacctcatcaggccacggattgtgtgaatcagcagaaaataggactttcctaagcaaaacaggaaggaaagaaaggatggagtgtgaaacagatgaacaaaaacagggctctgatgagaacatgtcagaatgtgaaaccagcagtgtgtgtagcagcagtgacactgggctctttaccaatgatgaagggcgacaaggtgatgacgaacagagtgattggttctatgaaggagaatgtgtcccaggattcactgtccctaatcttctgcccaagtgggctcctgatcattgttctgaagtagaaagaatggattctggattggataaattttcagattccacattccttttaccttctcggccagctcaaagagggtaccatactcgcttgaatcgtctacctggagctgcagctcgatgcctcagaaaggggcgaagaaggctggttgggaaggtgatacctctcacagttagcttggctcagtggggagataatattccctatgggagttgtgtatcctattaacaatcagaggtgctacagaactccctgaagttaatggagccaactggaatgtgttgggagtttacaagagtgaacattatgtagaatgtgaatggatatacaaataaaagatgaaacgtaattcatatagaagtactgacnnnnnnnnnnnnntactgtcattacagtgtctattgcctgtaaacctacaagcctgagctgtgtcttctgtaacttttgattaatgttatgttattattgtgtaagttaaaatactcttggcttctttatgactcctcttgaattcatgaatgcatctttgttctttcctaattttggtctttcatcctagaattcattnnnnnnnnnnnnnnnnnctgttactgagtttcaagagcccctccttggccatgagggagaactatctgctgtttattcagttctgcctttgccagggatggtactagggactcagctcatttaatccttccagcaacctacaagggcaagcaccttcagcagatgaggaaaacttaggttcgaagaagttaaggaatgtctgatgttacccagataggaatggtagaatagagatttgaacccaggtctannnnnnnnnnnnnnnnnnnnnnnnnnnnnnnnnnnnnnnctctactttgagattgaggaataaattaagacagggctcatcctcagtcagagaagatggtggtgggcaaagaataaggaagggagaggcattgagagcattaatttgtttgttcacttggtaagcatttagaatgcctgctaggtggcacaatatgtgccacagtctggcttcccttaaggggatactgttttatagtctgaccagggaacagttttctgaagttttaagcatgcaaaagaaatgagactgtttatttccagacgagcccaagattcttatttctttttatctttaaattcaagttcaaatc

SEQ ID NO: 243296 - DNA, 562 bp, Homo Sapiens
cagagaagggaaagagccttcattctttaggtttgtttttgcctcaaagacatttctatatgggtatctaaagttttagtttataagtctcataatgatttgacccatgcagtccaacttttagatagtatttccataccccccaaaagctggcaggtggtagtcgcactagattcagaccaagactctccgcattgtcatcctaggtccttctaatgaagaagacaatactctagtttatttaacaaataaaggagtctaagtacatggaagttaagggagtaagggtgggggtaatgagattattacattaaaataaagacttcacacacgtgtgtcccatgtctaaaattgttgaaaatctgattggagaagattagaagtaattagcaactcaattatttataaacaaatataaaaatgcacaaaccaaatgatgcaaaaaaacctttttaatctaaaaattcatttcccagggctaattgatagccaggccctaccaatttttatcagtttatttgactaacaagagctattcagcattttcttcaaagtaagccaa

SEQ ID NO: 243297 - DNA, 1165 bp, Homo Sapiens
ttggcgcgccgcatggaggccggctgaggagcgccgctgcctcgcctcggtacgccgcgcggcgcggacggcgcgctccccacaggtgcaggaagccgccgcccagccatggacggggaggagcagcagccaccgcacgaggccaacgtggaacctgttgtgccgtcagaggcttcagagccggtgcccagggtgctttctggagacccccagaacctgtccgacgtggacgccttcaacctgctcctggagatgaagctgaagcggcggcgtcagcggcccaacctgccgcgcactgtgacccagttggtggctgaggacgggagcagggtgtacgtggtggggacagcccacttcagcgacgacagcaagagggacgttgtgaagaccatccgggaggtgcagcctgacgtggtggtcgtggagctctgccaatatcgtgtgtccatgctgaagatggacgagagcacgctgctgcgggaggcccaggagctcagcctggagaagctgcagcaggccgtgaggcagaacgggctcatgtcggggctgatgcagatgctgctgctgaaggtgtctgcacacatcaccgagcagctgggcatggccccaggtggcgagttcagggaggccttcaaggaggccagcaaggtgcctttctgcaagttccacctgggtgaccgacccatccccgtcaccttcaagagggccatcgcagcgctctccttctggcagaaggtcaggctggcttggggcctgtgcttcctgtcagaccccatcagcaaggatgacgtggaacgctgcaagcagaaggacctactggagcagatgatggccgagatgattggcgagttcccagacctgcaccgcaccatcgtctcggagcgcgacgtctacctaacctacatgctgcgccaggccgcgcggcgcctcgagctgcctcgggcctctgacggtgacggccgcccgcaggcgtgggaccccctgtgaggctgaggcccgagcaggtactgaccccttgtccttccccacagccgagcccaggaagtgcgtcccctccgtggtcgtgggcgtcgtgggcatgggccacgtgcctggcatcgagaagaactggagcaccgacctcaacatccaggagatcatgaccgtgcccccgccgtccgtctcc

SEQ ID NO: 243298 - DNA, 400 bp, Homo Sapiens
ttgggggatgcttttagttatattcagtaattgttaactgtacccatgctttttaaagttactgaacataactaaaaataactgaatatttctacttatatttagtaattgttaattattaataatatttagttatttttagatatattctaattgttcattatagccccccaaaaagacttatttatacatacagggactatgcaagagtacctaactttcctctaatggttgttccattgtttcttttaaccagatactcctgcctctctatggctgagatccagcaattatatgtatgcagtcatttagaccataaagcaggcgacattaaggctaccagcctctattacagagactcctatatttggaaatttgattaggtgggcttaatttgcat

SEQ ID NO: 243299 - DNA, 1539 bp, Homo Sapiens
ttggataagaactgaagcttctcagatcagaaaagataaatacatggctaatcttccatttacattaattctggctaatcagagagattccattagtaagaatctaccaattctcaggcaccaagggcagcagttggcaaacaagttgcaatgtccttttgtagatgtacctgctggtacatatcctcgtaaatttaatgaaacccaaataaagcaagctctcagaggagtattggaatcagttaaacacaatttggatgtggtgagcccaattcctgccaataaggacttatcagaagctgacttgagaattgtcatgtgcgccatgtgtggagatccatttagtgtggatcttattctttcacccttccttgattctcattcttgcagtgctgctcaagctggacagaataattccctaatgcttgataaaatcattggtgaaaaaaggaggcgaatacagatcacaatattatcataccactcttcaattggagtaagaaaagatgaactagttcatgggtatatattagtttactctgcaaaacggaaagcttcgatgggaatgcttcgagcatttctatcagaagttcaagacaccattcctgtacagctggtggcagttactgacagccaagcagatttttttgaaaatgaggctatcaaagagttaatgactgaaggagaacacattgcaactgagatcactgctaaatttacagcactgtattctttatctcagtatcatcggcaaactgaggtctttactctgttttttagtgatgttctagagaaaaaaaatatgatagaaaattcttatttgtctgataatacaagggaatcaacccatcaaagtgaagatgtttttctaccatctcccagagactgttttccctataataactaccctgattcagatgatgacacagaagcaccacctccttatagtccaattggggatgatgtacagttgcttccaacacctagtgaccgttccagatatagattagatttggaaggaaatgagtatcctattcatagtaccccaaactgtcatgaccatgaacgcaaccataaagtgcctccacctattaaacctaaaccagttgtacctaagacaaatgtgaaaaaactcgatccaaaccttttaaaaacaattgaagctggtattggtaaaaatccaagaaagcagacttcccgggtgcctttggcacatcctgaagatatggatccttcagataactatgcggaacccattgatacaattttcaaacagaagggctattctgatgagatttatgttgtcccagatgatagtcaaaatcgtattaaaattcgaaactcatttgtaaataacacccaaggagatgaagaaaatgggttttctgatagaacctcaaaaagtcatggggaacggaggccttcaaaatacaaatataaatctaaaaccttgtttagtaaagccaagtcatactatagaagaacacattcagatgccagtgatgatgaggctttcaccacttctaaaacaaaagaaaa

SEQ ID NO: 243300 - DNA, 997 bp, Homo Sapiens
ttggcgcctcgctcctcttcagggactttgctgagaagggctctcgggcgtccagaccccaccgcaaaggtgtttggcgatccgccgagaagttgttggccccaggagcatccctcggggccgaatgcgcagtggacgatgccccttctgacccaacagatccaagacgaggatgatcagtacagccttgtggccagccttgacaacgttaggaatctctccactatcttgaaagctattcatttccgagaacatgccacgtgtttcgcaactaaaaatggtatcaaagtaacagtggaaaatgcaaagtgtgtgcaagcaaatgcttttattcaggctggaatatttcaggagtttaaagttcaggaagagtctgttacttttcgaattaatttaactgtccttttagactgtttatctatttttggatcaagtcctatgccagggactttaactgcacttcgaatgtgttaccaaggttatggttaccctttgatgctgttcctggaagaaggaggagtggtgacagtctgcaaaatcaatacacaggaacctgaggagaccctggactttgatttctgcagcaccaatgttattaataaaattattctgcagtcagaggggctccgtgaagcattttctgaattggatatgacgagtgaagtcctacaaattaccatgtctcctgacaagccttatttcaggttatctacttttggaaatgcaggaagttcccaccttgactatccccaaagattctgatttgatggaagcattttcattgtaatcagacccaagtcaacagatacaagatttccttactgaaaccctctacaaaaggcattagtcctatcttgtaaggtatctattcggacagataacagaggcttcctttcattacagtatatgattagaaatgagatggacaatatgttttgtgcaatattactgctgccctgatgaagaagttcctgaatctgagtcttgagtatgacaa

SEQ ID NO: 243301 - DNA, 926 bp, Homo Sapiens
caaaacaaaagctggccgtagtcaagtcagtgatgatttggattgaaattaaaatgtgactaaagagagagtatgcagttttgtctatctatgaaaccttcctctgttttatgtgggacacctgggcacccactcttggctggaacttacataaaacactactgtgcacgcacatgtcacctcaagtcccgtggctctgaaagtccagtagaagtgacagccagacatcccagtcctccctgtagggttttctcagaactgttcctttaaggtctcaggctgctggaagggagggctgatagcagaaaaagtggggacactgggaactccaaagggaagacgcgcatggcctgaaaccgagttctttcgctttctggagcctggtctccctatgtggagggtcatgctggcatggctggcaatggttaattcaccgatggccatggagtcccaagttggccatattattgcggtaaaagatacattaacccagatgaccttgccgggggccagaatagagcccgtgaggaaggagagcaaggcaggatcggccgggaggcgagagggattttgttgaggagcaaggtcttccacaggaactgcgacttggaaagtattcaccaagggctgtgccatgcgaaaccctctttaaaggaaccgcatcgctacgcctaacgggcatttcttttttaatgtaatggttcagagctattgtctaccacgcctcgcgtgcacacgcacacacacgcaagttccctcagtcagccgagaatcctgccatctcttttagataacaaaagctcttagccttatgctttgggtaggatttgtcttccatgggacaggtattcagttggaaacaagtatatagtcactgccctctatggtatgggagatactccgatttagtccctctgcctcttggg

SEQ ID NO: 243302 - DNA, 2350 bp, Homo Sapiens
cactgtcatcatctacttgcagaattgccacctctgtggtggatgcattcgatatttctagctgtaatggccccaactccagggaactacatttagaagggtcacctggctcagagagtggagaacacagtttatctttttgaactccagaggtccgtgtgacaaagtcaacaaggtctggaaggcaaggagatggcccaaggcctgcagaattaattgtttttaattccaatccgagtgactcttgtttgtctaattgggaagattcttttacttcctcaggcatcattcctcctgctaacaggtcaagggcctggtgtgttccctctaggccccccaagccacggtcaacattttctgtaagtccagttttcaaaatgttaggagaagggatcctaacactcctgggattaggtgagtttcgttcaccctctgtctcaaagtcaagcaccaaggttttgggagaatctaacggaaacccagaaaaagatgggattggttcgaagtcagcgggatcggaggaattacaccctataggtgatacagaattttcttcacacactttctgacacaagacagttggggatctatgtgctgggcttacccgagtagtgcagaaatcaacaggcatatcccccagattccccagggcagtaagctcctctacctttaagtctgtagcttcaaagtcttctagggccttgctttctattgtcactgttaactctggatggacatcttgtagctccagtgcttctgtttttggtttctctgggctctcccaggtctctggcctcttcttgttttcatcccaaacagccaactcatagatctttttaacttgaaagtcttttgatctttctctcttgagtttgagacttctgtacctagaagttctagaagctgattctggagctgaattctctagcccctcctcactaacaactgaaactccttgctcttgtggactacctgttaaacacatagctgatctggctggggaatgaagcagcaactctggggcagaaattttcacaggtgtatcttgtgggttgagtaaagacctagcttctgataaaaatgagtctaattttgcctttgtgaaagagcaagcctgtggactcaatttgatcactactttacttggagtttcacttcctgtcatcaatttattggactgttcagcctctttgtcaatcattagcaagttgggctgttttacttctccctcccacatgtatctgtttccatggttcaaattagaatcatctatgctgtggggtccaatgctggtacttgctccctcatcaactatcccctcagacagctcctttaccctttcttttagttcagtgtttgtctctatctcactttctctacaatcctcagatttacggagctcttggctttccttatcctggttaacagattctctgaggtggatttctaccaacttctgagattctttgcactgtatatctaacagttgaggaggtggttctacaccaggtggtcctggctctcccaggtcaagctcactcttctctggagatatatccctactagtgtcactctggaaggaactagaggtccatatggccaaagtgtctgtctttggggtaattgtttcataaggcctgctttggcacaaccttgtcagaggctgtaggaagccataggtgctgcctgtgctttttgggcctacatgttctacaactgaccatttccctagggccaccagagtttttgcaatgggcttttcagagttgctaactataggagcagcgaccaaaccctcatcttgatgcaactcctcttgggatgcactgctgttcaaaggagaagtagaagaggtgtctgaacttttggttctagagaggttgctattttccccattggccaatggaccaccacttagcttagtctcaggggcccccttagtctcaggggccccctttccaccactactatagaatatgtcatacaggtccttagcattggctgtggctaagcatgaatttcgcttctctaattttttggcttgttcactgaacacacttgagaggggtggtggaggacgtactaacacagagaacagggtctggtctcggtcactctcactcaccccaggagctgtctcatcagaaggaatggcagctggctgtgctgaggccatgatggctacaggcaacactgggttcaaaatgttaggacccacgaagccagggctgagagtctgagatacaactgggtttgattttactggagccaagatagcatttgcttgagcagcagacggggcagctggatgaggtataacggggggtggtggaggtggtggaggtgccaa

SEQ ID NO: 243303 - DNA, 1530 bp, Homo Sapiens
  misc_feature (1129)..(1137): n is a, c, g, or t
  misc_feature (1349)..(1360): n is a, c, g, or t
ggaaccgtgaattcactgcagttcaaacaggaagcatctccctttcctctccttacaggagtcatgtcctcaaaccaaggaatacatgaaaaggggggatttcctttttcttggtctaaaccaaagagcaatgacaactactgaataaaattcagagacacatgttgatgaatgatcaaattcaatcccctgatcagttgtatgatcctatcttaggaaaggcagcaattgccatgttgaggaaaggatcagatgtacaaccaacaaatgagattaccacaaatacatatcactgtgatacagtcctcaaaaatcaggcgatatcatgaaggccaaactgagtctatatatgtggcatggccaaaggaaacacggaggacccatggatgcattttaaaatgaaggcaggagaaggggacagcacagagacatacacccctgtatgtaaactaacataacatgaagataaataagacataaaggctagccacttacgttggtcattaacatgaataaaaaggcattatatgttgatatagctggttttaatcagctatggaacatacacaaatgtattaggaaggaatgattcttaaaaaaaccgttcacagcttagaataaaaagcatacttattgcactcttacatttgatttcaggtaattacagtttatttcccaccctcacattaatttttccctatcctagatttactgccacctcaccccattttggtctctgttctctacatctgtgcctactctgtgagctttgttgtttatgctagtttgcagtgacttccaactcatactccaccaaaacacacgtgggttcaaaaacttaacacaaaaatgcaacgcagtaattttcaaaacaaaaccaggactaagcaacttcatcaaaacccccaatcccacccgtcaacagacccttcctttgcggcatctcttcacaaattttctgccaactctcccgcatatgtgctgtacatgagaaccagcggtcacggtgctggagaatgaactcggctggccgggagaagcagatggtttgtacaaacattttttgatactaccatgaataaacatattttagttgttttcagagcacttctatctacagaattctttnnnnnnnnntgcacctctaaaaaatggatacactggcttacattggctgtgtcctcatacacactcgtcaagtcactataattattcaaaatagctaaataaatgtcaacattttaataaagctgatttagtaattaataaaacttaacagttgaagttgtggatgttaaataaaagtactttagtcactcattgagttgccgactaattgccccatgcannnnnnnnnnnnaaagcactgttaccttaatttaagattttaggagttgggtttctgtccttttccacattaaaaatacctgataggaactgttaattaccctttccacaattaacaaaaattagaattgaatttcaatttaaatgtctttgcccaaacaaaagtgaaaataggttatccaa

SEQ ID NO: 243304 - DNA, 1377 bp, Homo Sapiens
  misc_feature (1043)..(1139): n is a, c, g, or t
  misc_feature (1177)..(1227): n is a, c, g, or t
aacccagactgacttttctttagttccttatgtacactgccttttcccttatcactaggctttcaaacatgttattaacacctctgctcaggccacttacatttattctcttcctctaattctgatttatccttcaggttttcagcttaaatgtcacttctacagtagtgagttttttccagtccctatgatatccctccatagcaccttttacctcccattccatcacatgtgtaaattattcgttggtacttctgaatttcctttgagactatactatgagcgttataaaagcagggataatgttagtctcatataccattgtgcccccccaactgcctggcacgtggttttgcatttcgagaactgaaaagtatggtgacatcattaaacagaaatagagaattcagaaagtagagtggatttgggaagcccagcaaaacgagataaaaaataagaggtgtctggttatttacataattagtgaaaggcaaattggagaatagagtaatatctaattctacatttatgcaagaataactttactaagttttggatctttaaacaattaaaatatttactaatcccaagttgcaaacagtggttcaagtagaaaacaattttgtttggctggtttatttaatatttccacttcaagttcatttaacgttcaactaaatattcactgggtactcatgacatgacaggattatgctatataccaggcaatggggaaataaagactggagtttaaagattgttcaatgactatttctattaaatacatacatagatatgatggtgtattaactaagagagtaggctctggagtttgcctggatctaaatcctggttccatttcctattggccatatgatgctgggcaaattactttcattttttgtccctcgtttcctcatttataaaacagtataaaggactgttttgatattagatgagttaacatagaaattatttggcctaatacttggcatacattgagtacccaatgagtgctagtagttactataatatttatttannnnnnnnnnnnnnnnnnnnnnnnnnnnnnnnnnnnnnnnnnnnnnnnnnnnnnnnnnnnnnnnnnnnnnnnnnnnnnnnnnnnnnnnnnnnnnnnngaggcttgcctgggcaacatagtgagacccagttctcnnnnnnnnnnnnnnnnnnnnnnnnnnnnnnnnnnnnnnnnnnnnnnnnnnngaaatttctgttgaaaactaatataatgagaggttatgacatgtgtatgtgtagataagatacacatgcatgatataggtgtttatgtcatgtgtatatctatttacaaaatctccagttaaccaaaattgtaaatcttttgttagccaa

SEQ ID NO: 243305 - DNA, 820 bp, Homo Sapiens
  misc_feature (330)..(633): n is a, c, g, or t
ccagcagtttgctctgacagaataaaatacaaactattgttttgtttaatccctttaaccatcatgtcaggcacacaggttggagaatattagctcccattttatggacagagtggaaacactgtacccatatttagtgtaagacagagctgggatataagccttgggcttccatagtcacaactgcttttttgcataactttgtaatacatcattttaaagtaatctgatttcacaatgttttacagtataggagtaacatctatagcatctcttcttggcaggttacctctggagagaaccaatctaattacctcatacgctggcacnnnnnnnnnnnnnnnnnnnnnnnnnnnnnnnnnnnnnnnnnnnnnnnnnnnnnnnnnnnnnnnnnnnnnnnnnnnnnnnnnnnnnnnnnnnnnnnnnnnnnnnnnnnnnnnnnnnnnnnnnnnnnnnnnnnnnnnnnnnnnnnnnnnnnnnnnnnnnnnnnnnnnnnnnnnnnnnnnnnnnnnnnnnnnnnnnnnnnnnnnnnnnnnnnnnnnnnnnnnnnnnnnnnnnnnnnnnnnnnnnnnnnnnnnnnnnnnnnnnnnnnnnnnnnnnnnnnnnnnnnnnnnnnnnnnnnnnnnnnnnnnntaagctggcatgttttaaggcagttacatctctaacttgatttaccagctatgcttgagggtccaaggagccaaaattgcagccaaactgatcttaaaggaccagggaatagaatggtcaagcatgtttccaagtttaacctaggcctggcacatccttgccaattgctcagatggcaagtgaggcc

SEQ ID NO: 243306 - DNA, 1662 bp, Homo Sapiens
ttggagagaacacagctccctacagcctctacctgttgggctcaggcaattctcccatctcagcttcctgagtagctggaccacaggggttcaactagatagagcttcacaatctctggatcaagaaattttattaaaagttaaaactgaaattgaagaagagctaaaatctctggacaaagaaatttctgaagccttcaccagcacaggctttgaccgtcacacttctccagtgttcagccctgccaatccagaaagctcaatggaagactgcttggcccatcttggagaaaaagtgtcccaggaactgaaagagcctctccataaagcattgcaaatgctcctgagccaattttggtgcctctggttttgctacgacaaatgcttttggaattgacaagacgtggtcaagaacctttgagcgcactgctgcagtttggcgtgacatacctggaggactattcggcagagtacatcattcagcaaggtggctggggcactgtgtttagtcttgagtcagaggaggaggaataccctggaatcactgcagaagatagcaatgacatttacatcctgcccagcgacaactctggacaagtcagtcccccagagtctccaactgtgaccacttcctggcagtctgagagcttacctgtgtcactgtcagctagccagagttggcacacagaaagcctgccagtgtcactaggccctgagtcctggcagcagattgcaatggatcctgaagaagtgaaaagcttagacagcaacggagctggagagaagagtgagaacaactcctctaattctgacattgtgcacgtggagaaagaagaggtgcccgagggcatggaagaggctgctgtggcttctgtggtcttgccagcgcgggagctgcaagaggcacttcctgaagccccagctcccttgcttccacatatcactgccacctccctgctggggacaagggaacctgacacagaagtgatcacagttgagaaatccagccctgctacatctctgtttgtagaacttgatgaagaagaggtgaaagcagcaacaactgaacctactgaagtggaggaggtggtccccgcactggaacccacagaaacgctgctgagtgagaaggagataaacgcaagggaagagagccttgtggaagagctgtcccctgccagcgagaagaagcccgtgccgccgtctgagggcaagtctagactgtcccccgccggtgagatgaagcccatgccgctgtctgagggcaagtctatactgctgtttggaggggctgctgctgttgccatcctggcagtggccatcggggtagccctggctctgagaaagaaataggaggcttttcagaagagaaagacagaaggatgtaaggttggagttgtattggctggaatttgaacctccagcagctgtctggacatttgtggaacactctgggataattggggacttctgctcaacatggcagtggcatgttagcatgttagggcttgaggtggggcattcacattcatctgactgtaaatcccaagggcctccgctcatgctaaattgagaatcttacgggtaaagcaccccctccaggaccgggtttctcagccttggcactagtgctgttctgaccattctctgtgttggggctgt

SEQ ID NO: 243307 - DNA, 352 bp, Homo Sapiens
atcagcagagggcaatttattagggaacttatggacacaagcatggtctggtcagcaacaagtcaggtagatctccacaccattattccccagacccgggacttatataccacaggaaaaagggtatgtgcactatagagacaatgaaaggcaaccctctagaacaggccagaatgagttgcgtgataacatcaaggttgctttgacctaaaggtaggatatattgtgagtacatattcttacattaaagacagtaaataaacaaggaatcaggaggcattcacaggactgcggttaatctgaggtcaacatggcaaattagcatccaagatggagtcacttttgtcaccac

SEQ ID NO: 243308 - DNA, 1451 bp, Homo Sapiens
  misc_feature (217)..(527): n is a, c, g, or t
ttgggactgagtttgtgtgatttcaggttatttagagttattaatgtaaacataagaaggcttgtgactcttatcaccctctatagaatataaagactaaaaataaaaactattacctctgggcctgtttttctttgggattagataaagcctttctaccatatcaccaaatactcataaaggctaacacagaaagcttttccaagttaataatttnnnnnnnnnnnnnnnnnnnnnnnnnnnnnnnnnnnnnnnnnnnnnnnnnnnnnnnnnnnnnnnnnnnnnnnnnnnnnnnnnnnnnnnnnnnnnnnnnnnnnnnnnnnnnnnnnnnnnnnnnnnnnnnnnnnnnnnnnnnnnnnnnnnnnnnnnnnnnnnnnnnnnnnnnnnnnnnnnnnnnnnnnnnnnnnnnnnnnnnnnnnnnnnnnnnnnnnnnnnnnnnnnnnnnnnnnnnnnnnnnnnnnnnnnnnnnnnnnnnnnnnnnnnnnnnnnnnnnnnnnnnnnnnnnnnnnnnnnnnnnnnnnnnnnnntcaaaataattgtaattaactgaaatgccctgttccttcattcacttgatagacttttctacctgctctatacttggcactcaattagattctggggatacagataaaataagacaaagctcccatctggtagagtccaagtttgttttcacagttatttttccacagtctgtttaaggtattaggaggacttttataaaccgagtgtttttcaggttacttcagagaggagtctccttccacccaaaaaaactaaccaaattattttatcataaagaggtaatcccatttttatgtccacaatttttacatttttgtatcagccaccaataattttgactgttttgtcaagtacatatttcatcaatcctatttccacagccgtacatgtgatcccagtgactgatagatctgtagaatgtgaactcacatttaaagtttattttgggaaggcatatatgccttttgatgacacacacaccaaaatatataagagctgtgcatggtaaacccacagtagaagggaaaaagtaatgctttctggtatacttcagaggctccatttgaagatgtgcgttgatgtttccttgattattttgaatgaggagtaggcggtaatatttaacaggtagcatacgtatctaagcatatagtaaatattactagtacttgtgtgccatgaggcactaatacataggtgaaacaaaaatatttttagttctaaaaaattctctagatatttatggatggttaggcaatagggttccttcatgagaaggaaaaaactgtatctttattgtcagtaagtgtggaaaaaaacccgacttgtatgtgtattcacagtttgataggcatattttgaagtcattgttttccatcaatattaagtatcatccatttctatgttctctagcaaaagaaaat

SEQ ID NO: 243309 - DNA, 600 bp, Homo Sapiens
  misc_feature (99)..(119): n is a, c, g, or t
aaaaaagcaattcaaacctaattcttccctttcttcctcctcccacccaacccgcctgcttctcaagatgagccttggcaacatagtgagatgctgtcnnnnnnnnnnnnnnnnnnnnnaaaaagcaattcaaacctaattcttccctttcttcctcctcccacccaacccgcctgcttctcagtggcaacaaactcaagttgctcatcatgctaccttgcacatatctacaagacaccatttacttcctaactgccttgacatctgcatgctacggtgctcagctgtttgacatcaacataaatatattctaaatccactgtaactagactttttgtactttcatactctgaagaaagtcttaataaatactttattattaagcataattattcatctgttggtgactgagaaatgaaaaccacaccttcgaagatttcttttaaaaaatgaaattcctttaactacaacaacgacaacaaagggacaagtacacagaaccaggcacttctgggaaacttgtcttctcatccctttgccctcccttcctccccctttagtaaagctggttgggcacatttgctaggatctgtgggccaa

SEQ ID NO: 243310 - DNA, 1523 bp, Homo Sapiens
gaagtatcatctgtccccaacttcccttttcccatcagagacaggtccccaaaaccgcgaaaaagaaactatattctcaaacaaaacatgcattcaattcaggtgactgtttgatattttcataacattttctttaacatttaatagaaactatatacaataaatttttactatattttacataagatagcaaccacagaaatttacataggttaaaagcaagacggataaggaggacccagtcctgtgggctgttttctcagaggataaaaagccagagttcaccagggaaaggggttaaagactgcccaattaagtagaggtgaagaaaagctaaactgcaggtcttcagatagagataaccgatattagggccatcagtatctcaaagacaccactcacaaagacagctcccacctagctacttaagtggatttctatccatgacttgggaaatcccattacaaagatgtcactttccttttaggtatagtcccaaataatcccagaagctttgatagggattatctctctttctcttccttgccctgagtgggaagaaacccacggtccacgtcctcaaaatttggctttacgtttgactataatactcaatccagaagaaaaacaaggtagtctgggttgcctgtgttttgtgagagatgatcagaaatacttctttgaagaacgagaaatttaaatccaccaaagtaaaatggttccccaaactatcaactaatagaagtgggttctggcttcccatttgcagtagccaatccactctgagacaatggtgcagaggctttctcagaatttcgagatccctgggatctgcacccatcccagccatctgcatctggccctgttaaaagaaataaaggcacttcagttagtaattcattcactgtggtctgaagtatgaatctgacttatcagtggccacttaaactagcaataagaacaatacaacagaaattaattctggacagatgctcttcccatattagctatcctagtcccttggaagagcctattcctgagcctcttccaatgggatggtgagctgtaggttgtttcttccaaatgaaatagccattccctactgaggtcccagaacagccaacagaccacaggaagacagtcctttaggcctctgcttgaaaccaacagccacagtacaactgctggtcttcagtcagggccactggaattatacccaaggctcacggacagaactcaaatcacattactttactggtccttctacaatgagaacaatttcagtgatgaactctccctcagaaggtatgatttccctagattccttgtctcaagcttttatttaaataaatgtatgtcctactctgggatatgaggatcacgggccattaggtgttctaagagcccatctggagaactacagcaacaagggtacacaggagcagagtagggcatttttaaaagtgctttgcttatatggtattcaataagtgagagacatgtggagcggtctttatacccaa

SEQ ID NO: 243311 - DNA, 900 bp, Homo Sapiens
tgtacaaataagctggagcaggtgtccagtgatgagggcattgggaccttggcagagaacctgctggaagccctgcgggaacaccctgacgtaaacaagaagattgacgcagcccgcagggagacccgggcagagaagaaacgcatggccatggcaatgaggcagaaggccctgggcaccctgggcatgacgacaaatgaaaagggccaggtcgtgaccaagacagcactcctgaagcagatggaagagctgatcgaggagcctggcctcacgtgctgcatctgcagggagggatacaagttccagcccacaaaggtcctgggcatttataccttcacgaagcgggtagccttggaggagttggagaataagccccggaaacagcagggctacagcaccgtgtcccacttcaacattgtgcactacgactgccatctggctgccgtcaggttggctcgaggccgggaagagtgggagagtgccgccctgcagaatgccaacaccaagtgcaacgggctccttccggtctggggacctcatgtccctgaatcagcttttgccacttgcttggcaagacacaacacttacctccaggaatgtacaggccagcgggagcccacgtatcagctcaacatccacgacatcaaactgctcttcctgcgcttcgccatggagcagtcgttcagcgcagacactggcgggggcggccgggagagcaacatccacctgatcccgtacatcattcacactgtgctttacgtcctgaacacaacccgagcaacttcccgagaagagaagaacctccaaggctttctggaacagcccaaagagaagtgggtggagagtgcctttgaagtggacggggccctactatttcacagtcttgggcccttcacatcc

SEQ ID NO: 243312 - DNA, 1052 bp, Homo Sapiens
ttggcccggactgagaccgtggttgatgactgggacgaagagtttgaccgagggaaggaaaagaaaattaaaaaatttaagagagagaagaggagaaacttcaacgccttccagaaacttcagactcgacggaacttctggtctgtgactcacccagcaaaggctgccagcctcagctatcgccgctgactgtgcccctgtggaaggaggactaccgtggtttgttctgcagcctcctggagacaaggcgtcccttcccgggagctgtcggtctggatctgagggagctctctgtgtgggctctgctgcgctgggagcctgtcacggtaggagctctcccggtaccagtgtccacagaccgcccaacacagaggctttgaggcttctctagatcggaacctctttggtgacattcccgaccagccctgcaagagaaacgacagtgtgtgtgtgagcagaggtggccgcacacctgctggacatctttgccaggctgtgccttctcatgtttcatagacagtggtctgtgctggcagaggctgctgcccctggttggggctatcaggagagtgggggatggtggccacatgtcctccaggtggtctcccggtgcatagctggtggctctgggcaagccatcccttgcttctcggggctgacgccaccgttgtgtccgagcccgccctcccctgcttcctcagcgggaccccttcatctgttggccttacctgtcctcagaaaggaagaggtgaccccacccagccacctctcccttttatggaactcgagagggtggccctactgtgcaccccttccttgtgagtagctctcaactgtcctggagagcagaggctatttggggtcggaggagccctcgatacctgcgaatacatctgctttccaggctgctgtttattctgagacgactgtgctgtagcttcccttgccgctgccataacccgcaggtcttcactgaggtggaggctttggggtagaattctccatttattttactacttaatacaaaacatttatttttgactactcctgtg

SEQ ID NO: 243313 - DNA, 1132 bp, Homo Sapiens
ttggcttatgtacagcgatgacgttctacgctctccatcgggcagccagaggcccagcgtctccgatgacactgagcacctggtgaatggccggatggactttgccttcccgggcagcaccaactccctgcacaggatgaccacgaccagtgctgctgcctatggcacccacctgagcccacacgtgccccaccgcgtgctaagcacatcctccaccctcacacgggactacaactcactgacccgctcagaacactcacactcgaccacactgccgagggactactccaccctcacctccgtctcctcccacgactctcgcctgactgctggtgtgcccgacacgcccacccgcctggtgttctctgccctggggcccacatctctcagagtgagctggcaggagccgcggtgcgagcggccgctgcagggctacagtgtggagtaccagctgctgaacggcggtgagctgcatcggctcaacatccccaaccctgcccagacctcggtggtggtggaagacctcctgcccaaccactcctacgtgttccgcgtgcgggcccagagccaggaaggctggggccgagagcgtgagggtgtcatcaccattgaatcccaggtgcacccgcagagcccactgtgtcccctgccaggctccgccttcactttgagcactcccagtgccccaggcccgctggtgttcactgccctgagcccagactcgctgcagctgagctgggagcggccacggaggcccaatggggatatcgtcggctacctggtgacctgtgagatggcccaaggaggagggccagccaccgcattccgggtggatggagacagccccgagagccggctgaccgtgccgggcctcagcgagaacgtgccctacaagttcaaggtgcaggccaggaccactgagggcttcgggccagagcgcgagggcatcatcaccatagagtcccaggatggaggacccttcccgcagctgggcagccgtgccgggctcttccagcacccgctgcaaagcgagtacagcagcatcaccaccacccacaccagcgccaccgagcccttcctagtggatgggccgaccctgggggcccagcacctggaggcaggcggctccctc

SEQ ID NO: 243314 - DNA, 1451 bp, Homo Sapiens
ttggcctttatgtgatctaagaaccaaagaaacaagacgtggtgttcaggttttgctttgccaataacctccatgggcttctaaaaaatgtttagtataaagcttttgtatagaaaagatggagtagctctttgccctattttcttttctgacacctgtgatgaagttttcacttggccaataagccacaaactgaaccatgtttcaaaaccacatttgcccttctggtggccttgctgatgtttacaggatgttgaatgggtttgcaaggctgctgcttttttctttaagtctgtagattttgtcccagtaagttcattgtgatgtactttactatcatctgcataatgattatatggcttttttccccccaatctatctgttacataggcagtcatggccaaccaaaattgatgtaccccaggaccttgaggatgacctcacggccactcctttgtcccacgcgactgtccctcagtcttctgctcgggctgctgacagtgtcctcaatggccacaggagcaaaggcctgtgtgactcagctaagaaagatgacctccctgagttggctggaccagcactctctacggtgccacccgcaagcttaaaacccacagccagtgggcggaagtgtctgttcagggtggaagaagatgaagaggaagatgaggaggacaagaaacccatgtccctctcaacacaagtggttttgcgccggaagccatctgtaaccaaccgcctgacatccaggaagagtgcgcccgtcctcaaccagatctttgaggaaggggatctgacgatgagtttgacatggatgagaatctgcctcccaagttgagcaggttaaagatgaatatagcttctccaggtacagttcacaaacgctaccaccggaggaaaagtcagggccggggctccagctgcagtagttcggagaccagtgatgatgattctgaaagccggcggcggctcgataaagatagcgggttcacctactcctggcaccgacgggatagcagcgaggggccccctggcagtgagggggatggcgggggccagagcaagccaagcaatgccagtggaggggtggacaaggccagccccagtgagaacaatgctggtgggggcagtccctccagcggctcgggtggcaaccccaccaatacatcgggtaccacacgccgctgtgccggccccagcaactccatgcagctggcctctcgcagtgctggggagctcgttgagagcctcaaactcatgagcctctgcctcggctcccagcttcatgggagcaccaagtacattattgatccacagaatggcttgtcattttccagtgtgaaagtccaagagaaatctacgtggaaaatgtgcattagctccacagggaatgcagggcaggtccctgcagtgggcggcataaagtttttctctgaccacatggcagccaa

SEQ ID NO: 243315 - DNA, 1460 bp, Homo Sapiens
aaaacaaacagggttatgtcccgacaaacagatttagggagagacttatgctggtgcctcttggcttttcacaggatgcaaaaacaatcctgccagcaggaggtggcaagattgcagaggtggctggttgctctttcagccagcttggtcttgtctggcatgcacaggtcccagcacagcaaaacttcagggagttagagtgttgcacaaaggattttaccaacctctcacattaagcagcattcaaggatttgctgaccaccacttatgcaaattttgtgttatgctatagcaatgaacttacttgttctatttctaaacaaaacattgggttcacacacaggcctggacaaagcttcccacttctgaactatttactgatcttcttattctcaaagaatgcaagatgaatgatgtgcaataccatggctatggcatgtgacttttcttgacctggatggttagtgtcccaatatttaactgatttttgtgggggtgaaaatatgccataagttcttccttctatcatccccatcactaccatacatgtaatgacataatcatgtcacagtgtgccctcagaatcactattcctagctgagtatactaaggctttctatctaggtcagttcattgtgtctgtgtctcctctaaaccctccttcatcatgcctaccttgaggaattcagcaagtgatcattcacgcaagctaaaggattttagctttctctgccataaagattattgctaaaatacataccatacaacaaaccaacccatttcccacaaatcttactgtctgacttctcacagaatacataatgacttttattgtgtctcttccttctgtgtttctctttcctaactgaactttgttctttatccatgccttcttccaatcctgacatattttaaaacctttagcatttctgcctataatatttgagttttcttcttttcctatctttatttgataagtcccgtacaaatattttccccataatcacaatgttttcttttcactttgctcaagaactgagttatgagctccaaatttggacaaactctacattggctaagttttagtcatttgcactgctaagaaagatgacaattcagcatgctgaagatgacttcctcccttataaaggggctaacacagagggcaatactgttcatgcttctgattcttgatcacaagaattgctttaggcaattacaatcatgtctcccctgacacaacatattagtcaagtgagacagagaaagaagatgtcctatgtcacacagctgggtggtgacagccgctttagcatcagcacactgcgttccctctgatttcttcattcatctctaagtagcagtaaatccggtcttgaatactgactttgacactcagctttctccacatccttcctgtcacttcctttgagactacttcagattgttccctgagccaa

SEQ ID NO: 243316 - DNA, 988 bp, Homo Sapiens
ttgggacctcttccccgtaaaaaaaggacactatgaccttgatgctgcccttcaggcaggaaacagggctggtgcctttcttcacctgcatggccagcttccttccctggcagtggagagggcagccaacaggttctaatgtcagagccatcctttaccaggtgggcctgcttgtccctgtcttgcctgccacatcactctactttttggaaggccatggctgattaaagaagttcttgtagtttcccaagcaaagtggaatctagaaacagtgaaaaaagttcagataactttgaattgcattcaagaagtacacttctttcccattgtccgtggctcttggagtctccgtgatgccaggctagagtctgattatataataattcaaaatggtaactcccaaggtaatgctttcttccatttcatcaggttcttttatccccactgcaccccctccccttctcccttgcctatctggatggcttctcagaagctcggccctagtcctccctgccttggcggggccagagcccactactgctgaggcagcactgctctcgtcagctgtgttgcctttaccaagtgtcttcagagggttatgagttagagtagctggcctggggagagggtgcctccctgggtttgatctttagggtctgactttctgcagagaagatgttttacagatgtgtcaaagctgatgtaatgtggttgggggaggaaatccagacccaaagtgtttgtcagctgggtgtacaactgcctatgtgatcctctgtcttaaaatgatttctgtctgtgctgcgaaacaaagacaaggtgaggtgtttttcttttttgtaataatataaagctgtgtgtttctgattggatgattcactatgtgcattgttttctcctaagtgcttttagtaggtagcaatcaatggtgtaaataaagatgttcttttcctgttccttttatttttttctctctttattatcttta

SEQ ID NO: 243317 - DNA, 652 bp, Homo Sapiens
  misc_feature (152)..(230): n is a, c, g, or t
gagagacaagagtggttacttctaaaatgacaagatgatgtaaccctggctcagggagtagatcaagttctaaatctcaggaataaaaaactgatactcattatccaattcatatagtcttgtattatatacatattaacagtctatgcaannnnnnnnnnnnnnnnnnnnnnnnnnnnnnnnnnnnnnnnnnnnnnnnnnnnnnnnnnnnnnnnnnnnnnnnnnnnnnnatctactccatttggcaatgtgtactgagagataaaaaacctatctacaaacagaatataacaaaaggaaaatgtgacttaagaagtgatctcaggtccatagctcttcggttcttccaaatttgtagatcagagtgctaaaaaatataagtgcattttgaaaaaacacagctagtcccggataaacatcagtatctacatacacaaagtaaaacagattagacggttatataggcaaacggcagtaataaagtatcagtgccattcataatgatacattttgtatattacaacatactgctattattcattaactgtaagacatctataatgaaactgaaagaagaaaatgccaatttaattcccccaaagcaaaggactgctcttactctggataaaagtcaatgaacttacaaagccaa

SEQ ID NO: 243318 - DNA, 996 bp, Homo Sapiens
aaaaacagcaaagaaaagaaatcatcaaacaagatggtatcttgacaaagggcacagcgctcccacaactgcttcatactctgtgcacaagaaatcctctcgagagaggagaggagtgatgccaaatgggcttacattagacccgtggacactaccactggtattattcatacaaccaaggctctacaacacccctctggagaaaaagtgcaacacaaaatctgtgtaacaaaggaaagcaaaagtagcaataagggcccagaggaatacaaacagtgcaaatacagtactgcaaactcagtaaaaggagtttttgattggagtatgaactttcaagttgaagatatatttcacaggaatattcacccaaagcttgagagctagagcgaggagagacttgcagtcggtaactgagtagatgaaatgcataatttttcactaggtgataattccctttgggaagaagtgctttatctttaattattccactttttgttaaatggttcatgcttttaaactgcgattgtctcaaacttgcttgctattgaattgtgtaacatcagataatggcaagttgtcaaaagataaccccagtggatatttgaagctgcttttacgagaagcatggtgctgagctgccttacacagtctttttacagtaaccataaaaaactgagtttatttgatcatgtattatcccttctcacataaagtcatattagaggaattctttttaaaagaagctttcaaactagtcctttgggcatttaaaaaatcattatataaaagtacacttcttcaatacataagaacaaatattttttctttaccaaaaaaacctcatttttaggccaaaataagttacaacttgctgaaaaccttttatggctcagtgctcattctagatatatgaagctatatttttttgtacatcttcagaaatcagatactgagagtggtccttcttttttttgagagggagtttcacccaacttt

SEQ ID NO: 243319 - DNA, 1346 bp, Homo Sapiens
ttggcatcatcagactgccctttccaagctcccaatgtgtcctccatgatttccaacctctcctgggagctccctgggtctctgcctctcatcagtgtcccatactccatgcactgctgcacgctgggcttcctctcctgctccctctttctgcacatgagcttcgagctgaagctgctgctgctcctgctgtggctggcggcatcctgctccctcttcctgcactcccatgcctggctgtcggaatgcctcatcgtccgcctctatctgggccccttggactccaggcccggagtgctgaaggagcccaaactgatgggtgctatctccttcttcatcttcttcttcaccctccttgtcctggctcgccagaatgagtactactgccgcctggacttcctgtggaagaagaagctgaggcaggagagggaggagacagagacgatggagaacctgactcggctgctcttggagaacgtgctccctgcacacgtggccccccagttcattggccagaaccggcgcaacgaggatctctaccaccagtcctatgaatgcgtttgtgtcctcttcgcctcagtcccagacttcaaggagttctactctgaatccaacatcaatcatgagggcctagagtgtctgaggctgctcaatgagataattgctgattttgatgagctgctctccaagcccaagttcagtggggtggagaagatcaagaccatcggcagcacctacatggcagccacaggcttaaatgccacctctggacaggatgcacaacaggtacggcaacccttccttacctaccatcctcctctgggctctcattgatgggcttattagtgggacttattcctgtgccctcactggcccaccctggtgggcgggcccattgccaggatgctgaacggagctgcagccaccttggcactatggtggaatttgccgtggccctggggtttaagctggacgtcatcaacaagcattcattcaacaacttccgcctgcgagtggggttgaaccatggacccgtagtagctggagttattggggcccagaagccgcaatatgacatttggggcaacacagtgaacgtggccagccgcatggagagtacaggagtccttggcaaaatccaagtgactgaggagacagcatgggccctacagtccctggggtacacctgctacagccggggtgtcatcaaggtgaaaggcaaagggcagctttgcacctacttcctgaacacagacttgacacgaactggacctccttcagctaccctaggctgagattgcactcgccttttaagaacctcaataaagagactttggggtgtttgg

SEQ ID NO: 243320 - DNA, 1430 bp, Homo Sapiens
tttaaacatatttattcttcatttcctaacttttcccacttttggctaaattcgtatgttctttctctaacctcacttctgttttattactctctgggaaagatttttatataaaacgtctaagcaatcaaacctaacacaggatgaatttctacacattactataccctctggtcactatttttttcttctctttattgcccatttccctgatcttgaaacattccaattatttgccttccatgacattctactcttacttttacttttctgtctctgattactcatttccagttccttttgtcatctccttgtcttcctacacctgccaattaaatttgaatttcctctgcatttcatcttatgtctccttttcttctgccaaattctctccttagacaaatacagtcattcccatggttttatatcccacttatattcaagggctctagaatgtatagcgccaggccaaatctatcttaagaacttactttacttaaccaattacaactgcatctgctcaggatcatgtaacccacatcagcatttggctcttctgtagacccattttttcttttcctggaagtctattttgacacctactttctgtcactacccacgttttagcatttagccttgtcaatttactctcatccatatgtaactctatccattttcttctctctattatgaacagcagtttgagccatcatgaccaattttgcagtatcccttcttaaattagcctcctgtttcgcattggacattttcaccccccagcaattccaccgatttcattctcggaaaaatataaatgaagagttacatttttcaatagccataatcattaaatttccatgtgtaagaaaatgttcagaacagtatcagtgcatttataataaaattttaaaacttgacccacaaatctctacttgtccttctagttttatttcatttgtctctcgtcaatctctacattctgatcaccacaatcttttaattcatctgaaagctaagctctctcttaatttacattctctatacttgcaattttgtctacctagaagtgtcttcttccatctttggattgttattgcaaatccattgaatagttctcatctgaattgtttcttccttgggatgacttataaacacttcatcctacagccaaatcagaagaccaatatcaaaatctttcatcacatcctaaatttgcttatatgtaattatatggcaagaatctctttgtctttataatcatgattcacttatctatgttttttaaaaactcttctaggtggtgatgctaagctccgtaatgttgggcttgttacctgtctcaactatcttccacacctaccacagtacctgctacatagatgtattcaatatatatttttaggagattagtaaatgccaacttttttgta

SEQ ID NO: 243321 - DNA, 911 bp, Homo Sapiens
ttggcggagtcccagtgatgctctgtgccatagagcccccataacttcactactacgtgatagtaaatccccggcaaaaacccgcagcgccttgcaagcccacgccaccccaagcatcccaggactcttctgaaacgactccgggctaccagatcggccgtccagctggaatcaaccgatggaggctccgctgcaaactggaatggtgcttggcgtgatgatcggggccggagtggcggtggtggtcacggccgtgctcatcctcctggtggtgcggaggctgcgagtgccaaaaaccccagccccggatggcccccggtatcggttccggaagagggacaaagtgctcttctatggccggaagattatgcggaaggtgtcacaatccacctcctccctcgtggatacctctgtctccgccacctcccggccacgcatgaggaagaaactgaagatgctcaacattgccaagaagatcctgcgcatccagaaagagacgcccacgctgcagcggaaggagcccccgcccgcagtgctagaagctgacctgaccgagggcgacctggctaactcccatctgccctctgaagtgctttatatgctcaagaacgtccgggtgctgggccacttcgagaagccactcttcctggagctctgccgccacatggtcttccagcggctgggccagggtgactacgtcttccggccgggccagccagatgccagcatctacgtggtgcaggacgggctgctggagctctgtctgccagggcctgacgggaaggagtgtgtggtgaaggaagtggttcctggggacagcgtcaacagccttctcagcatcctggatgtcatcaccggtcaccagcatccccagcggaccgtgtctgcccgggcggcccgggactccacgg

SEQ ID NO: 243322 - DNA, 1545 bp, Homo Sapiens
  misc_feature (434)..(693): n is a, c, g, or t
tttttgagcaaaaaaagagtttggaaatgtcatttgctcagttcattttttggctcaatatgacatctcttaaaataggtctgctggtgtatcttttaagtgaaaatatagatagaatagcatgactgtggctgtgtttgttcaagagagatttaaacactttaacatttgctctttgatttagccttaataacttaagaaatagtgaagtggttgtttaagaatgaactgcctctcaggaaaaaagcaatattgttgtctctatgaaacacattttcttgatgaaatccacttttagaagtttgcaccagtacaggctttctataaggaaatgcagatgagtatggtaatgaatgaaaattcataagcatttgtattacagtaagcactataatttgagacttctatattattcatttatttacttatttaannnnnnnnnnnnnnnnnnnnnnnnnnnnnnnnnnnnnnnnnnnnnnnnnnnnnnnnnnnnnnnnnnnnnnnnnnnnnnnnnnnnnnnnnnnnnnnnnnnnnnnnnnnnnnnnnnnnnnnnnnnnnnnnnnnnnnnnnnnnnnnnnnnnnnnnnnnnnnnnnnnnnnnnnnnnnnnnnnnnnnnnnnnnnnnnnnnnnnnnnnnnnnnnnnnnnnnnnnnnnnnnnnnnnnnnnnnnnnnnnnnnnnnnnnnnnnnnnnnnaaatccttgaaatgtcttttaaaaatagaaaaaccctactgctggctttccagttaatatttttccatatttaagtagtttgttttcaaaaatacaaataaaaattattgcttataagagtatttacagaatgataaattacttaaggtttcttagaactcagactaccatttgatatgctgaatgaggcttcatagctattcaaggaggcctctgtcatcccagcctctctatcttaaatctaatagggtaatgaaaataaccacaaatcctaccattttcaaatgatattgaacaactcaaaggttgtatttaatcactaaaataaagaatgagttaagagaacatcaaggtaattttgtatatgaatggattcaaagtacacagcacattttcattaaaaaggctgtaagtagtttggtacctgcctcaagtataatgcccacaggtaattagctaaaataaaaaattgataattatagtataaaaagctccaaatggttatctaaaatttgtagtaatttgaaaaacttaacatggggctagaatccttatttcaacaggaatcctaggcaaggagctatcacattagctatgggaagcataatatcatccattgatcatagctaagagagggcttaagaagcctctgttattttcaagggagatttatgctttggatagcatgctcttctaatgagaaaggaacaagaatttgtaaaatttggagaaaagtttcattcgttcagacttttgtactcttagtttcaattccagtgataaatcctaatttctttttaactagcattctccgtcaattttcatgcatatttagccaacttttttgtacca

SEQ ID NO: 243323 - DNA, 872 bp, Homo Sapiens
tttgaaaagttattagaggaagaatttttttccttgtaatttccaggtgttatattagttgggccatagtgaaaattacatggaggaaagaaaataggaaaataagtcacagaaaaagaaaatcaaaacaaatagaaactctggggaacaagtgagttaattaccgctcatgtctcccatccggttctctagctccttgagggttactgtctaatgctccacaaaagtgccttacccagtgcttggtacagagaaggcactgaataaattcacaaaggccgattggttcacccattcttttagagacaacagacacgcaattctgacgaggactcctgttactaaaagacacagcctctgatacaagagagatatccctttgactaaagcattaccagggtccccagggccccctcccactggggcggtaacactacgggtctccccaccatatattattccatgtcaaagtatctacacaaatacagaggaaattaagcaagtaaatacggtatgtaattgttatcatttgtatttctttaaggcatatttataaatattttaaagtaaacaatatgagtgagtgcctttcattagctatgatctttcatactgatatattttgactgatctgaataagcaggttactgtggaagcatataacataaaacagctaatatgattccagtgggtacaaccaagtgtcagtacttgatacataactctatcccatcattcgcaattacaggctgctgtgtggagtattaaacatgcatcttagtttttatttgtacacaatggtccaaattttcacttacatataactttccaactgtgtaagtgttttgaagcaattatgtttttcatttgga

SEQ ID NO: 243324 - DNA, 1149 bp, Homo Sapiens
aaaggtttcagcttcattatattttacagaagacgttcagtggtccggtaagtctttcatgtcacagctgaggtttaatgatggcagtggaggaaagcagaggtgatgcaaagtaagaccagcccagttgcttatctgacatggaatctttttcctgtctggcttgcagcagcgaagtgtttctggtcaggttgcctccaccaaacctgattgaagcaaaagggtgacatgctctgataaatcccatttaaggatgattctgttcaggcaaatagttgatccttcaatctgttggctgtgggatgatactaatatgaagaaaattatccgggtagctcagatgttcactcagccactgcagaggtgtttccaacattggctcaattccatgaatcatcacttgattctttttttccccatctattccaagaaagaaacccaacaacaataaaagtcaaaacagttgaagaaaaaataatctggtgccttttgagaatccttagtgcattaaatggattttaaacatgttttgtcccctgaacaggaaatgtggacatggagaaagttcaaatgttgcagtatgtatcacccaaaacagaaacctgagggttacaatatattctgataaaaattctgttgctgtatgtgaaagtattacttctttcttaattactgtgcttacttaagattgacgttaatgaaactgtagtggcaaaaacagcccattgtaccaatgaccaaaatttattttagttatacattaaaaactgtaatatatggttattaaaaatgacaagtacatgaagtcggtccatacatattttgaaaatgtaaaatagaaatgtgactagaaatcaagaatcagatcagtatttgagatgtttagtaagacacaggtgagctttagttgttttcagtaaagcattcaagtatgtatcaaaatgtcttagagatactatttgaataacagttaaaattttaatgagaagggattacaaatctgactcagggattcctgttttagagtcataaagcctgactgatttttgttaacatccacttgctaattaaaagggggctgaaatttacacctttcttttaaattcaattgtattccaaattaaacttaagattttgtgtttttcccaa

SEQ ID NO: 243325 - DNA, 1379 bp, Homo Sapiens
  misc_feature (250)..(262): n is a, c, g, or t
  misc_feature (417)..(448): n is a, c, g, or t
  misc_feature (588)..(601): n is a, c, g, or t
gaatcaaagagtgtgctctcagagttcttactgggcactgaaaaatcatcaccagacactcgtgcccatttgacagacgtaagcttccttttcttagacttcttctttgtactgttggattccttgaaccctttaagagctgtactgccttccacagtcccaacctcactgcccacctgtgatccttcagggtatgcactctcgaggctctcaggcatggccactgcctcaaattcctggtgattggacnnnnnnnnnnnnncttagacttgtttttataagcaggtgctggtattcctgcagtttcaccatgcaggcccacagcaggccgggattcctgcatatcagccccaacctcactgcccacttgtgatccttcaggcatggccaatgactcaaattcctggtgattggacnnnnnnnnnnnnnnnnnnnnnnnnnnnnnnnngtgagtaggtcctagtagttgtggagtttcatcatccaagcccacagtaggctgggattcctgcatatcagtcccggcctctctgcctgcttgcgatccttcaggcatggccagtgtctcatattcccggttactggacnnnnnnnnnnnnnncttagacttgtttttatgagcagatgctggtagttctgtaatttcaccccctggacccacagaaagccaggactcctcctggtgggattctgactgaggcagggtgtcccttgcccgctggctctcccaggatgcagctttcctctgatgctttttattctttttctccctaactttactgtgcagggcttctgatttatgtgcatgtgacttagcaagtacctgaaatttgtctgttttaggctttcttggtaacttctgttctatgctcatatcaacacaaacaacatcaacatcctttctaaaatgctttggtgtgttgttaatattttctttatcgacaaggacaactgtaacacctgcttcctcgtccacctccaaagcactatatcttctcttttttctctttttgagtgtggaagtggcatttgcagtctcatcacagattctggattttttcaaaggagaagaaatgagatgctggaaatcttttttcctctttttcctcctagttatttgagactgttcattcaccagggaggagtctctgaaaatttcgtgggaatgtttctgaggtctttccttatgtatagaacactttttctttttcttgtcagaaactggagtgtggatttcaaatctgcttgattctccttccattttattcctcaaaccagaagttggcctctttgtgaaagaagttggatatgccttgttagtgtccaacaaagagcggacgttctgcgatacacctccgaaagcaccgccacctttccaa

SEQ ID NO: 243326 - DNA, 1450 bp, Homo Sapiens
ttgggttatatacaattttacactgcatttactgcatatatattgacgtatatatgtacagattaactataaattatctgtttgctaattattggagtagttttgttaccaaatgttatgtcaaagctgtgtgataactttgatgatgtaacttagaacttactgactcatggagtccattttataaagaacttatgtgattttatatagattgattcttacatttaggcaaaaacaggaatacaagacatattagaattagctctgtgaagtttttcgtacttctttcatttctttaatttgtgagtagctgttaataaatttattgttataagccaatatcaacaaatatgttggtattttcctaaaatagcaaaatattctagaaaattatatcatccagagtaacttcatcattgaagggtacattgttttctcatgaactgcttttagttttggtcttctaaaatttttctgtcatatcttcagtggtggcccttctccaccttccaaaaagagaaataaaacggcaacagaaaaacaaaaaacctaatagtagtaataatgttttgggccatggatctttattttttgcctttttgttctagagaaattattttctaaataatttattattccaacttttacaacataagattgctaatggctcatatgtttaattaagagatcgtttccctaactcttatcctctaaactttaattgctctttgcctaaaaactccaaatcatcaatatctaatttacatctttcttttcttggagaaatttggtgtaaccatatttttactcttctgagaggttctcatatgatggctattttcattctctcttttccattaatacacacattttaatctagttttgatgatgaaagtaattatttattgaatctgtatttctacaagttgagtcctggtttgctatttattatgttcccagttgtttttagccatagcagtcaaagattgaaaatacaattcttatgttatttacttcttactttttagaagacttagtaagagattaattttattcttctctccctaaagaaaaatttacttttcttacgtggcttcttctctccttccttttgctgttccagggtggccatagctgatgagcacatttcttattccttactgtagctcttctattcagaggtgtttggtcctgaagtgatcattttctttctacagtcagtgacttttcctatttctcccttaagagtcctcattgctttatccttgattttaggtctgtataaacttagctggacaataaatttatcacgtgtacagctcatttagtgattctgttctgaactacagcaatactttcatattcttcctacttatttgtgaatatttatccttttattatgtcatttattaacctattttctttctctgcagtcaacttagaaatcttt

SEQ ID NO: 243327 - DNA, 666 bp, Homo Sapiens
tgcccctgtctggccaagggctaaaggacaagcacttccaccgtgtggccgtccagcccccgccttccgtcctcacaacgcagctatgctccacgaccctccctgtatgctctctgaagctgctgtggccggtccatgtctcaaagcgtccctggcggcctgggcccggccacagccccacaggaggctccccaaccaagtaggtttggggacactgcagaatcatgctgtgaggtgctcaggcccttgcgggacagagcttatctccctcctctaccccacggtcccctcctaggcaggcccctaaactgcagcagaactggcgttccaggaggccacctggggaaacgctgggcggaggggagcacttgcgtttctgtgttggaaaaacccggcccgtgtgtggacttgaaagtcggagcgggtctcaggccagctgcagccgtgcggtcgtgactgtggccccctgggggaggtcaccagcgccctggacgcagaggggcggcggcggacagacagaggccgcccacgcagggtcacggagaggccccacggacgccatccaggctcacgccctttgatccgcttgacgcttaagccacataaacgtgatcataaccaccaatttccaggaggaacacagggagagaccttctatcttcccaa

SEQ ID NO: 243328 - DNA, 921 bp, Homo Sapiens
agttggctttcactgaggggacccgccagtttctaactcagtggcgtttgccctgattcccggggcctggctttcagcgtagcaattctgccggcgaagaaggtgagcgcagtgctgtgtggcagcagagctccttaggacgaggagcagcgggacgaggaagggcagactggtgaaatcgcaaactgggcgtctgttccggcgccggacccctatttgcaaaggtccatggctaatgaaacacagaaggttggtgccatccattttccttttcccttcacaccctattccatccaggaagacttcatggcagagctgtaccgggttttggaggctggcaagattgggatatttgagagtccaactggcactgggaagtccttaagtcttatttgtggggccctctcttggctccgtgactttgaacagaagaagcgtgaagaagaggcacgactccttgaaactggaactggccccttacatgatgagaaagatgaatccctgtgtctgtcttcttcctgcgaaggggctgcaggcaccccgaggcctgctggagaaccggcctgggttactcagtttgtgcagaagaaagaagagagggacctggtggaccgactaaaggcggagcaggccaggaggaagcagcgagaagaacgcctgcagcagctgcagcacagggtgcagctcaagtatgcagccaagcgcctgaggcaggaagaagaagaaagagagaatctcctccgcctcagcagggagatgctagagacaggcccggaggctgagcggctggagcagctggagtctggggaggaggagctggtcctcgccgaatacgagagtgatgaggagaaacgtggcgagcagagtggatgagatgaggatgacctgcaggagaacacataactaagatttattactgta

SEQ ID NO: 243329 - DNA, 1065 bp, Homo Sapiens
caggtgaagcagacagggtggtaggccttccccatagcccgcaggatccggtccaggatgggctgggagcacgtggcacatttctccagggtggcctgttgggaaggaaggcaggaagatctgggagcgggcgggagccatggcagctcaacaggaaccccagcaacccagccatctaatttctgcagcctcctgcatgcagcctcctgcatgtgattcggtgaaaggcagacttgagcagatctgagttcaggtcccagcactatacacggtatttaaacactatgagaaaaacaggaatcaggctgggtgcagtggtccagtttgcattctgtgtttatgacaacattttaagagatatttactttatctctacaaacacacccttcttggatataagtagttctttttaataaacacttcttctacctccagctccctattctttcctaccatttggaaaactggccattcagcaaaccagcctctcaccttacaggaaccatatccaccccaagtgcagagctgtgcccacctgactcagaaccaactatcccaagatgttcatggtagaatcgggaattctgactcaatgcctcagcaatctcactgaagacgagagtcactcactctgccttttatacacttgaatcctcacaagccaccaaaacagtgagtctacctttaggtcgatgtcgtgggctctcgggttcatttcttctgctgctacgctctgaccctccatctcgctctgatctgctgctgtgcctacttctatcccgctcatctatgaagagtcacacgaagcttaaaaacatgcatcccatcctaaggtatacacatcttcaccctagagaaaggacaggctgcccactcactcacaggtgcaacctgcactgctcgaatgtgatccgtggactcctgaaactcacctatccccattctcccaagggggaaaaatagttactgcctagaaaatttcaaacccacagtaacagttattttccagcaagaattcaaaaaatactagtgcgagtttacagtgaatcattttttttaatccaa

SEQ ID NO: 243330 - DNA, 898 bp, Homo Sapiens
aaaattagttatctgtatacagttttaggaatctaagttacataactggtaatctataaaataaagcccattgtatagcagatgcagaagatgctacataaattcctgccctataggggttgatttaaaatacaaattaaaatatttatttctaaacatagattcaaaatattgataattatttcactcttataaggaatatgatgatttttctctaagtaaataaatgtttaataaaatcaggcacggaaaaagaaataactcagtaatttgctcccgggttgatgcagggtcctaaggatggctgcaatcagaagttatatttctgctctgctgtggaaactctgaaggtttgatcagagaaacaaactcttcctcataccttttcaggtgactgccttcctttcatcacgaagggccattcaaattttctgcccatgcctccagggactcccctatggctgctgcagctgataaagatgcatccaagaaaacttccaaggaatggtcaatgtgtggcacagctaactcagtgaaggccaaactgctgaagaatctatttgtcttaactagctgaattcaccaatctgtttcccaaaaacttgttttgtgaaatattttcctgtaatatcttcagtgaataaaagatcttattcttataaatatataacttcagcatttctcagggattttttttaaatgcacccagcatttttaggattagcctgccaattttattggtcaattttctgaatttgccaaatttagtgattaccaaaatcctatttgacaattttaaagatgtaagcactcttactggattgggtagagttttagtaagttttgcatatttctgagcctaacgacgagtttttattttgtcctaacagccttaatg

SEQ ID NO: 243331 - DNA, 947 bp, Homo Sapiens
ttgggtttccgggtcggttctggcaggtctgagcgctccgacttccagaggagcgctgtgcacgtggagaagagcggggactcggcgaccctgccctcccgaccctcatgttcgaagagcctgagtgggccgaggcggccccagtagccgcgggccttgggcccgtaatctcacgacctccgcctgcggcctcctcgcaaaacaagggctccaagcgccgccagctcttggccacattacgggccctagaggcagcatctctttcccagcatccccccagcctatgtataagtgactctgaggaggaggaggaggaaaggaagaagaaatgccccaaaaaggcatcatttgccagtgcctctgctgaagtagggaagaaagggaagaagaaatgtcaaaaacagggcccaccttgcagtgactctgaggaagaagtagaaaggaagaagaaatgccacaaacaggctcttgttggcagtgactctgctgaagatgagaaaagaaagaggaaatgccagaaacatgcccctataaattcagcccagcacctggacaatgttgaccaaacaggtcccaaagcctggaagggtagtactacaaatgatccaccaaagcaaagccctgggtccacttcccctaaaccccctcatacattaagccgcaagcagtggcggaaccggcaaaagaacaagagaagatgtaagaacaagtttcagccacctcaggtgccagaccaggccccagctgaggcccccacagagaagacagaggtgtctcctgttcccaggacagacagccatgaggctcggggcaggggctttgcgagcccgcatggcacagcggctgggatggggcccgatttcgctacctcaatgaacagttgtactcaagacccagcagtgctgcacagcgtctcttcaaggaagaccctgaggcttttcttctct

SEQ ID NO: 243332 - DNA, 2214 bp, Homo Sapiens
ttggccatcatcacagaagatgcaacatcttttctgaaagattgccttaagagagctccagtcctactcttggaacttggatgtattctaatgtagtaaactattctaagttttcattctttgaattataaatggcctcagcagttttgctcaactactgataaatgctttgcctcctaccatctacctatataccttattgtaatgaatgttccaaaatggtagagtggtagaaaacgccagagtagtttagagcagaggaaaatatttgttttaaaactagctttaaagttttgtttcatttctaccaggagcctctttggtttggtttgattttgcttggaaataattggttttcttataaatgagtgaagcggtgataaaattctttggctagttattaattcttttacgtgtctttgcatttgagaggcactgttaaaaattattgggaaagatttaaagtgcaggctgcaattaaaacatggagaaaagtagaaataatgccataagtctagattgcctcatgaagcagcctcatttgaattgctttcatagctttcatgtgtgtatggtttagaagtacacttacctcagaaacctgatttgatcttcatgtcttgggcaggagttgttgaaaataggttattggaatatataagttatctcactgctcatgtacttgcatggttgggactcaaattttacttgatgtctgtccgttcttgtggccctatcagccttctccttcctttactcctttaatctacttctttgactaccagtggagatttcagctggactatgttgatggggtttgttgttgtttttgagctggctgtatatattttaaaattataaatagataatatattattttttgcacattgtgatcagtttgcccagaattggggatggggcagttagcatgttggggccaggaagggacaagttagataaggactgagtgcttccgttgcaggcagtttgcacaatacctaattaaccttcctattgaaaataccaaatgtgtggttacattactttaaatgacattgaattggaacttgatggcaattagttctagatacaaccttttgatctttgttggaattttaagggaaaaatgaactaaacttcatatttgttgattttaatcacctaatagtactgaaggttggaaagttgcatgtggctggatgctgttaatttctttaatagccatgactataatttaagcctatgagaagatagactgtttcgtagggatatattcacatgtgtgtgcacactcatgagttttgtctcagcaggatagaataagcaaatccatgaactggtcttctattaatactttgattctaaaaattatttgtttacttgctatggtctgttcattctgggcctaaccttaaaggctcaataacaaatacaacaaatgtaaatatgtttacattttaagacatatgcagtggttcttacagatcagttaattaactccagaaagcaaatgttagactacacatttatttttctccttgatcaagtgtaaaattctgaaacagaggctttaaaatttaaaacctcagcaaaataatccatgaatttactgattcttctgtatcgtgtgtagttaccattatgtaactatacacacatacagctacggatatagttgtataatgaaaattatctgcaaacacctaaattaaagagaaaaaaaagtagtttgtaaactcatttgtgatctactgaaaagaggttatattaaagcaaattaaaatattttccttctctgtcctctgaaatgactgcagtagatactcttagttatcccatttagggtggttggagggcctttttaatttaattgaccccccgaggtggtcttttgttttaaacagggggcaacagctggatctccaagtacatatggattttgtatatataggagatttttagaaaaatcaacaacctaacaccagattcaagtcacataaaagtgttccaataaaatggatggatgtctttttcctccccattttgctttatactgagtaatgcactcttgcaagtgtatacaaaaactaaatagacttctgccctccaacatctttttattgcattacttcaaaatcctaattttgtctctactgatatgtcttattaacatctgaaaaatatatatttttttattggcaaaattctaatttg

SEQ ID NO: 243333 - DNA, 1429 bp, Homo Sapiens
ttgggcgaataaacaacaaataggaaattttgaaagtttttttcaagaacttgagtgtttattttagttttccataatacagctttgtcttatattttaggaagccacagatgatggacataacaacaaccttcttcctcagattattcagtgttttgcatgtccaaattgcttccttctttttagcagaaaggaggagtgttcaaagcatatgtctggaaagaatcatttccatcagagtttcaaactgggtgataacaaaggaattgcacatccaatatctttcccatcttttgcaaagaaacttttgatctctctgtgcaaagatgttccctttcaagttaagtgtgtggcctgccacaagacactgcgttcccacatggagctcactgcccatttcagagttcattgtcgaaatgctggacctgtagctgtagctgagaagagcattacccaggttgcagagaaattcatattaagaggttattgtccagattgcaatcaagtctttgtggatgaaaccagcacccaaaatcataagcagaattcaggacacaaagtccgagtcattaactcagtggaagaatcagtcttactctattgccacagcagcgaagggaacaaggatccttcttctgacttgcatttattgttggatcaatcaaaattttcatcacttaaaagaaccatgtctattaaagaatctagctcactggagtgcattgccattccaaaaaagaagatgaatttaaaagataaaagccatgaaggtgttgcttgtgtccagaaagaaaaatcagtagttaaaacctggttctgtgaatgcaatcagcgattcccaagtgaagatgcagtagaaaagcatgttttctcagcaaacacaatgggttataatgtgtggtctgtggaaaggtatgtgatgattcaggggtcattcgtttacacatgagccggattcacggagggcacatttaaataactttcttttctggtgtcggacatgcaaaaaggagttaacaaggaaagatactatcatggcacatgtgactgaatttcataatggacacagatatttttatgagatggatgaggtagaaggtgaaactttgccatcatcctctacaacattggataatttgactgctaacaagccttcatcagctattactgttattgatcattccccggcaaatagttctccgagaggtaaatggcaatgccggatttgtgaagatatgtttgattcccaggaatatgtaaaacagcactgcatgtctttggcaagccacaagtttcatagatacagctgtgctcactgcagaaagccttttcataagatagaaacattgtaccgacattgcccaagatgagcatgacaatgagataaagattaaatacttctgtgggctttgtgatcttatctttaatg

SEQ ID NO: 243334 - DNA, 1636 bp, Homo Sapiens
ttggcactagcttccatggcagacaaagccgttgtttgtatgagagtgaactgcttacattctcgcatcaacactttccctcaaaagctgaagtttccctctgcttgcctcttctgtttagactgatggaaaatatttgctacttatcttcactacagaattgtcaatacagaagtctgtaaaaagtttcattaatttattcatccttttgaatcataggagtcttttaaaaaaatcggatatatttacagagtatctaatgtttgataagttagttatgagggtctcacatttttgtagcggttaggaagagacaatgtagttaaaagtcctctatgttagagtcaagaaacttgttcttgatgctttcactaagagactcatgattttggattaatctcaattttgagattacctataaaatgtggaaattcagatggatagttatgtcttaaatatttcacatcttttaggagaaacaagttgattgtatgagatttcatttacatctgtctgcatataaaatcgggtaaatttcttgggctttcactttttttataacaataaaatgaaaatgagcttattaatagattagaattaaaattcaaaactaatgcaattcaaagaaaatgtaccatgttaacaagtatttttgccaaaatggaatttctgctcataaagtggccatgacagtgacttaaaccctagatgttaggaaacgacctcttggatttatcacagtgcctcactcttagttcagactcttaaaaacatttcttgtgggaagtaatgactgctaagtaaaaatgaaagttgagcaatgattcttgtgaattatgagttaattaatggtatgactgcattttgttgaagtctcatgatttaaagatgtgctcattttttttgctcatgatttaaagatgtgctttgatactctgaaggaccaaagggcagtgaatcactgtaaagctgcttttgaaacatgccttagggcaaattgtgagccttcatttgtgtccagaatggaaggaacagcaagaagcatgggtgagtcataggacaaaaacacaaaatgtcattccaaagacagggtggtgaccttatgtctgagtatgcaaaaatccaactggggaagtaagaggcctgatcttaaaagttcatgtattaagggaaaacccatacttttatcttaggagattatgattatataattagttttgtttgataattcagatgagttacctctgattcagtttgaaagtatcccagatcaagcacagttcaaacacagacactcctgggactggttctgctttttgtgattggaataaggggtcctgctaaggtgtgtgcttctgtcctcagatttggaacagaatctaaattccatgtgtgacgtaacctgcttagtcacaagcaacattttcagacccctttcctttaattttagaagaggctgttgatttggtataattatttgttaatgaatgcattttgtgttcattgctaagtataaaaaaagcacatataggatagcttgtggcgtattaacaaatgcttgagagataaaatataaaggtatataacagtaaaacatgaaagaagtcattcaaagcaatttacctaatgaaagaga

SEQ ID NO: 243335 - DNA, 1135 bp, Homo Sapiens
ttggcgcacaatcactaatctgcagcagcagatccagcagcaccagcgccagctggcccaggccctgctcgtgaagcagccaccaccgccaccgcccccgccgcacctgtctctgcacccctctgcaggcaaatcggccatggacagcttcccctcgcacccacagactcccggcctacctgacctgcagaccaaagagcagcagtcttcacccaacacctttgctccttaccctctcgctggactgaacccaaacatgaatgtcaacagcatggacatgaccggtggcttgtcggtgaaggacccatcccagtcccagtcacgcctcccccagtggacgcaccccaactccatggataacttgcccagtgccgcttcccccctggagcagaaccctagcaagcatggtgctatccctggaggtctaagcattgggcctccaggtaagtcctccattgatgactcctatggccggtacgatttaatccagaacagtgagtcaccagccagtcctcccgtagctgttccccatagctggtcacgtgccaaatctgacagtgataaaatctcaaatggctctagcatcaactggcccccagaattccatccgggagttccatggaaaggactgcagaatattgaccctgagaatgaccctgacgtcactcctggcagtgtccccactgggcctaccatcaacaccaccatccaggatgtcaaccgctacctcctcaagagtggagggtcctccccgccatcatctcagaatgccacgctgccttcttcgagtgcctggccactcagtgcctccggctacagtagctctttcagcagcattgcatccgcacctagtgttgcaggtaaactgtcagacatcaaatcgacgtggtcctctggccctacctcccacacgcaagcctctctgtctcatgaactatggaaggtgcccagaaacagtactgcacccacgaggccacctccagggttaaccaatcccaagccctcctccacctggggtgccagccccctcggctggaccagctcctactcctcgggttctgcctggagcaccgacacctcacgaagaaccagcagctggctcgttcttcgaaacctcactccccagattgatggt

SEQ ID NO: 243336 - DNA, 863 bp, Homo Sapiens
actttgtacaaaaaagttggatcctctgcgtccccactcctccttcagggactggcctgagaccggggcacagggtaggggggatcccaacactcctccctgtggaggaggcagttagggaaactaggatccagccaaggcccggggggagacccgcatgttgcttggtctgctcaagtcggagtcaggtttcagtgtcttttccctcccttagcccaaccctccaaggcctcatgtctcctaagcatgctgactgcatccgaaaggcccccactcaccatggtctgccctcaccccacatatgtgtgtacacgcgcacgcctgtatgtgcgctgccctcagacatgcaagtgaaaggaggaggcttctgtgtaaatgcactttcttcctcccctctttctccataagaccccaggcagaggtgggtgcctcccctcccctctttgtcactttggtttcctataaatatgtatgtatcgtatgtgcatctttgctattgtaaataactttgaccttttttgttcctgttcctgaagtgctggaggcagttatggaaggagctgcttagggaagaggggtttcacttgtatctccttagttaacaacccagttccaggatcgagcctaaagcgggagccaggcctgagtgttcctgtccctgtgagtgggaaggtcttctggctccccatcccacctggctccagagcctgccctccacagcttgctgccaagctactccctccctccctggacttctcatcttcacaagatggggatcatgggggtttcttaccccacctatgtccccctcttccccaccctgtccctgtagaaaaccactgaagcaggtacggagctgagga

SEQ ID NO: 243337 - DNA, 949 bp, Homo Sapiens
ttggcacagactggatggacacagagtgcccagaggccaagcggctaaaggtagaggagccaggcatgggggctgaggaggctgtggattgccgtcagtggactcaacaccatctggttgctgctgacatccgcgtggcaccagccatggcactgacaccaccacagggcgacgcagatgctgatggcatggatgtcaatgtgcgtggcccagatggcttcaccccgctaatgctggcttccttctgtgggggggctctggagccaatgccaactgaagaggatgaggcagatgacacatcagctagcatcatctccgacctgatctgccagggggctcagcttggggcacggactgaccgtactggcgagactgctttgcacctggctgcccgttatgcccgtgctgatgcagccaagcggctgctggatgctggggcagacaccaatgcccaggaccactcaggccgcactcccctgcacacagctgtcacagccgatgcccagggtgtcttccagattctcatccgaaaccgctctacagacttggatgcccgcatggcagatggctcaacggcactgatcctggcggcccgcctggcagtagagggcatggtggaagagctcatcgccagccatgctgatgtcaatgctgtggatgagcttgggaaatcagccttacactgggctgcggctgtgaacaacgtggaagccactttggccctgctcaaaaatggagccaataagacatgcaggatagcaaggaggagacccccctattcctggccgcccgcgagggcagctatgagctgccaagctgctgttggaccactttgccaaccgtgagatcaccgaccacctggacaggctgccgcgggacgtagcccaggagagactgcaccaggacatcgtgcgcttgctggatcaacccagtgggcccgcagcccccc

SEQ ID NO: 243338 - DNA, 1230 bp, Homo Sapiens
  misc_feature (746)..(935): n is a, c, g, or t
  misc_feature (1138)..(1146): n is a, c, g, or t
ttctttaatgttgggtagagttcaccagtgatggcctctaggcctgggcttttcattttctttgtgagaagtgttttaaattactaatcccaatctctttacttttatagacctagtcagatttttccatttcttcttcaatcagccctggtagtttgtgaatttccagaagtttgttgatctcctcacttttcataagtctattcagatttttgcatttcttcttcagccttagtagtttgtgtctttgtagatgtttgttgatttcacccatgttatcaaattgttggcatacacttgtttgtaatattccttgataatcagtattccttgataatatttctgtatagtcaatagtaatatttcttcttcagagtaatgtaatctttatatccttcctttccacctcagtctttttagtggatagatcactattaattacacctcctgctgatgtttcatttcttgttactctaattacaaaatacatacttgaaaatatggaaatgtgtaaaatagaaaatccacagccccaaaacctcatcattactgtttgtctagcatttgcctggctagtctcatgtgcttatttttcccattaacatttagaatcattttgagcaagtttttaaaaaatgacttcataagtaaatgaggaaaatttttacctatttacaatagagtatcttgaatgtagcatatttatccctttattaagttttttgatgcctttaagtgagttgggnnnnnnnnnnnnnnnnnnnnnnnnnnnnnnnnnnnnnnnnnnnnnnnnnnnnnnnnnnnnnnnnnnnnnnnnnnnnnnnnnnnnnnnnnnnnnnnnnnnnnnnnnnnnnnnnnnnnnnnnnnnnnnnnnnnnnnnnnnnnnnnnnnnnnnnnnnnnnnnnnnnnnnnnnnnnnnnnnnnnnnnnnnnnnnccactgcacccagcctaccgatattctcttatactgcatatgatcacataaaaaccaactcaaataaagacctgaagtatttatccttacaggtaccgctaatgacagaagaagctatgcaattttttattctgataagtaatacaattttgtaaatgtaaactttgatatgttggaaaatagtaagcaaggggaaggtggtnnnnnnnnntatggggccatcatcagggtagtgtgaacaaaaaatgataaaatgcacgttaagaacttagcacaggctgggcatggtggctca

SEQ ID NO: 243339 - DNA, 1468 bp, Homo Sapiens
  misc_feature (218)..(252): n is a, c, g, or t
  misc_feature (1090)..(1167): n is a, c, g, or t
ttggcttccctgcagccagtcattggcatagcacacgtatgtgtatgggcggtgcctgaacactggtctggtgtgaaggttagggcagggagttttattctattcaaaagagacactgctggcttcacattacattggtctctaattttcacttgcttccaaacttactacacccttgacataggttaaaaaataatatttcatagcaacggtctggnnnnnnnnnnnnnnnnnnnnnnnnnnnnnnnnnnngagatagggtctcactgtgtcacccaggctcacttacaggctagacctcctgggctcaagcggtcctcccacctcagcctctggagtagctgggaccacagttatacatcactatacctggctaattaatagcaagaatctttgccttgataatctcattccaaagaaataactataaagaattttttaattccatagaaatattgtctatagtgaccaccaccacagtcaatctggaaacttgaaggtctaacctgaacgtctggaatattattaagcaaattctcaaactggtagaatatattaataaataatagagactaacagtgtgggaaaatgacaaaaagaactgctaatgtactctgtgattataattatgtaaaaagatgtctcaaagtaggcagagcatggaagattacatacaaaaattaaaatagctgtgttagtgttgtgttactataaacattaaatttttccctttatgacattactgacaaggctaatcccccctaaaatggagtattttcctatttggtgccacaaagccaatacacaaaattgaaagtgtgcatctagcagtgcaggctttatttgatgcccatagaactgagatgtgggagcctggctcacaaatcaacttctcagcccatgagggatagggcatccccctatgacagccaagaaatcacaaatataggacattccccatgagagccaggaagtcacagatatggagcatctttaatgaaggggttggggaattaaaagcaaggggaaaagtattcatgtcttttctgggaattaggtagataacttctcagaaccagagtttttgtcnnnnnnnnnnnnnnnnnnnnnnnnnnnnnnnnnnnnnnnnnnnnnnnnnnnnnnnnnnnnnnnnnnnnnnnnnnnnnncatttagcatggaaattagattataatgaagttagaggttcttcagaggtcaagtgagctgccatcttggttcccaccactcttagctggtttggtgtcatgatggggagcttttgaccacagacatcccgtttcctaaagataaccagagttaaggtggggaagaaatttacttatgtcacacagacgttacactagggtaacaacattactttgacaacaaaaaataaatgcactttataacagaaaaaagtccaggaaaaaattgagacactttaatatttgttattggtctgaaaaa

SEQ ID NO: 243340 - DNA, 362 bp, Homo Sapiens
gtgacactcgttttatagcatcaggctggtgaccagaatgtcatggcttctgggcagaggccagcttccatgccgtgtcctgtcttcctagtgcagatgtccccagctgcagtgagtaccagtgtgagggaatgggctccagactcccagaggggccacagggatggccacgccaagctctggggagtagccgattccccagcacctgcctgcccatgcacctttggggtgactcatgagacagggtggggctcccacctcccctctcccaaaaggcaatcagctataaaggctctcagaagcccacccagccccaggtcatcaaacaagccccagttccatggcaaccattatacccccaa

SEQ ID NO: 243341 - DNA, 1262 bp, Homo Sapiens
ttgggcctggatagctgccggctccggcttccacttggtcggttgcgcgggagactatggcgtcctcctcggtcccaccagccacggtatcggcggcgacagcaggccccggcccaggtttcggcttcgcctccaagaccaagaagaagcatttcgtgcagcagaaggtgaaggtgttccgggcggccgacccgctggtgggtgtgttcctgtggggcgtagcccactcgatcaatgagctcagccaggtgcctcccccggtgatgctgctgccagatgactttaaggccagctccaagatcaaggtcaacaatcaccttttccacagggaaaatctgcccagtcatttcaagttcaaggagtattgtccccaggtcttcaggaacctccgtgatcgatttggcattgatgaccaagattacttggtgtcccttacccgaaacccccccagcgaaagtgaaggcagtgatggtcgcttccttatctcctacgatcggactctggtcatcaaagaagtatccagtgaggacattgctgacatgcatagcaacctctccaactatcaccagtacattgtgaagtgccatggcaacacgcttctgccccagttcctggggatgtaccgagtcagtgtggacaacgaagacagctacatgcttgtgatgcgcaatatgtttagccaccgtcttcctgtgcacaggaagtatgacctcaagggttccctagtgtcccgggaagccagcgataaggaaaaggttaaagaattgcccacccttaaggatatggactttctcaacaagaaccagaaagtatatattggtgaagaggagaagaaaatatttctggagaagctgaagagagatgtggagtttctagtgcagctgaagatcatggactacagccttctgctaggcatccacgacatcattcggggctctgaaccagaggaggaagcgcccgtgcgggaggatgagtcagaggtggatggggactgcagcctgactggacctcctgctctggtgggctcctatggcacctccccagagggtatcggaggctacatccattcccatcggcccctgggcccaggagagtttgagtccttcattgatgtctatgccatccggagtgctgaagagccccccagaagaggtctacttcatgggcctcattgatatccttacacagtatgatgccaagaagaaagcagctcatgcagcccaaactgtcaagcatggggctggggcagagatctctactgt

SEQ ID NO: 243342 - DNA, 1252 bp, Homo Sapiens
gaattgcagaaaaagctcttccttcaaaagttcctgccttttccgacaaggacagcctgggggatgagatgttggcggctgcgctcctaaaggccaagtcccaggagctggtaacctttgaggatgtagctgtgtacttcatccggaaggagtggaagcgtttggaacctgctcagagggacctctatagagatgtgatgctggagaattacgggaatgtgttctcactggatcgtgagaccaggactgaaaatgatcaagaaatttctgaagacacaagatcacatggggtcctactgggaagatttcaaaaggatatttctcagggtctcaagtttaaagaagcctatgaacgagaagtcagtctgaaaaggccgctggggaactcccctggagaaagactgaacaggaaaatgccagattttggtcaagtgacagttgaggagaagctaacccccaggggagagagaagcgagaaatataatgattttgggaacagcttcactgtgaattccaaccttatctcacatcagagactccccgtgggagacagaccccataagtgtgatgaatgtagcaagagctttaatcgaacttcagaccttattcaacatcagagaatccacactggggaaaagccctatgaatgtaatgagtgtgggaaggccttcagccagagctcacaccttattcagcatcagagaatccacactggggaaaaaccttatgaatgtagtgattgtgggaaaaccttcagctgtagctctgccctcattctgcatcggaggatccacacgggggagaaaccctatgaatgtaatgagtgtgggaagaccttcagctggagctccaccctcacccaccatcagagaatccacactggtgagaaaccctacgcctgcaatgaatgtgggaaggccttcagcaggagctcaacccttattcaccatcagagaatccacactggagaaaaaccctatgaatgtaatgaatgtgggaaagccttcagccagagctcacacctctatcagcaccagagaatccacactggagagaagccctacgaatgtatggaatgtggaggaaagtttacctacagttcagccttattcagcatcaaagaatccacaccggggagaacccctatgaatgtagtgagtgtgggaaagccttcaagtacagctcggctcttgttcgccatcagagaattcacactggagagaagcctttgaatgggatcagcatgagcaaa

SEQ ID NO: 243343 - DNA, 887 bp, Homo Sapiens
gaaggggctagggccagccccaggctctgactcacgcaagggccagtgctgggtctgcagcctgtggccagggatgaacaggaatgttcctgttccccatgaggtttgctaaaagacccctttggtggtaggttgacaccccagcaagtggcctagcatggtccgaggcagccgcatagcctgtctgcatgatagcaggcttcagggatccagcttagctggaggcttgactgtgctagcctcggtggtacctgcactgtcattccatatgtcacaatccagggaagagaggctatcaccgagaagagttgtcagtaagaaggcaggacactctaacacgagcaaacccaccaggcttctgttgatccagggcagcatccccctcgcctggcagagttccttgccccacagccaaggctatgggaagcaaggcctccagcaaagctcatggctgccaccaaagcatctctgccaagatgcttcttatgatacttaggaaggatttccacccaaactggatcagggtcaccatgaccctgaatcacaaatccaacacaggctgattccaatcatggtttgaagctttagctgaaaagtttgctgtttgaaaaccatcaatgtgggggcgatgggtgtgcagggtaggaagggaacgcactattttccagtggaggaagagggtatgcctctttaggaaactgttctgggtagagactgctgtgggtgtttcctcaagcacagataataaccaggagatcaagccccaacatgcgggtaatggagtttatgtaacattgaaactcaatgactttggaactttaaaaacatctatagtaagaattcaaaacaccaagatctgaaggctatggattttctctaagagccaa

SEQ ID NO: 243344 - DNA, 1667 bp, Homo Sapiens
aaattttatttacaaaaacagacagtggggcagatttggccaacccttgatttagatgaaagtatttggttaaaaaatggaccaataaattttagaccatttttgtttctaccaaacgagacatttatttaaaaatttcaatgttgctgtagctaaaacagcattctttaggggcaattctaattttgttaaaggataagtaatattaatccttatggatacagaataatcttactctagtaagaattcaaaaattatcacagaaatccaggaaacataatttcattttcaaatgttgcacagcagatttcacatacaatattagcgagggagtgaaattccaaacagtgactcaaaacttctcagtttaggcaactctatgttttattttaacttttcatagagagttttaatacatagctttctagggaaatacttgatttgctgaattaaagataatgtcttgagataaagatgaaataagagaagaataagaatagtcattaggaagagttcaacttatcacatgtaggtaattttgtccctaaatcatctaaatccagatgcaaatggaaatacccagacttcattctaaggagaaatgcacatcctataatctaagtgtttataagagaggctctggaatcactaaccattacaatctctcggtgtttaatggcaaatgaaattgccaagttcacaggaaccttacctcctcttcttatgatccaaatgaatgaagatattccagtcaagttacacttagtcaccactggtaaccagctgttttgccctatgaagtctagggtatattttcagcatgaagggtgatatgcaacaatttcttctgcaaacagaaatatatgcacatatccctgctgaaaatgtagcctagtaaattttcacatgaaaatgaatacatgctcacaagtggcaatgtgctaggtgatgtttctggttgaggtctactttaggagtcaaaatgtgtaagccttgtggagtcaaggcagtggtcctgtgtatataggtatagaaaaagtagctcacttaatcctttctcgccaggagtagggattttcccggaacgacatccattgtcggcaatggacgcaccaaaataacgccggcgccagtgagttaaccacctctgtcctcttttcacctattatatttttcatgcatcatccaacttcccaaccatcttcctgtttcttcacagaatgcacgctaggttctcgtttttcttcagcacgaagttggaaatggagttgagaaaaggagacacatggtcagctggtgatgttaacaagctccttgctgccctgagaagctagatggaaatggttcaagttacaagggggatcatcatcagatctgggaggacaaagagtaattcatgaagcttcattcccttccctcccaccctctttcatttactgatgattcctatagtctgccatcacagcaaaaccaagattaaggaatctgaagcaatccctttctgttcttcactccatccagtgtgtagaaaagccaagcggaacacatgtccaccaatgttatggtggcccccggttggctggggagacttgaaatggccataaccacataaccacaatcttagaccaatgctttttagtacgatcttggaattaaagatcagccaa

SEQ ID NO: 243345 - DNA, 922 bp, Homo Sapiens
ttggcggtggagcggaagtcactccctgaggcagtggcgacagcggcggcgagaggatgaacaacaagttcgacgctttgaaagatgatgacagtggggaccatgatcagaatgaagaaaacagcacacagaaagatggtgagaaggaaaaaacggaacgagacaagaatcagagcagtagcaagagaaaggctgttgtccctggaccggcagagcatcccctgcagtacaactacactttttggtactccaggagaacccccggccgtcccacgagctcacagagctatgaacagaatatcaaacagattggcacctttgcctctgtggagcagttctggaggttttatagccacatggtacgtcctggggacctgacaggccacagtgacttccatctcttcaaagaaggaattaaacccatgtgggaggatgatgcaaataaaaatggtggcaagtggattattcggctgcggaagggcttggcctcccgttgctgggagaatctcattttggccatgctgggggaacagttcatggttggggaggagatctgtggggctgtggtgtctgtccgctttcaggaagacattatttcaatatggaataagactgccagtgaccaagcaaccacagcccgaatccgggacacacttcggcgagtgcttaacctacctcccaacaccattatggaatacaaaactcacaccgacagcatcaaaatgccaggcagctgggcccccaaaggctcctttttcaaaacctctggaagccgcggttgaatgtgccatgaccctctcccctctctggatggcaccatcattgaagctggcgtcatcggagtctcttgttctggttggcgtgctacctggaagatctttctgtcctggaccagaggaattggagagcattttatgtttta

SEQ ID NO: 243346 - DNA, 2037 bp, Homo Sapiens
  misc_feature (1849)..(1857): n is a, c, g, or t
ttggggaagcgtaacctaaatacagaagagtcacaaaggagcaaactgtgagcttcacagtgcgggcacccggggagggaggcagctgcgctcaccccaaagccccagcaccgttcatcaggcatgtgtgagctccacgaaatggagtgtgcagtcccttctttgtgtctgtcctttgctcccccatgtgtgtgagaccctctgtgtcgcaggtgcagatgtcaccgttctgctgcagatgggtatttggatggtttctggatttgggcttgtgcagagagggcagccgcagccatctcctggggtgtttctgcccagtgccgggcggagctgcctgctcctaacatcggctcccaggagcattagcaggtcccccaaagtgaggttttcaccttccacagatcgtaactgccaccacccatcgtaggacttgttcagcagagaaagttgagcagtggcctccttcctctgggtcagctggccacgccgcagcttagggtggggctggggacagctgggatgcttagatggctctgggaagggcactttggggcaggtatgcagatgcccacctggtaggatcggctgagcccacctggtaggatcaggctgagctctcggctgatgcctcccctccaggcgtgcccctgtgctgtgccaccctgcagtggctccttgctgagaatgctgctgtggacgtcgtgagggcccgagcactatcttccatccagggagtggcccctgatggcgccaacgttcacctcatcgtccgagaggtggccatgaccgacctgtgcccagcagggcccatccaggccgtggagattcaagtggaaagctcctctctggccgacatttgcagggcgcaccatgccgttgtcgggcgcatgcagacgatggtgacagagcaggccgcccagggctccagcgctcctgatctccgtgtgcagtacctccgccagatccacgccaaccacgagacactgctgcgggaggtgcagaccctgcgcgaccggctctgcacggaggatgaggccagctcctgtgccaccgcccagaggctgctacaggtgtaccggcagctgcgccaccccagcctcatcctgctgtgaccaggcgggcctgcccctgggctctggccacgcttccagcctctgtcacagcccccccaggcctcatgggttagagggaaaccgagctggcctggccagagccgtcagggaaggtaggacctggccacgtaggagcagaacgctcatgaaagtgcttggaggccgtggagcacaaagcagattctgattgggagcaaccgaggcgggctctgaacctggccggtccagcttcgcgtcctctgctggtgtctctccttctctgaccgcggccgcagcccctgcactcgccttcctcactgctgggcagccttcccaccaccgcagcagcccctgaggccaggaggcagtgcagggcattctggacccggagggccagagaaacaggatttctggggtttggacttggggtgagtttgtaactgttgctgccacaccaccaggagcaccggctgcccctctgggtggcactaccaggtgccccacggtacccttgtcacactgttcacacctgcccggctgcccactctgggaccccgaggtaggagggtgctccctgagaccaaagcacaaaacagcatgcagggagctcctgcaagtgcccgtggtctcgtgccacaccaaggaagggccagcgggtggcctgtggccggaatgctcaacaaataggtgcctccggccggggcagtacccagcactgtgcactattttcagggccactcagggtggcgctgtggccnnnnnnnnnccctgagccccagcccccagcctcctccctcagcctggggtacggcccacctcctggtggtggtgttttcatttggggagggtgctcgcgccgctcccgctgcaggcactgttcgcgatgagtgcgggtaggagccgtgaggtggttttttgctgtgacaaacgaccctgtctgtccgtg

SEQ ID NO: 243347 - DNA, 1325 bp, Homo Sapiens
tgccttcagatgaagcacagagaggttgttacttgcccgggccatccagtaggctggctgggtctggtgtccccatctgtggacccctctagggtctgagatgagatgagaagtgtctcctgtatccacctcttcctggcctcccttcccccacttcttggtccctgtccactcctcaggttggtgctctcaattcttgaaagctctaggcacccccgcctcccgccaggctccccgttggctcctgggcaggccagctgagaatgaacaggagatggaggcaggcagcccaggctgcagaggtgagggatgtggggccaggcccagagggctcagcctagaggcttccaatctcagattctcctgcctgtggtcatctgtttgtccatcaccccaggacagggcagacagaggggcaaagcactgggggccccagagcctagcttcccctcagcctgggggacatcacagcatttcagtgtcagtcacattttaaactgatcagcctttgtataatgttttttaaatcatttctaaataaaacagaaatacagagtgtgtcatttccctgggatgagaaaacaaagatcaggttccaagagtaaccttaggacgctctgggaagagaaccgggtcctttggggtgtctgggagctgcccacccatctcctctgccagaccggcggtcagatagcctccctctacaacaggctggccctgggggcccagggttattggggttccaggaacacagcctgatgatgcctccttacgatccaggatggagagcagcccccccaggagtatggggagggtcactgtggcacgggcttctccatgacctgggacatgacctgggacacatagtcaagagcagggttatcagcaatacagatattaataaaaggcagacgaagtcaggaggtcagcaactttgcgggcttaccaggaggcctgtcctgcctctggaagccagcgacagagagggatgcccccgacccagccagccggagaaagggatggggtggtcacgaaggtctgagctgggtctgggtgtaggctgggaagcaggctggggtgtagactgcgaaggcggccctgccgggacttctttccagtccccggcgacctcttcgaattctctgctatctctggggagcctcgggtgggagggggtgtaagagacgcagggacgtggggagaggagacaaggcaggcaagaaccacaggggacggcggacagacgggcgacatcctgcggaggacgccgtcagtaccaggaagtgcaggcgatgaggaagcgcacgtcgtccagcggcccccac

SEQ ID NO: 243348 - DNA, 830 bp, Homo Sapiens
ttggctcaccatcaccgcccacgacgacaggggcatccgcttcctggacaatcggacaggtaagccggtgcactccatggttgcacacctggacgcagtcacctgcctagccgtggaccccaacggcgcattcctgatgtcaggaagccatgactgctccctgcgtctctggagcctggacaacaaaacgtgcgtgcaggagatcacggcccaccgcaagaagcatgaggaggccatccacgctgttgcctgccaccccagcaaggccctcattgccagtgctggcgctgatgccctggccaaggtcttcgtatgatgcccacctggccctgccctggccgccacgctggctggggtgtagggccgggcaggtggggctgaggggactcccagcctcgctggaggtgcagaggcctggcctctgtctgtttgccgtggagcctggtggtgctaacggccctttccccaggaatccctccccaacggctgccttccccaagcatccagcctggggatgggcccctttcaggaatcacccccgaggatggcctcggggtttccccctgtgccctgacagccgctcctggtatcagagctgctttccagagggcagcacagccagggccgggtgtctttagggatcagtttttccaagactccagaaggtgccaggttctccccttgagctcctgctcccccatcccccatcctcccagacctgggcaggagctgtgctgggagaaagggtggcagccgggagcctcagacctgatccccggcctggctgcccctcccctccggccctctccactgctttccatacactaacc

SEQ ID NO: 243349 - DNA, 1253 bp, Homo Sapiens
  misc_feature (741)..(862): n is a, c, g, or t
gccagtcagacatatttacaaataaacagatttttttaaatttaaaaagtttgttaatgaaaactactatgaaaaaaccctgaactatgataaaggaaaataaaatgatcttaaaaatgataagctatcagtttgtgttgaaagttgtaaataaaaactgcaattaataataacacaatacacttagagataatgttttcaattacacttaaaagttatgtatctcaaaacagaacattttaaaggaaatattggaaaactgaattttagatctattatttcagcaatttcttatatgtgacaaagatcttttcacgagccctgttttctttctcttcttattctttaaacattagtaatcttaattttatcactaaacttcaagtttgcctaattaatcttttgaaatcctatgtaaaagaagagttcttgtacacagaggagaggacagagaagagtttttattacactctcaaaaatatttgtgacacaaaatggttactacttactattccacccctccatttcaactttctatatctcattatttacaactattgagcactagcctcaaccaagatcaattacaatttaaattctgcaatttttaaatgcagatattgttggtggtgataatattaaaaacaatgatgagaatgataataacagtataagtgggtacttaccatgccaggttatctattaagtccttacacaaccttcaaaataatccttataaannnnnnnnnnnnnnnnnnnnnnnnnnnnnnnnnnnnnnnnnnnnnnnnnnnnnnnnnnnnnnnnnnnnnnnnnnnnnnnnnnnnnnnnnnnnnnnnnnnnnnnnnnnnnnnnnnnnnnnnnntttattctcagcattaggttatgcaacctcccaggattccttattttttagtacacaaacatctaaattttgggaatttttggttaccataggataaagacggcagcctatagctaaatttccccaaataatctccaaaacatatgcataatcacaagaagagaaataaaacagtgacagggcttcagtattactagaaaacagaatattataaatttcaaattacttgtaagtagaaagacagattgcaaactccatcagcactctctctggatttcacattgttacaatctcggacagagagcagaaaatacgaagagatcacagaagagagtgaaacgccttatggtaacaaaacacagtcctaagaaaaagaaagacccacacccaa

SEQ ID NO: 243350 - DNA, 874 bp, Homo Sapiens
gaaaaaatgtgttacttttaattttcaatttatgtgagcatgcaacattgctaaatacaaaagtcatacaagctcacaaatgacttcagagactgccactcttgtaattaaagaacaatttagggtctattaagacatcataaatcatagatcctttcctattttcacttgatgactacacatttttctccctactactactgctactacaggtttcacttagaagctttgctgcccggcagttacatttctttatccattattgtttccctgaagagaaatagcagtatcattcatcttctaaaatggtgcattaccacagcatctaagtaagactcaagtatagggcatttaccattggctgttctgggagtattatctaagaattggatttcaatgtctgttatttatttttaaaaatatttctatgaatttatgataatatgttggcataggatgattacaattgataaaaggtaaatttaacaatttcatgcttgttgcaaataagtcaaaaagccaaagtccccatgtttgttggtaattaaacaaaatgagtagcatgaaacataaaaaatatgaatcatgctgtgtttacagaccacatgccagaaaaatatcttctgggaaatataccccccaaataagacataattgaatttcttttttttaaaaaagatatactttatgtgacctactcatatctgtgttattacccatccagggagccttgagaacggcaatttctccttctgggattcagtttccttctgtaaaatatggaggctgaagaagttcatctctaaaagttcccttacagctctgcagttggctctaattttatgacatgtgccctggaaagctccttggccaa

SEQ ID NO: 243351 - DNA, 2116 bp, Homo Sapiens
caagtatccaagttggccaggccagtgcctgtacctggaacagcctttccacagaataagaagagtccctacttaaaacagctttaagctaatttccatcatactatttatcacagtctaattaccagtttatcagtctcccattaaagtgggggctccctgagagcaaggactgtcatcttcactttgccttgaaaagtagacataggtcccaaattatctgctaaatgagtaatgaacaatatttctattcagaaggtgtgtgcttgcccataattaatacgcaaatattctaaactataatctgatttaaaatccccaaatttaaacaagaaaattataccaaggctttgagatttagcttgtgctaaatcattttttaaaattgtagctctgaggcattttattataaaaacttagtactcatatacataaactaatacgaacttaaaattcatcatacatttacttcattttttagcttgaccttctagtaaatctttagcttcattgattttggctgctatataaggagatcctcctataggaagaaagaaaaaagaacagttacaatatggattctcaatttctgcttggtaaaaagctactcttgtttcaaggactccaatgcttatctgagggagatttagcagaaacagtgttttaatttttaaaaaataaccctgacactgcaactggatgaccaaatatatggtaatatatgtgaccaatgagaaatgaagtaatttacgtgggagatatttctacaaaaataacacctttttagaaagcttaaactgatagaaataggatttctatcatatatattagatatatatgtatatgcctttgaactggtgttagcctattcatgattacaggtcataaatgaacatcaattataccatgttattttaataccatgatattctcagaggcttctgagctgtttactggaaagatcccagtttgctttacatcctttttctgtccagtttttcttttcctgttatctactgtcccttcacaatgtcatctacagctgctttcctacgaatctgctggaggagtgattctcaaagtatggtcctaagaccagcaagaaataacaggaaatttagtataaatgcatatttatggggctccactgccgacctactgagtcagaagccctccatataaaacaagctaaatttcataaaagatactgtgaagtagatatcaaacaattataaccctgtttaaaatgtcaaaaccctttttattaatgaaagccctctcctgtataagtaaaaggatacaaacactagaacatgaattctgtggtctattttttggtattcaaagaaattcttgctttccttcaacacagccaaggctgcatagaagtctatcacaaacgaataaataaatcccataagtttctatctaggtaatctccgtttcaaggtatctaaaatggataaggaaaaattacattttagttttacgaaatttaacgttttaattataataaatgtaggccagaaaaacccacaaaacatagtaatagtagcacttacatctgctcattctgtaagtaaagttttcacttaatttcttttaagacaccaaaaatatatggctccagcctaggagacaggacttacagatttaagtgttacctttctaatagccaggaatttgagataaaattatcccattaataactattggtcacaccaacaacatcaacgagaatttaatgactacttacctttgtcaggatgatttaaaagcataattcgtcgatgagcatctcttattttccctttattggcagtagggctaattaaaaaaagaaatggtatttacttcatcctacttctgcatcacatcaaaaaactgtacataaaggccaattaaagacactgtgaaactgtagtaaattaacacaacagtatgaaaagctgtttagaaacctcaacacacccaatgcgtatcctaaattgggaaactacttagaaaagtaaggcactctcaaaaatgtgttgaacttgcagtacccattacaacagtccttttattgataagaaacgcatgtttaaggatttgaaaatgaagaaggaagagccaa

SEQ ID NO: 243352 - DNA, 1217 bp, Homo Sapiens
  misc_feature (948)..(1004): n is a, c, g, or t
ttggcattgcagtagacaaaaattcacgtgagggttgtgtatatgttaaatgtctgtctccagaatatgctggaaaggcttttaaagcattgcatggctcttggtttgatgggaaattggttacagtaaaatatttacgactagatagataccaccatcgctttccccaggctctcacttccaacactccattgaagccatcaaataaacatatgaactccatgtctcatcttcgtcttcggactggcctaaccaattctcaaggaagttcctgaaaagattttcttccatttctaagactgttatttacaataggaaaattcctgtttggctttttgtcttcctttttaaatgctttttgtatgtaatatttttattgatgaatacatctctgaacgttccagaagtcttaaggttccaaagggatttagcagtgaggcagcaatgctgagtaggtaggataattatttcattcagtttttggagctcagttaagccaatacatttaaagttttgcatgaggaacactgactttattaagcattttcagatgtggtggttgtatttttgccccaagaagtgtttggataaccacacaaaagcatgatgaaaaggcttcttgtagtcccataatttcttgtgaactaatgttgtgaatttttgtatacagtcacctgcatagttcctacaggctaatgtggtaaaactgttgatttcccaatttaaccttaggtttctgttgcttataagcgattcatttgctacggctggaatatgggaaaattaatttgggcttagtggttacaaatatgtgtaagtggatgtatatgtacttaaactggctttgtatatatgtataaatgctggtggtggtgaaagtagtcttgttttatgaggatgtctgcattaaagcagtaaaataagctttccattttattcataatctannnnnnnnnnnnnnnnnnnnnnnnnnnnnnnnnnnnnnnnnnnnnnnnnnnnnnnnncacacacagagatatatacatatggctgtacttttgcatagatcaaacagccaaacacctggaagtattagatacaagtttaaaatatcttttataggttttatataaaaatgtctgagtatgattttgtgtgaaagttctgataccagttgtaatagagtcaatttatgtgagcagtaaggaagaaattggcagatattgcaaaatattttg

SEQ ID NO: 243353 - DNA, 934 bp, Homo Sapiens
gagcaatgctttctttataaaaagccaactttgtacaaaaaagttggagaccaggagtcagactgtaggacgacctcgggtcccacgtgtccccggtactcgccggccggagcccccggcttcccggggccgggggaccttagcggcacccacacacagcctactttccaagcggagccatgtctggtaacggcaatgcggctgcaacggcggaagaaaacagcccaaagatgagagtgattcgcgtgggtacccgcaagagccagcttgctcgcatacagacggacagtgtggtggcaacattgaaagcctcgtaccctggcctgcagtttgaaatcattgctatgtccaccacaggggacaagattcttgatactgcactctctaagattggagagaaaagcctgtttaccaaggagcttgaacatgccctggagaagaatgaagtggacctggttgttcactccttgaaggacctgcccactgtgcttcctcctggcttcaccatcggagccatctgcaagcgggaaaaccctcatgatgctgttgtctttcacccaaaatttgttgggaagaccctagaaaccctgccagagaagagtgtggtgggaaccagctccctgcgaagagcagcccagctgcagagaaagttcccgcatctggagttcaggagtattcggggaaacctcaacacccggcttcggaagctggacgagcagcaggagttcagtgccatcatcctggcaacagctggcctgcagcgcatgggctggcacaaccgggtggggcagatcctgcaccctgaggaatgcatgtatgctgtgggccagggggccttgggcgtggaagtgcgagccaaggaccgggacatctttggatctggtgggtgtgctgcacgatcccgagactctgcttcgctgcatcgctgaaaagg

SEQ ID NO: 243354 - DNA, 1336 bp, Homo Sapiens
  misc_feature (745)..(944): n is a, c, g, or t
  misc_feature (1203)..(1247): n is a, c, g, or t
aacatgacaactgctctacgacccaaagaggaaactacagcaactactctttagcatctgttgctcccaactctgctttgcaattatatgactcaagcattctggctccgttaactattactgctgttactcccaattaaattccctctaaaaaataaaaatttttaaagctctaatttaagctctctgctgcctcatgacttcaattccatcagagttatgcattgtttcctctgtacatctttgctctgcttccattgctaattccctagtaaagtgttgtatattcaaagttccaaagaaacagaatatccaagacatcaccaatcatccaaaacacagtgtaggaggccacagttaagagaagcaagaccattagctctttttataggctcgagaacaacaggatgctttggtcctgtatcagcaggacgcttttcgggtagatcctactgccaccctagctatgggcacatgtcagagtcccatgtaataaaggagacaaaaggaaaccaccacgagtataaactaagaaaagtactccaaggtttctaagaatggagctgtataactcactttgccccatttgttacttctccacggtacttaccaccacctattacatatattttgtttatagtcagtcttccctcattacaatgaaagttccgtgaggataggaatatacagtcagccctcagtatccatggaggactagtttcaggatctcctgagggtaacaaannnnnnnnnnnnnnnnnnnnnnnnnnnnnnnnnnnnnnnnnnnnnnnnnnnnnnnnnnnnnnnnnnnnnnnnnnnnnnnnnnnnnnnnnnnnnnnnnnnnnnnnnnnnnnnnnnnnnnnnnnnnnnnnnnnnnnnnnnnnnnnnnnnnnnnnnnnnnnnnnnnnnnnnnnnnnnnnnnnnnnnnnnnnnnnnnnnnnnnnccaatatttccaatccttggttgccttaacggatgtagaacccaggaataagttctggtgtcctattgcatagtaggatgagtatagttaacaataacatattatatatttgaaaatagccagaagagtagattttgaattttctccctacagaaaaatcattatgcaaattaccctgatttgatcattacacattgagtacatgtattaaaacatcacattctaccccatatatatgtacagttattatgtgtccatnnnnnnnnnnnnnnnnnnnnnnnnnnnnnnnnnnnnnnnnnnnnnttttaaagctgtaattatctccatctggtaggaatatatacaatctgaaataaaaaatatatttgtaattgttaggacaaaatagccaa

SEQ ID NO: 243355 - DNA, 728 bp, Homo Sapiens
gccaactttgtacaaaaaagttggcaacatcctgcgtctctacaactatttttatgaccggaggaggatctacttgattctagagtatgccccccgcggggagctctacaaggagctgcagaagagctgcacatttgacgagcagcgaacagccacgatcatggaggagttggcagatgctctaatgtactgccatgggaagaaggtgattcacagagacataaagccagaaaatctgctcttagggctcaagggagagctgaagattgctgacttcggctggtctgtgcatgcgccctccctgaggaggaagacaatgtgtggcaccctggactacctgcccccagagatgattgaggggcgcatgcacaatgagaaggtggatctgtggtgcattggagtgctttgctatgagctgctggtggggaacccaccctttgagagtgcatcacacaacgagacctatcgccgcatcgtcaaggtggacctaaagttccccgcttccgtgcccacgggagcccaggacctcatctccaaactgctcaggcataacccctcggaacggctgcccctggcccaggtctcagcccacccttgggtccgggccaactctcggagggtgctgcctccctctgcccttcaatctgtcgcctgatggtccctgtcattcactcgggtgcgtgtgtttgtatgtctgtgtatgtataggggaaagaagggatccctaa

SEQ ID NO: 243356 - DNA, 741 bp, Homo Sapiens
ttggccttctttctctgggacctggggtcgcggttacttgggctggccggcgaacccttgagtggcctggcggggagcgggcctcgcgcgcctggagggccctgtggaacgaagagaggcacacagcatggcagaaaaccgagagccccgcggtgctgtggaggctgaactggatccagtggaatacacccttaggaaaaggcttcccagccgcctgccccggagacccaatgacatttatgtcaacatgaagacggactttaaggcccagctggcccgctgccagaagctgctggacggaggggcccggggtcagaacgcgtgctctgagatctacattcacggcttgggcctggccatcaaccgcgccatcaacatcgcgctgcagctgcaggcgggcagcttcgggtccttgcaggtggctgccaatacctccaccgtggagcttgttgatgagctggagccagagaccgacacacgggagccactgactcggatccgcaacaactcagccatccacatccgagtcttcagggtcacacccaagtaattgaaaagacactcctccacttatcccctccgtgatatggctcttcgcatgctgagtactggacctcggaccagagccatgtaagaaaaggcctgttccctggaagcccaaaggactctgcattgagggtgggggtaattgtctcttggtgggcccagttagtaggccttcctgactgtgtgtatgcggtc

SEQ ID NO: 243357 - DNA, 744 bp, Homo Sapiens
aagcgagatttgccccatgttttgcattcaagataaacagtttggttgttttgatcatacagcctcagtggaatgatgagttggtcatgacacacaggccttcggctctatacatttccccctttctgtttatgtattaattgaaagaatgtaaggccaggtttggcagctctcattttgtgattggcggtccacctgatttaagactatgaacagaagacagggacaaaacaacaacattccaaggattacatataagatgttaatgtggtgctttagataggtccaaggattgatgctctgcaggtgttgctggaatttcagtccagtcttctaaagaaggctgaaactcttgagtttatttaaaccaagaattttgttttgtaattcaccaatatcaaaggtgatattggatgtgaaagctccctgcaaatgggcttccacaaggtcccacggatactcactttggttatattctaagttggttacacaaatatgagtgtgattaaaatgacagcgcaattgctgttgcaattgtaagctttgtacttgttctcctaaccatagaaccatggatttcaacattgccacttcagtttgtaactcagtgttaattttattctgaagtagccatgcttggttggttgcatgtgtcaagttttccacatgctgagctgtttgaatataactatgcagagctatagattgacaatgcacaacagaagccaacttttttgtacaaag

SEQ ID NO: 243358 - DNA, 1147 bp, Homo Sapiens
ttggctgagacctgcaatgagaccaccaagcttggggactttgttcgataccattacaactgttctttgctggacggcacccagctgttcacctcgcatgactacggggccccccaggaggcgactctcggggccaacaaggtgatcgaaggcctggacacgggcctgcagggcatgtgtgtgggagagaggcggcagctcatcgtgcccccgcacctggcccacggggagagtggagcccggggagtcccaggcagtgctgtgctgctgtttgaggtggagctggtgtcccgggaggatgggctgcccacaggctacctgtttgtgtggcacaaggaccctcctgccaacctgtttgaagacatggacctcaacaaggatggcgaggtccctccggaggagttctccaccttcatcaaggctcaagtgagtgagggcaaaggacgcctcatgcctgggcaggaccctgagaaaaccataggagacatgttccagaaccaggaccgcaaccaggacggcaagatcacagtcgacgagctcaagctgaagtcagatgaggacgaggagcgggtccacgaggagctctgaggggcagggagcctggccaggcctgagacacagaggcccactgcgagggggacagtggcggtgggactgacctgctgacagtcaccctccctctgctgggatgaggtccaggagccaactaaaacaatggcagaggagacatctctggtgttcccaccaccctagatgaaaatccacagcacagacctctaccgtgtttctcttccatccctaaaccacttccttaaaatgtttggatttgcaaagccaatttggggcctgtggagcctggggttggatagggccatggctggtcccccaccatacctcccctccacgtcactgacacagctgagcttgttatccatctccccaaactttctctttctttgtacttcttgtcatccccactcccagcccctattcctctatgtgacagctggctaggacccctctgccttcctcccccatcctgactggctcctagggaaaggggaaggctcctgggagggcagccctacctctcacatgccctttgccctgcctcccctcgcctccaatggaaggctgatctgaaccc

SEQ ID NO: 243359 - DNA, 807 bp, Homo Sapiens
agggattgtaaatttcaggatttagactgtacagatttagatcttatgggacttcaacatttgggattatgacgttcaggattgtgtcttcctgggctgtggcccaaacccgtgtggtccaacactatttcacacaagaggaaagcaaaccacgtgcatagatgcaatgaaggcttaaatgggcgtcacgtatagattatatcccaggaaaacatgattaagatgatacatggcgactttttttcccagtgaaaaagatccacattctttttcttgtgtggaattaaacacaatttctgaatcaatgtaagtgtatgcaaatcaccatattcacttagctgatgctcctttattaacaggaatagaagggaggtcattcgaagagatgatggcgcgggacccaggacctgaggaagctgcagtgggtgaaggggagaaacagaggagcaggggctggagaaagagtgggaaatcatcaactaccctccttactcctggtgtctggtgttcggaacccagaggtcttctctagggcctcggagaagcttccaagtctcttcatttctctttccccacgcctgcttgtatcacaaataaagaaattattgacaactgagttcctgactagttggcacgattttagggccccttcacctcatccgagcctcatgaaggtagtgggagtcccatgggttagttagcaatagtccttgagattatttggtcatataaataatcaaaaaactcatagtcatcttgcttttctcataatgcccagctgggccaacttttttgtacaaagttggc

SEQ ID NO: 243360 - DNA, 927 bp, Homo Sapiens
tttattggagaagacccccagcacccgccccttgaggtcttaagggcttggtgtatccttggtcacgagcgctgggccaggaagcagagttcctgagagccaagtctagtggttgagagaggaccctggctgggcctggggagcaggaagccatctgtccagctgggcagcccccatgggtccttggtgcagccccggccatgtgtccagcgccccatactccatgaggggggtctgcaccccatcacacgctggttctgcaggtctgcacccctgtgaggctgcccctggggggcatgggttctgttgggctcttgctcccagcatggatgacccagcgatagcagtcagtgatgcgcttgttgggtgcatgggggccacagcgggtgcagtacacgatgcccagtgcaagcaggaccaccaaaaagacacacgttggcaccaggagtgccaccagcagccaccggtcatccctctggctgtgctcggcaagaccagcctcccccagggctgttggggctgctgtgggagctggtgagggcagccacagggccaacttgggactggggccatcttcccttgggatttggggggctttggaatggggatgtgtagggctgatgggtgaggtctggttagtggggctctgagagggcaggagggtggggagggctgcgggctgggtggcagcaggcacagagatttgatgggcaggagacacaggggacctggaggtggtggtcagagagggctgggcagttgggataatgggaagctgggtggcctgggttctgaggacaagggcatctggggcttgagggggtagctgggcaccgagggtggtgaccagaggggcatggttaggtgggattccaggcaaatgagtggtggtctgggtgccagcgacccgggggtctggaaacccaa

SEQ ID NO: 243361 - DNA, 836 bp, Homo Sapiens
actttaagaggataagctactatcaaaatattcactcaaattttctttttagtgactatgaattattagatataatttcaagcattaatcaacacaaatattagaagataaagctatagtcattttttgggtcccaattccaacccagaactttgaggttgttcctgtgtgtaaatgggggatcacaaaacagaagcataaagagagggagagggcaagggaagagaacagaagagaagcatccttccaagagagtctggccctaacacatccatggtaggtaaagaatacctaaatacagtccttgggagaactgatattagttactcaaacaattttccttagagcttaactgtctcacagccctggttgagaaaggctaaggaagcggctgaaaattgaggctttgaggtataacaggtaggccacaggatctggaggcctaattcagtagctcccaaccttttcaacagctagaaacccttttatactgtaattaacccccttgaactcaatatttagagtcaatctgcccaaagaaactgtatttatcattaatcttaagaaattaatgaagtttcttttgccacattgtgaactatttaaagccagaattgtgtctacgtacctttctttctaaaacctggactgaggctcacagtgaaactcaaactgatgctgaattacattttcatttttacctgtttctcccaaagtactgattttcttcatacagtagaaataattttaggtgtcacacacattatattcaaacatatatgatactttcccggagacatctattatttgttgttgccaacttttttgtacaaagt

SEQ ID NO: 243362 - DNA, 877 bp, Homo Sapiens
  misc_feature (657)..(701): n is a, c, g, or t
ttggcccagcccctgcagctggggaggggcccacgcctgatccatggggaagttccgatggtggggtcccggtcagtgggccctcagcctccgatccctggacaccggccccggccttctcagatccctggggagggtcacctgccaagcccagcaccaatggcacaacagcagccgggggattcgacacggagcccgacgagttctctgactttgaccgactccgcacggcactgccgacctccgggagcagcgcaggagagctggagctgctggcaggagaggtgccggcccgaagccctggggcgtttgacatgagtggggtcaggggatctctggctgaggctgtgggcagccccccacctgcagccacaccaactcccacgccccccacccggaagacgccggagtcattcctggggcccaatgcagccctcgtcgacctggactcgctggtgagccggccgggccccacgccgcctggagccaaggcctccaaccccttcctgccaggcggaggcccagccactggcccttccgtcaccaaccccttccagcccgcgcctcccgcgacgctcaccctgaaccagctccgtctcagtcctgtgcctcccgtccctggagcgccacccacgtacatctctccccttggcgggnnnnnnnnnnnnnnnnnnnnnnnnnnnnnnnnnnnnnnnnnnnnnaacactaatcccttcctcctataatccagggcggaagggggcctggctccatccggctgccccattccggctccctgggagattagtgttgtgagtgcatgtgaaatgggggatccccacccccagtgcccttccccttcctggggcccactcacactacaccctcttcctttccc

SEQ ID NO: 243363 - DNA, 1197 bp, Homo Sapiens
ttggacaccacccaagatgcagagcatggagcatgggcgctgggacacaaactgtgctccatcatggtgaagcaggagcagagcccggagctgcccgtggaccctctggctgccccctcggccatggctgccgcggccgccatggccaccaccccgctgctgggcctcagccccttgtccaggctgcccatcccccaccaggccccgggagagatgactcagctgccagtgatcaaagcagagcctctggaggtgaaccagttcctcaaagtgacaccggaggacctggtgcagatgcctccgacgccccccagcagccatggcagtgacagcgacggctcccagagtccccgctctctgcccccctccagccctgtcaggcccatggcgcgctcctccacggccatctccacctccccactcctcactgcccctcacaaattacaggggacatcagggccactgctcctgacagaggaggagaagcggaccctgattgctgagggctaccccatccccacaaaactccccctcaccaaagccgaggagaaggccttgaagagagtccggaggaaaatcaagaacaagatctcagcccaggagagccgtcgtaagaagaaggagtatgtggagtgtctagaaaagaaggtggagacatttacatctgagaacaatgaactgtggaagaaggtggagaccctggagaatgccaacaggaccctgctccagcagctgcagaaactccagactctggtcaccaacaagatctccagaccttacaagatggccgccacccagactgggacctgcctcatggtggcagccttgtgctttgttctggtgctgggctccctcgtgccctgccttcccgagttctcctccggctcccagactgtgaaggaagaccccctggccgcagacggcgtctacacggccagccagatgccctcccgaagcctcctattctacgatgacggggcaggcttatgggaagatggccgcagcaccctgctgcccatggagcccccagatggctgggaaatcaaccccggggggccggcagagcagcggccccgggaccacctgcagcatgatcacctggacagcacccacgagaccaccaagtacctgagtgaggcctggcctaaagaggtggaaactgcaccagccccgacttctcccactccaaggagtggt

SEQ ID NO: 243364 - DNA, 989 bp, Homo Sapiens
  misc_feature (230)..(254): n is a, c, g, or t
gtaagttccttgaattattaataagtctctcgggtcagaacaatgaggaggaaaatagggtgtgtgcaggatccctacctctaatcgtattctgattttgtaaacaatattaattatctatgatttgtaattaagattatacatcaaattctgctctggagaccatctaaaattgaattctctgtgcttggattttagatgattaatgaacaagagaccatgaaaagacnnnnnnnnnnnnnnnnnnnnnnnnnaaagtgggatggcaaatagtccccttagggtggtcttcctatacatgtatatatatatttcagttattccattcaatgatgctttcagtctaacattgtcctattactactctatgtttaaaattccctacctcaactgacctgtgaactcaggggtcatgatgtgctgagtaagggaaaatattctggctctctccaataaacaatatggccagatcatgaaatcaattcaatgaacacaaagaatggaaactgggagagctccaaaactggtcactatatttagaagcacaacaagaaaagcagcataggagtggctaagacgtctaaaaataaaacttcatgtatttaagtgaggtgagaggaggaacatataaaatcaaataagtaaaaaatatatatgaagaataatctcacagaagatttctgataaaaaacttgtaaaaatcataactacagcaatgaaaagtaagaaactatgctggaaaaggagggaaataaattatgtaaagctgtgcttcttagcttggtataagctgatgatcagaaaaatgctcaaatacatactaaattttaaatgtaaaatgaacattctcacagtgagtatactattccttatattttcagataaaatgaatgattagagagcatataaaagatattctactttatgtatatgtagttgtgctccccataaatagtgaatcacaacacactctagcacttttcttaatt

SEQ ID NO: 243365 - DNA, 1198 bp, Homo Sapiens
agcacatccccttcatgcccctggcagtcatctaatgtacacacaagatcaaagcagctctcaggtggcgtgttgcagggcacagcacagttctgcgtatgccaaggcagatgctgggccctttccctattgtgttcagcacacacccattctccagggcaccttttctgggcattaatttatccagtcagttaatatggattgcacagcctgctatatgccaggtaccatgtggaccccatcacccgtacccaatgcaggcccctctagtgggcaacccttgctccacactccctgttgggctgctcgagactgtcaggtcgggctcaacctgctctccagccctgtttccttcctatccctttcctgagtgttagttagccccagtaaatctttggccctgccaactccctctcatggtctgcttcctggaggacacaatctgagacagtgggttccagagtggtctgagaaagcaggtggtaaaatggggtcttggtacaggattgccccgcatctgcccaactggcaacaaggttcccatcttcgggagtaggtggcacgcaggcggctccaggcacaagatggcaggctagttgccagacctttggtgttagaacttttgctgggatggccggcttgtggagaggaagttcctggcaggtgaggagatccaggcagggcggatgcctggaaatgaaaactcagagaacagacagtggtgagtatgtttcctggatgacccacaggggattaatgagaggccaagagcaattaacaaacatctaaaaattaagcagaaacactggagtcttcctggtggtttacaaagtagcccccgatccaggcaatgggcgagcagcaaaatctgaagaacaaacccaggacttgctaaggtggctgaactccgaagacgggtgaacgctcagccaaggcaggtctgtcatgccaatgacaccagccctgttgggaaaacctgtgtccctgatacatggaacaggcacatctaggagaaggtctctgaatatctggtctccccagatgcccttgaaacttctgagcccgcagcatcagcccaccccctcccatgaagcgctgcaggcaccctatcccgaaggagaaataaataacacaagaattttccccacaggtgtcctccctcccaggaggggccctcaccccaacttttttgtacaaa

SEQ ID NO: 243366 - DNA, 1115 bp, Homo Sapiens
ttggcaggcctccgagtggactccagaaagcctgaaaagctatcatggcagcaaggcccaagctccactatcccaacggaagaggccggatggagtccgtgagatgggttttagctgccgccggagtcgagtttgatgaagaatttctggaaacaaaagaacagttgtacaagttgcaggatggtaaccacctgctgttccaacaagtgcccatggttgaaattgacgggatgaagttggtacagacccgaagcattctccactacatagcagacaagcacaatctctttggcaagaacctcaaggagagaaccctgattgacatgtacgtggaggggacactggatctgctggaactgcttatcatgcatcctttcttaaaaccagatgatcagcaaaaggaagtggttaacatggcccagaaggctataattagatactttcctgtgtttgaaaagattttaaggggtcacggacaaagctttcttgttggtaatcagctgagccttgcagatgtgattttactccaaaccattttagctctagaagagaaaattcctaatatcctgtctgcatttcctttcctccaggaatacacagtgaaactaagtaatatccctacaattaagagattccttgaacctggcagcaagaagaagcctccccctgatgaaatttatgtgagaaccgtctacaacatctttaggccataaaacaacacatccatgtgtgagtgacagtgtgttcctagagatggtattgtctacagtcatgtcttaatggatcccagctctgtcatggtgctatctatgtattaagttgggtcctaagttgggtcttttgtgtcaaagagatcatctcttctagaaatatcaaccttttttgtccagtaaataattgttaggggatctttattgggaaacttttttggagaggctggtatttaagttagatctgattgggctactcatgtcctgtagccagttcatcctcataataagaatgggcaggatctcttgttctctcctgagtgtctttctactctcctgagcgtctttctgctctcttatcctgttctcttatccttatcccctcaagtctctgcctaattttta

SEQ ID NO: 243367 - DNA, 1201 bp, Homo Sapiens
ttggggaaatttaaaaagttttggagatacaaatacaacatttgattaacgtcagggaatttatatacttaaaattgttataatggcaaatgttaggttacatgtattttattacaagagaaaaggactacagatagtatggaaggcatgcatgaatgccaatcaagatttctgaacactgactttccatgtgtatccatgcactcttaccagtgacagaccaaaagtcacccctagaagccagcaatattttagtaggtatgttatgtttaagtatacataatttggaaatggaattgggactgttctctgaatatttgttctttgtgttgaacccatcatggataagatcaattaggtaattaaaaagagtcttaaaggtaaatgtcacggaaatatactaaattactaagtgtttttgctaaaatgctaaaataaacttatctactccttgtttatatatggaagccaactcaaaatgttacaatttgttaagaaaagctgctgaatcctgcacttttcccctctgctttctatagagataggtggtgtcgacttcttacgacaatgcacagccatgtctacgtcagagcacagaaggaattgggcaggcttcaggaatcagtgtattctgctaagttatttgttcatttaaagcacctgaatttatccttacaaggtggtactggacatgcaagaagagagaaattcccttgtgagcacagaagtaaacctgtggggtcacatctgaacaacaaaacacaggacggttttgttgttgtctacatgactgagacaaatattaatctgaaaactcactgaaaatattttgcacattatgaagagaactgaaaacacatgaaatagggtttcattttccatagcagatggcagcaatgtgtggcaaagggccctcttatcccactgtctggatactacacacatactttgacacattcagatagattccagagaatggctgctggtggctcctggagacccaagccaccctcattgccaggattagaaattattggtattcaaccaaaataaagaaaatggtaaaatagcttttatactttacaagtgtacacatgtgaattgactctcaggctggttattccaaaactattaacagatgaatggtaccattgatttttttcttctccaacgcagattaaatccaacttttttgtacaaa

SEQ ID NO: 243368 - DNA, 1303 bp, Homo Sapiens
  misc_feature (412)..(435): n is a, c, g, or t
ttgggttggaggcggtggtggcagcagtaggagtgtgtagagtgcgggattgggggccaggccctgcggagggcgggggaagttgtcttcttttttttccggaggggccggtaaacctggtggctgaacggcaagatgaatttcctccgcggggtaatggggggtcagagtgccggaccccagcacacagaagccgagacgattcaaaagctttgtgacagagtagcttcatctactttattggatgatcgaagaaatgctgttcgtgctctcaaatcattatctaagaaataccgcttggaagtgggtatacaagctatggaacatcttattcatgttttacaaacagatcgttcagattctgaaataataggttatgctttggacacactatataatataatatctaatnnnnnnnnnnnnnnnnnnnnnnnnaattccacaagacagagtgaagatttgggaagccaatttacagaaattttcattaagcagcaggaaaatgtcactcttctgttatctttattggaggagtttgatttccatgtccgctggcctggtgtgaagcttcttacttctcttttaaaacaactagggcctcaggtgcaacaaattattttagtcagtcctatgggtgtttcaagattgatggacttactagcggattccagggaagttatacgtaatgatggcgtcttactactgcaggcactaacaagaagcaatggtgcaatccagaaaattgttgcttttgaaaatgctttcgagagactactggacattatttcagaggaggggaacagtgatggaggtatagtagttgaagattgtttgattttgctccaaaacttattaaaaaacaacaactccaatcaaaatttttttaaagaaggctcatatattcaacgtatgaaaccttggtttgaagttggagatgaaaattctggctggtctgcacagaaagtgaccaatctacatctaatgctacagcttgttcgtgtattggtatctcccaccaaccctcctggtgctaccagtagctgccagaaggctatgttccagtgtgggttattgcagcagctttgtactatcctaatggctactggggttcctgctgatatcctgactgagaccataaatactgtatcagaagttattcgaggctgccaagtaaaccaagactactttgcatctgtaaatgcaccttcaaacccaccaagaccggcaattgtagtacttctcatgtccatggttaatgaaaggcagccatttgttttgcgctgtgctgttctctattgtttcc

SEQ ID NO: 243369 - DNA, 1021 bp, Homo Sapiens
ttggcattctcagaatttcaggaagaagttatcctgttgaggtttttcatcttgaagatataatagaagaaacaggctttgtactggaaaaagactcagaatattgtcagaaatttctggaagaggaagaagaagtaaccattaatgttacaagcaaagcagggggaataaaaaaatatcaggaatacatcccagttcagactggagcacatgctgatttaaatccattttaccaaaagtacagcagccgcactcagcatgctattctatacatgaatcctcataaaatcaacctggatctcattttggaacttcttgcatacttagataaaagtccccaattcagaaatattgaaggagcagtattgatctttttaccaggacttgctcatattcagcagttgtatgatcttctatcaaatgatagaagattttattctgaacgatataaagtgatagctctgcattctattctttcaacccaagatcaagctgcagcattcacacttccccctccaggagtcaggaagattgttttagcaaccaatattgcagagacgggtatcactattcctgatgttgtatttgtaattgatactggaagaacaaaagaaaataagtaccatgaaagcagtcagatgagttctttggtggagacgtttgtcagtaaagccagtgctttgcagcgccagggaagagctgggcgggtcagagatggcttctgtttccgaatgtacacaagagaaagatttgaaggctttatggattattctgttcctgaaatcttacgtgtacctttggaggaattatgccttcatattatgaaatgtaatcttggttctcctgaagatttcctctccaaagccttagatcctcctcagctccaagtgatcagcaatgcaatgaatttgctccgaaaaattggagcttgtgaattaaatgagcctaaactgactccgttgggccaacaccttgcagctttacctgtgaatgtcaagattgacaagatgcttatttttgg

SEQ ID NO: 243370 - DNA, 1641 bp, Homo Sapiens
ttggtcttccgtgaaaccagtgcaggtggccggtgcagactggaaggatccgagcgtggaggggtctgtcaagcagggcactgtctccagccagcctgtgcccttctcagcactgggacccacggagaagccgggcatcgagattggtaaagtgccacctcccatcccgggtgtaggcaagcagctgcctccaagctatgggacatacccaagtcctacacctctgggtcctgggtcgacaagctccctggaaaggaggaaggaaggcagcttgcccaggcccagtgcaggcctgccaagtcgacagaggcccaccctgctgcccgccacaggcagcaccccccagccaggctcctcacaacagattcagcagaggatttccgtaccgccaagtcccacgtacccgccagcgggaccacctgcatttccagctggggacagcaagcctgaactcccactgacagtggccattaggcctttcctggctgataaagggtcaaggccacagtctcccaggaaaggaccccagacagtgaattcaagttccatatactccatgtacctccagcaagccacaccacctaagaattaccagccggcagcacacagcgccttaaataagtcagttaaagcagtgtatggtaagcccgttttaccttcgggttcaacctctccatcgccgctgccgtttcttcacgggtcactgtccacgggcacaccacagcctcagccaccttcagaaagtactgagaaagagcctgagcaggatggccccgccgcccccgcagatggcagcaccgtggagagcctgccacggccactcagccccaccaagctcacgcccatcgtgcattcgccactgcgctaccagagtgatgcagacctggaggccctccgcaggaagctggccaacgcgccccggcccctgaaaaagcgcagctccatcacagagcccgagggccccggcgggcccaacatccagaagctgctgtaccagcgcttcaacaccctggccggtggcatggagggcacccctttctaccagcccagcccctcccaggacttcatgggcaccttggccgatgtggacaatggaaacaccaatgccaatggaaacctggaagagctcccccctgcccagcccacagccccactccccgctgagcctgccccgtcatcagatgccaatgataatgagttaccttcccccgaaccagaggagctcatctgtccccaaaccacccaccaaactgccgagccggcagaggacaataacaacaacgtggccacggtccccaccacggagcagatcccgagtcctgtggctgaggccccatctccaggggaagagcaggtccctccagcacctcttccccctgccagccaccctcctgccacctccacgaacaagcggaccaacttgaagaagcccaactcggagcggacggggcacgggctgagagtccggtttaaccccctggcactgctcctagacgcgtctctggaagagagttcgatctggtgcagaggatcatctatgagtggaagatcccagcaagcccaacgacgagggatcaccccactgcacaacgccgtctgcgccggccaccatcacatcgtgaagttcctgctggattttgg

SEQ ID NO: 243371 - DNA, 1604 bp, Homo Sapiens
ggtatcaaggtacaggaaatttccactacccaacaaaggtcactcacccttttgtagttaataacttctctgcaacctagatccagccaactactgataagatgtctgtccttgtattttaccttttccagaatgttacataaatggagtcatacagtaagtaggcttttgtgtctggcttcaagcctttactttttataaagaataacaatggtaataattatagctgacatttattaaaggctgagcggatactgtatactgtgctacaggcttttcgtgggttatctcatcactgtttcacatatgtaggtatacagttctttctttaaaatatgtgactgaaaaatattattgaacattatgctaaaatttgttacactgagaagactaagaaaaacagagctcatgttttctttcaactgatttcctttttacattgtacttgagtacctggaagctgcttgcttctttccgcagctaggatacaaactccctgacagttaagtgcttctttacttcccatccagtgccttgcacagggcttggtacatggtttggtccaaaatatttgttgaataaatttgcagatagcccacgtgtgtaggagagggagagaaggttcttgaaaaatggagattggaggaatctaggatggggagggagatatgggaagggcccagacagaggcaggagggttccaacttgttcctcttccctgcagcccagtgtttcccgggctctttgagttctgctcgcgttacacacgcgcatctctgcaaggagcaacccagctgaacaacaaggtgacatagtcccgagtcctgttcttcctttcctctggatccctggactcgggatttaaccctgatcctgggctcccagcttgaggggtgggcaggaaggactgtgacttaggtgtttgtctttcagatctgtgatattgccattaactgggctggtggtctgcaccatgccaagaagtttgaggtgagtgaggaggtgatgggaaagacagtggccatcctagggtaggtgtttaggatgatggtggggggcagctgggaggggaattgctcttctctttatgagaccactgtcttgccataggcctctggcttctgctatgtcaacgacattgtgattggcatcctggagctgctcaagtaccaccctcgggtgctctacattgacattgacatccaccatggtgacggggttcaagaagctttctacctcactgaccgggtcatgacggtgtccttccacaaatacggaaattacttcttccctggcacaggtgacatgtatgaagtcggggcagagagtggccgctactactgtctgaacgtgcccctgcgggatggcattgatgaccagagtgcccatctttggccctctctcaggttacaagcaccttttccagccggttatcaaccaggtagtggacttctaccaacccacgtgcattgtgctccagtgtggagctgactctctgggctgtgatcgattggggctgctttaacctcagcatccgaggggcatggggaatgcgttgaatatgtcaagagcttcatatctctctactcgtgctgggtgggtgg

SEQ ID NO: 243372 - DNA, 1722 bp, Homo Sapiens
ttggcgaacccggagcagggtcccatccgagcgtggactggcggcaggatgttcagctggatggggcggcaggcgggcgggcgcgaacgcgctggcggcgcggacgcggtgcagacggtgacgggcgggctgcgctcgctctacctgcgcaaggtgctgccgctggaggaggcgtaccgcttccacgagttccactcgcctgcgctggaggacgccgacttcgagaacaagcccatgatcctgctggtgggccagtacagcaccggcaagaccaccttcatcagatacctactggagcaggatttcccaggcatgaggattggtccggagcccaccacagactccttcatcgccgtgatgtatggagagactgagggcagcaccccagggaatgctttagtcgtggaccccaaaaagccgtttagaaagctcagtcgctttggaaacgctttcctgaatcgattcatgtgctcacagctccccaatcaggtcctgaagagcatcagcgtcatcgacagccccggcatcctttctggggagaagcagcgcatcagccgaggctatgacttctgccaggtcctgcagtggtttgccgagagggtggacaggatcatcctgctctttgacgctcacaagctggacatctcagatgaattctcagaggccatcaaggccttccggggccaggacgacaagatccgtgtcgtgctgaacaaggccgaccaagtggacacgcagcagctgatgcgggtctacggggccctcatgtggtccctaggcaaggtcatcaacacgcccgaggtactgcgcgtctacattggctccttctgggcgcagcccctgcagaacacggacaaccgccggctcttcgaggctgaggcccaggacctcttcagagacatccagagcctcccccagaaggcagcggtgcgcaagctcaacgacctcatcaagcgagcgaggctggccaaggtgcatgcctacatcatcagctacctgaagaaggagatgccaagtgtatttggaaaggaaaacaagaagagagagcttatcagcaggctaccggaaatctacattcagctacagcgagaataccagatttctgcagggggcttccctgaggtcaaggctatgcaggaacagcttgagaactatgacttcaccaaattccactcgctgaagcccaagctgatcgaggcagtggacaacatgctgagcaacaagatctcgcccctcatgaacctcatcagccaggaggagacgagcacgcccacgcagctggtgcagggcggcgccttcgatggcaccaccgagggccccttcaaccagggctacggggagggtgccaaggagggcgccgacgaggaggagtgggtcgtggccaaagacaagcccgtctacgacgagctcttctacactctgtcgcccatcaatggcaagatatcaggtgtcaacgccaagaaggagatggtgacctccaagctgcccaacagcgtcctgggcaagatctggaagctggccgactgcgactgcgacggcatgcttgatgaggaggagttcgcgctggccaagcacctcatcaagatcaagctcgacggctacgagctgcccagcagcctgcccccccacctcgtgcccccctcgcacaggaagtccctgcccaaggccgactgaggggtgggctgcagaacggggtgggaactgggggacctgggcctcagg

SEQ ID NO: 243373 - DNA, 1463 bp, Homo Sapiens
  misc_feature (1247)..(1258): n is a, c, g, or t
aaagaaatttgataaatttcatttcaaagcacaattatgaacagtaaatcattttgtaaatcataaacatataactgttatgagcaagtacctaaaccatctttcctaggtagactgatacatttgtatttggctatgtaagaggtttcaggtttatttataaatttgccattaagttttgagttaacattaatatgcactgctgctcaggacccttactggttaagaatcatctgaatataagaaatcacccattaatccattcattcatatatctactgaatgaatgcttgtatattcaaggcactgcgacagatctaatacgggaacttaaatgattcgttaactaatctcagggagcttacactcgcatcggaggagacatatataaagagttaaaaggtacagtagacagtgagaagtgccataagcagtatagatagatatgagtatgaagctatgggagttcccagaaagacagatcatttctagctgcaaagaggtatcagaggaaactctggggaggtggcatttgagcctaaacttaaaaatgtatctgacgaataagggagtgggaagaattaggacatttctaattggtggaactattgggaaagaaataaatgggaaaaatgggaagtacagggaccagcagtttagttttgctcaagtgcaagaagggtgacaaacaggtgttaagggtagaaacatcaaatgaccttgggtaccacgtcacattcatccttgaagactcagccatttctcttggctgctaagttgccagagagaaaatggtggtttcacataagcacagaaagagagtagcataggaagaagatgtgctttgggcagactgaattgtagatactggtggaagatagctgcccaaaggatgaaaactcaagactggtctccagatgaaggtaagagctgggaaaacacactggaggtgacagtggaagctacagaactacccaggagaaagaaaagggagataagagaaaagggttaaagaagggagagaaagatccagaatagatccttggaggacacctatctctcagtgcctctatatcccctagcatccaagtattcaaagacttcagtgatgaacaataaaatcacagaattacatacatacatttaagagtccttccatgcttttaagtatccttcctctaacacatgactctgacatggattaagagttctgatgttcaaaacagtcataaaaggctgacctttcnnnnnnnnnnnnaaaggctagtcaagtgattgacatttcctaaaaacatttcagtcataccttagaaaacacacataacattcaactggcttttttctaccagaatgtctgatgctaatttggaagaatttcatgtattttctatttgccgaatgtacagcacattcttttcacttcagcactgacaatccaaagtgtttcattaaagaaacaccaa

SEQ ID NO: 243374 - DNA, 870 bp, Homo Sapiens
ttggctaaaaaggaagaggataaaataatacttaaaataatacttaactggttgtccttggacactcatccttcttatggttgcaactccttgattttgttgctattagtcctagtactttgttaataaagctgttaatacatttccaggcttcctattcttggaagttactgagattggcaatattaacttcctacataccacttcatgatactgccatttgttctgcatacctcagacagactaactccaatgtatatttctgccttacactgggtattagaacctcttatactaataactgtcaatagagagatttcttcacttctagatgagattgggctctcatctagagacaatttaattagacaatttaaattagtctaatttaaattggcttgatgtaagttatggttgctcttattctctgaacgtaacagcagctgaagtgaactctaattttaggtctgcagttttaacatcttccatttctaacttcattatagccccagtgtccaaaggctgaagctaacaactaagtttcttaacagcttatgaaatgacatactaccagataacaattctgacattaatcacccagaagtaaagacttggtattgggaaaatgctcttaaaattaccatttgattagtattcatctgccatctttctacactgccaagatttgcttaatataaaactcagatgaaacaatcgtgaggctgggaagaatgggacagttgaaacaataaatgcttgtcatctcagaagataagcattaaagatggagataaagaaaaattcatgagacagaagatctaggcaatgatttagaggaaacctcctcccaaaaaccccagaggaagccaa

SEQ ID NO: 243375 - DNA, 117 bp, Homo Sapiens
ttggctatttgaagttactttgtggtagcaacattccagagctttgttggtccagactggctgtttgaaagaatcttcaagctgcttctgtctggttatccaacttttttgtacaaa

SEQ ID NO: 243376 - DNA, 157 bp, Homo Sapiens
agacaataaggaaccattcacctcaaattcacagagccatgaatcacctctgcttccccatgaccttttccatatccttcatattctgtcttccaaccatgacacagaactgaaacatactttaaaaatttcatccttggctaggcacggtggctca

SEQ ID NO: 243377 - DNA, 755 bp, Homo Sapiens
ttggggtcgactggggcgtcgtccctagcccgggagccgggtctctggagtcgcggcccggggttcacgatgtccgacgaggaagcgaggcagagcggaggctcctcgcaggccggcgccgtgactgtcagcgacgtccaggagctgatgcggcgcaaggaggagatagaagcgcagatcaaggccaactatgacgtgctggaaagccaaaaaggcattgggatgaacgagccgctggtggactgtgagggctacccccggtcagacgtggacctgtaccaagtccgcaccgccaggcacaacatcatatgcctgcagaatgatcacaaggcagtgatgaagcaggtggaggaggccctgcaccagctgcacgctcgcgacaaggagaagcaggcccgggacatggctgaggcccacaaagaggccatgagccgcaaactgggtcagagtgagagccagggccctccacgggccttcgccaaagtgaacagcatcagccccggctccccagccagcatcgcgggtctgcaagtggatgatgagattgtggagttcggctctgtgaacacccagaacttccagtcactgcataacattggcagtgtggtgcagcacagtgaggggaagcccctgaatgtgacagtgatccgcaggggggaaaaacaccagcttagacttgttccacacgctgggcaggaaaaggactgctgggctgcaacattattcctctgcaaagatgatgtccctggggaaca

SEQ ID NO: 243378 - DNA, 341 bp, Homo Sapiens
gctttttcttttatagccaactttgtacaaaaaagttggctcggagccaattcccggcccgacgccgccatgagcgccgcgctcttcagcctggacggcccggcgcgcggcgcgccctggcctgcggagcctgcgcccttctacgaaccgggccgggcgggcaagccgggccgcggggccgagccaggggccctaggcgagccaggcgccgccgcccccgccatgtacgacgacgagagcgccatcgacttcagcgcctacatcgactccatggccgccgtgcccaccctggagctgtgccacgacgagctcttcgccgacctcttcaacagcaatcacaa

SEQ ID NO: 243379 - DNA, 1025 bp, Homo Sapiens
agatgtggcccctggtagcggcgctgttgctgggctcggcgtgctgcggagcgaagaggacgtaaaggacacaattaagtttcattttcaactcagcattcaatcagaagaatcttccggccgtgtaatttttgctgtcgtttttaatcctaaaaataagcttgctggaaactcttcctttctcgtgaccctcacgccccatcagccacttgcatacattctaaattgatcagctcagctactatttaataaaacaaaatctgtagaattcacgttttgtaatgacactgtcgtcattccatgctttgttactaatatggaggcacaaaacactactgaagtatacgtaaagtggaaatttaaaggaagagatatttacacctttgatggagctctaaacaagtccactgtccccactgactttagtagtgcaaaaattgaagtctcacaattactaaaaggagatgcctctttgaagatggataagagtgatgctgtctcacacacaggaaactacacttgtgaagtaacagaattaaccagagaaggtgaaacgatcatcgagctaaaatatcgtgttgtttcatggttttctccaaatgaaaatattcttattgttattttcccaatttttgctatactcctgttctggggacagtttggtattaaaacacttaaatatacatccggtggtatggatgagaaaacaattgctttacttgttgctggactagtgatcactgtcattgtcattgttggagccattcttttcgtcccaggtgaatattcattaaagaatgctactggccttggtttaattgtgacttctacagggatattaatattacttcactactatgtgtttagtacagcgattggattaacctccttcgtcattgccatattggttattcaggtgatagcctatatcctcgctgtggttggactgagtctctgtattgcggcgtgtataccaatgcatggccctcttctgatttcaggtttgagtatcttatctctaccac

SEQ ID NO: 243380 - DNA, 1339 bp, Homo Sapiens
ggcgattcatttataggcagacgtaggtttaaattccagcttttttactttttagctctgtgactttgggcaaatcacttcaattttcaaagcctgggttatgatattttaaaaaatagacacaatcagttaatttaattattggtaaataatttttgagtatctattctatgttagcaccagtgtccttttttccttctcctgtatgtgcatgtgggccggcttggaaggtgagcagggccaggccagagtaagttcagagcaagccctaaacttacttcgtagagacccatataaacattcttacggtgaatcaaaagaagatatttcctcttctggctatccaaaaggagccatcatagtccagtgggaagaacgggggttctgaaggcaggcagtgtggattcaaaagtcagctgtaccatttaccagacataatatcatagaaaagtccctttacgtaatcctcatgaacacaaggatatcatataatgcaggccagaaaattataaaagatggcatgcaaagcaactagcataaatacttggcacagaacagtaagtacttcagtaaataatagtctcccacccatgcccttttcattaaaagttccctgttggaaacaattgtgtttgcccatggattttaagattgtttgatgaaaaatcttccagatcctcaatcatgtgccttatcaccctgcctttccctcaactctcacatggctccagctggttaggcctattattgtttgaccaagcacaagctggacaaaagcaagcttctagtcagcatggctttttgtagaaacagtaaaccagtcattctctgaatacaggtaattttttgtatactgttgtgagtatgtgtatttacaatcttttgtgcattttaaaacatttttgtccctctttaaaaaattgtaaatgaaagtgtccccacatttttgcctttttatttgtaatttatttcagtctattatttctgctttatgctactagctaatagtgaaagttcaaacaacctaaatgtctaccaacagggcattagctgaaacaaatctaaacccaatctagaattccttaagtaaattaaggtgagttatacaacagtacatagcatatactctcatttttgttgaaaaacaatgtatgtatgttcattttaaaagacctagaaaaacagatatacaattattagtgttcctctatgttcttctcatgtcagtattctctattttttctaaaatgagcatacactgttttggaaataaggtaaaacaacaagagaagccataaaatgattatattggctggccgcggtggctcacacctgccaa

SEQ ID NO: 243381 - DNA, 958 bp, Homo Sapiens
ttggcgaatgttttctaccagtgtgcttgggtttgccatgatgcgaggctgagttgctgtagcgtcttgattctctccctgggtctgcgttccctcccctgggcctgactgagcctgctcattgtttttccctttattacacaggacagccaggggaggaggggggcccagccctgggaggctggtgggaggcagggggcaggcctgcggatgcatgaaataatgttggcattattttttaattttttaaaaaataaatggtatcttatttaattgtcctgttccttcccactccccgcctcctaggatgttagcccaagctcagggtaggcccagggggctgggagaaatgaagccacccatggggactggggaccaggggccttcagcatggcttctaggttccctcctccccctaccccatctcctacctccacagtacagactgtccccaacttaacagtggttcaacttaaaccatgtttcaactttacaattggtctgttggggtattaaatgaatttgtgacttaggatattttcatttatgatgggtttatcaggaagtaaccccatggtaagttgaggcatatctgtatatatttaaacctaattaattcttgagctgaaaataaataaaccaggatggcagggaccaacccctaatccctccccagcggcaagcccctcttttcagagtgggcagagggttgcctatggtgggcactaggaatgaggtcccctgcctcgatgcgggtcctaggagaaaaagtcctacttttctgggtccccaggtgcagcacctcccggagactgtttctcccatggcctcctgagtgatgggccctgcctccctgtgcctcatcctcaggctggttggagcaaagggtgggcaggagccccagcacagactggggggtgctcacagcagggccaccttgatgcacgctggaatgtta

SEQ ID NO: 243382 - DNA, 1432 bp, Homo Sapiens
  misc_feature (1254)..(1263): n is a, c, g, or t
tcatgaagcaagacgtattctctgctactgaatcccaaatttgagtacatccttttcttttagttcatagtatctctgtggctcaatacgtttgttgtttaagaaggttccattgctgagccaaggtcaatgatgtagggcttcactcttcggccaactgtgccatcagcacgggtatattccacaagccgatattgaaagaccgcatgctgctttgaacaagacgggtgatcaattggaatgtctgcaatgcggcggtgtcgacccagtaggtacgcactctgtcgatgtatgtacatgactggaagcacctcatcatttttaaatgggtagagacgccaccgttttttggggatacgtgcttctgggggctcactatatttaatgactacaccccggaaagtgttggtgtcctcaagaagtgccccagaaagttcaaagcttggtttttctttagcgggcacctctttttctttgttgttgccaccaggccgaggaaccaactcctgagactcactgccgccaccaccaacgtcattcctctggcgatgctcccgtcgcctggcattataaaactcccgctcttcttcctgagcctgcaggttctgagtgtctcgatcccgtccctgaccctgcccactcccaggcctctcgttagacgttctcctttggtgggaatggccccggtgtctgtcccggtcactgttcctagctctcctgtgttcctgttctgatggttccctgtgctgccgatcctcccgtcctctccggggatgatcctcacgctcctgaaattcaaacagattctgtaatttaaacgcagtgcacaatctaaaggcagcccaaatcttgttctttttgaacgaagtgcatgcaaaaagtcttgtaatttggactttggcatttagaacaacatttcccacagaaataagattatgtctggtggttatgttccctcgcaaggccacaaagatgatatcccatgctgctattcaactatagccctaatagcacaagtccaggtccacagccctaaaaacaagagactatttagtccagaaaggagaaggaaaaataattccctccttttcagaacaaaggtaactatgggcaaacttacagggaagaatatacagaaaatagaactaagagttaagtagtcaggtacaagatatgtaaagaaagaaactagctttctctcatgccaaaagtgaaaatataatagtaagtttttaaatcctacttccatagttnnnnnnnnnnttcaatacctagaaataaacttaagaaacatgaaagacatataagaagaaatctgtaaaaattcattaaaataaatgttttttaaagatgtgaagaaatggagaaacataccatgatttcttgaaaaagatagcaatgaaaatcagcctaggccaggcatggtggctca

SEQ ID NO: 243383 - DNA, 978 bp, Homo Sapiens
ttgcaatttacagctacacactataaattacaggaaataaaattcaagtaacagaaaaagaagaggggaaaaataaaaagcaaaattattaaagagggatataataataactgcaccacttggatacttttatttgaaaaaaaattttacttgactaactgaactgcatgtgaataacttcaagagctagaaactcataaataaaaggcaatcgatcctttctttaaattcctggacattcatcttcttcttaaagaaaattgttttcttcccagaagcacgcccagcagagcttgctctggtggagagaagcagagcacatgggctcctctgagatgtagacacaggagctggcagtggtgttcacaagaccgatccgctgactattggctctgggaaatgtcaatgatgaagctacgtatatcttgagattctatattcactttaaagaaaatacccaatgtcctggcatgaagtacacactactaacagaaaaatgagcagcacagttcctgctacctgtgtttataaggaaagggaaggggctaatcccaaaggcaatttaaataatggtattttatttttatatataaataaatgttctgagaaatctcagactttagtgcattgctgtaaaaaattagtgcagttttttttattaaagtttttagcgctcaaggaataagataaatctatgtctgttcatagtctctttcactgtacattaaacttttatactgctataagtcaaaaggaacatttctacactggtctgttcttaaaaatcaaggtaaatgaatttcatgttctatgacaaaacatggcaattatttttggcaaagaaattagaaaaatatgagatcatagtttagaaatgaagagtttgttgatttaaagcataggcaatgcataggaaaaactttttttaaggatgtattttaactggaactttatcccaacttttttgtacaaagtggg

SEQ ID NO: 243384 - DNA, 515 bp, Homo Sapiens
acttcagcctgggtgacagagcaagaccatctctaaacaaacaaacaaaggaataagaggttgaaaacattagcagaaagaaaaaagaaggaataaagttgttatttttgcttccagtaaaatttccatcatctttcttaccagagctgttcttccccaagctctgcattaaataatctggtcattaaatctgtgaaaaccacaagggatgtgcccatctcattaaaaaagatgatcatttgagctatgataatgagaaagagcatctatttttggttttaaggacagaagtacttcctgcctgttgctcagagcagcgacacttctagttagctttagcacaaaacagatgccccagcactctttatcatagtgacaacaggaacctgcaaatagaaagatttcgtctcagaacttctacatactctcaatctattgatttatcaacaaagaacatgaggcgtctgaaacagaaaaatattaattctaccatatgaaggtaaatattattatta

SEQ ID NO: 243385 - DNA, 671 bp, Homo Sapiens
ttggcttttattggtttcctctgagcaatactaataaataacagaagccaattacttttgcaccagcttaatattactcagttgtgtctatgaaaaattttttaatctaaacaataatttggataaatttttgaataaggtatctaacctaaataataacttcacatgttcctaagtatctgttaatttatttgaatgcctggcccacttaaaaatctgatccacaaaatgctatagtcatgggtccatagggatccgtggttccctgggttagaaagctgtggaaaagagagaagtaggcttatgactgccattaagcagtgagctacaagaatttatcatcactttattcataaattgataaagccttacattttagctcttgaagatacaaatgaaaggaaatacagtcaccaaggccagttgcaagtttagcccagcccataaatttatgacaaaaagcagctcatctgccattgcaatttaatgttacatcaagtaaataaaacacatattatcctcttcttttgcttctaaatacagctctttaggaatattttctaaagagaatgcttgagacactttccccaattaattaaatttcccctaattaattaaaaactggaatgatccattcttcattgctattggtctgttaacccaactttttt

SEQ ID NO: 243386 - DNA, 726 bp, Homo Sapiens
gagcccctcccctttaacccaacaaagttcatgggcagcagcaggctgagacccgaagatgtttgaaaactcatggcacttgtgagaaaaggaggggcagagagatggggagaggtcagagcagaggtggaggggccacctctggggaaacggcaatgcaggggctgggctagggtggcctggggctatgctgcccctagagttgagggaagggggctggggaggctggcctgacaggctggagaggagggggccgggacaggtgctcaggacacatcccgagcctggagcttccggggtctgggatttggggtcaagccgcccagaacatgggtgtcccgaccccagccctggcacctggcttcgtcttccctgcgggaaggtggaggatagggaaggtgatctctcacctttgcccctccccatcccccagaccgccttgccgttcccagcaccctcctcagccatacccatgccctccacaaccccagtgcctccccattttccttctgccatcaacctctctaggtgggaaatcagccccatcttccccggcgagagtccccagagcaatatacaagaagcaggaactcaaagggacagcgcagccatcttgacaaagcatctttgggtgtgaagaggtctcccccgggccggtggggagggaagggggagacaggcctctggtcctggggcaggcagtgagccaacttttttgtacaaagt

SEQ ID NO: 243387 - DNA, 1321 bp, Homo Sapiens
  misc_feature (423)..(653): n is a, c, g, or t
  misc_feature (963)..(1043): n is a, c, g, or t
ctcaagtgcatcagaaacgacccttcttcccacaccagtcttcacagtggtcaagtgcagcaaccacttagctcccaaggcatgtgcctcagctggcatttcgtcacaatcaacagtaagtggtagcttgagtcactgtgaggtcacctactggaaatcaccagcatcccatttcccactggcaaagagctcagcactgcccaaatcccatctgtgtgggtttatctcctgggacccttcctaacatattagtcagagtccaatcaggaagcataaaccactcaaaagtttaaagtggtaaaatttaatacagagaattattcattataacaggtgaacagcataatgagagattgactagcacaaagtaaagagaactctagagaatataggactagcccaggccaggcacggtggctcatnnnnnnnnnnnnnnnnnnnnnnnnnnnnnnnnnnnnnnnnnnnnnnnnnnnnnnnnnnnnnnnnnnnnnnnnnnnnnnnnnnnnnnnnnnnnnnnnnnnnnnnnnnnnnnnnnnnnnnnnnnnnnnnnnnnnnnnnnnnnnnnnnnnnnnnnnnnnnnnnnnnnnnnnnnnnnnnnnnnnnnnnnnnnnnnnnnnnnnnnnnnnnnnnnnnnnnnnnnnnnnnnnnnnnnntgacagagcaagaccctgtctcaaagaacaaaacaacaataaccatttacagacagaaaagaaatagagctaataagctgaggaaagatgttgaaatgtgacaagtaaagtaatatgagttcttttgtctatgtaaaataatcaaacaaaaaatgacttactaaattataataccctgtgctggcaaaggtgcagtgaaatgggcacttttttatactatgaggggtgtttaaattgtgtataagccttccagggtaaagcctgtcaattttttaaaataatagagacagggtctcaccatactgccatnnnnnnnnnnnnnnnnnnnnnnnnnnnnnnnnnnnnnnnnnnnnnnnnnnnnnnnnnnnnnnnnnnnnnnnnnnnnnnnnncaaaaccctgtcaatttacatcaagggtaatgagaatgtccattcaccatgactcacagtaatcttacttctggggagacaattcaatctaaacaaaaggtcatctgtacacacacagtaaaaatctgggagtaactgaagacagagttggtaagtgaaataagaaacagttataagaaattaaactatggtatcaataggcacctggtaaaaggtcagttgatgttagctgctacttttttgttgttttgagacagggccaacttttttgtacaaag

SEQ ID NO: 243388 - DNA, 1645 bp, Homo Sapiens
gtatgaattatttcttaataatagaaaacataggctacaatgaatggacagtcatatggtttggtgatttgacaaacttttttcaagaagcaaagtccaattttaaaagacagacaatatataaaataacttacatatttaaaatgctacttcattgaatctaaaagattgaatgagtactcttatccagcatgatttgtagttgtcctttaaacaatgcagaggacaagaaatcctctatgtgatggcaactcaatttctacaagactgaaacagtcttcatgaaattgattgcttatcacatctaaatgacaggctcatagaaaaattcttatggatgtattggggagttagtctttattcagaggtctcctaattgatcaattaaactaagatcgtaagttgcactctccaaacaggattgcaagaggttctacgtaaataaacataaatgatttgatttgatttgtcagactaattgtttttaagagagatgtgaaaacatacacccatacaaaaaacttttacataaatgttcacagcagcattattataatcaaaaggtggaaaaaacccaaatgtccatcaaatgataaatggacaaataaaatgtggcatatacatgcaatggaatattatttaaacatgaaaacaatgtactgatttatgctacaacatggatgagctttaaaaacattatgcttacttagagaagccagacacaaaaggccacatgttgtttgactatatgaaatgtccaggataggcaaattcatagggacagaaagtagattagtggttgccggatgctgggggaaggaggaggaggagtgattgcaaatggtatggggtttcttttggaggtgatgaaagtgttctgaagttagggagtggtgatgttgcacaacttagtgaatatgattaaaaacattgaagtttacaccttaataggataaaccgtatggtgcatgaatgatatcttaattttaaaaagagatgcaacttcatttaagaatattttgttcaagtttgtattccctccccacttcccttttttaatgttgattgaatttttcatacaatcacctttctacagaaggttttcagctaattggactcgggtcatcagtgggttatatttctaacaggctttttgttaagtaaaaagatcaatatatgaacacataaaatatgatgtagtatactgttaatatttgcatattaacatttaaaatcaagtactattcttatattgaagttggttagattttatataacgctgtatacaaataatactgatatcctatgcttaaaaccaatagccaaatatcaagaatcgagttcataaaactcagtgattaacctgtttattagttaaaactatgtatgtattaatattaaagatccatgtttcaatggagtgataggaaatgtgggggagatcaaggattctctaagtcttcataaagcagcttctctaaatattttaactagctgctgagatctccagaattatatattttgcattttatttcatctctatactaaaagtcatgcattaaaagtgtgtacaagatatatggggcacacttttcccttcagattatcaaaagacctctttttacccaacttttttgtacaaagt

SEQ ID NO: 243389 - DNA, 920 bp, Homo Sapiens
ttgggtgagaacttctggctcttgatcaactccacggatcccgcaggacagctccagtggctggtgggggagcttcaggctgctgaggatcgaggagacaaagtgcatataattggccacattcccccagggcactgtctgaagagctggagctggaattattaccgaattgtagccaggtatgagaacaccctggctgctcagttctttggccacactcatgtggatgaatttgaggtcttctatgatgaagagactctgagccggccgctggctgtagccttcctggcacccagtgcaactacctacatcggccttaatcctggttaccgtgtgtaccaaatagatggaaactactccgggagctctcacgtggtcctggaccatgagacctacatcctgaatctgacccaggcaaacataccgggagccataccgcactggcagcttctctacagggctcgagaaacctatgggctgcccaacacactgcctaccgcctggcacaacctggtatatcgcatgcggggcgacatgcaacttttccagaccttctggtttctctaccataagggccacccaccctcggagccctgtggcacgccctgccgtctggctactctttgtgcccagctctctgcccgtgctgacagccctgctctgtgccgccacctgatgccagatgggagcctcccagaggcccagagcctgtggccaaggccactgttttgctagggccccagggcccacatttgggaaagttcttgatgtaggaaaggatgaaaaagcccaaatgctgctgtggttcaaccaggcaagatcatccggtgaaagaacccagtccctgggccccaaggatgccggggaaacggaccttctcctttcctggagctggtttagctggatatgggaaggggttt

SEQ ID NO: 243390 - DNA, 1042 bp, Homo Sapiens
ttgggagtaataaaaagacagctaggtcccttcttgtaacaaacttagattattatctcataaaaggcattaaaaaaacaaatttgtctctagaatgttccagtggaaaacttctttgtgaaatgcaatggagcactcattaacaccagtgacacagtgcagcatggagctgtttatagtttggaacccagactttgcggtggaaaaggaggttttggatctatgctccgagcacttggtgctcagattgagaagacaaccaatcgagaagcttgtcgggatctcagtggaaggagactacgcgatgtcaatcatgaaaaagcaatggctgaatgggtaaaacaacaagccgagcgagaggctgaaaaggagcagaagcggctggagcgactgcagcggaagcttgtagaacccaagcactgcttcaccagccccgactaccagcagcagtgccatgagatggctgagcgtctggaggattccgtcctcaaaggtatgcaggctgcctccagcaagatggtttcagcagaaatcagtgagaatcggaaacggcaatggcctactaaatctcaaacagacagaggagccagtgcgggaaagaggagatgcttctggttgggcatggagggactagagactgcagaagggtccaactctgagagttcagatgatgacagtgaagaagcaccaagcacttcaggaatgggtttccatgctccaaaaattggtagcaatggtgtcgagatggcagccaaatttcccagtggttctcagagggcgagagtagtgaatacagaccatggatcaccagaacaactgcagatcccggtgactgactctgggaggcatattttagaagactcatgtgctgagctgggggagtccaaagagcacatggaaagctgatggttacagaaacagaagagacccagagaagaaagcagagagtaaagaacccatagaagagagcccactggggctggactgataatgataaagagacagagaaggactgatggggaaagagttgctgaggtagcac

SEQ ID NO: 243391 - DNA, 1418 bp, Homo Sapiens
  misc_feature (1071)..(1080): n is a, c, g, or t
  misc_feature (1355)..(1369): n is a, c, g, or t
ccgcaagaacacaggtatactttgagaaattcctcttctagtaacatgccctagagaaactctcacacacggataccaaaagtcttgcacaagaatattcatggtaacactgtttgcaatagtaaaccccacaaacaacccaaatgcgcatcgagaactctagagaaagatgaggacagattagattacctgagagagtttttcttatggtacaggaatgaaggaaatgattagctactcatatcctagaactattcttcatacaaagcaaaactgcaagctgccacttgggggaaaggcagaaaaccctcccaccctctgaaaccagacaaataccaggagtcagtagagagtacacaaattctacacaaactttttcaggaaaaaagaacaggaaatgcttctcaatttactgaaatttgttttatgaccaaggatatggtttattctggtgaaggttccatgcacatatgaaaagaaagcatgttcttttcaatagacaaaagatagagacattcaccaaagaagatatacaaaggggatagcaactaagcaaataaaaagatgttaaacatcaccaatctttagagaaatggaaattaaggccacaatgagacaccaccacatacctaccagactagcaaaaataaaaagtaatgacaataccaaatgctggcaaggatgtggagaaagtggctctttcaaacatttgtggtttgaaagatccactttttctggtgggaatgtaaaacagtatgatcacttgggaaaacagttgttcagtttctttaagaattaaatatatacctcctataagggcaagcaattgtactcctaggtatttatcccaggaaaatgaaaacttatgtccacacaaaaatcagtacatgattgttcatagctttgtttgtaatagccaaaaactggaaacaaccaaaatgtcctaaaataggtgaatggttaaacaaactgtgccacatctctaccactgtaatacttatcagctataaaaaggaaagaactaccgatacatgcaagttggagagatttcaaaggtattacactgagtgnnnnnnnnnngccaatcccaaaaggtcacataatgcacgattccatttatataaaaaaaactttaaacgtgtctcttttaaaatgtgttttgacttactgagtttttccttcaattgctttacaaatttatcacctatctgccttagcttcataacacattagtttagtatattttagaaacacaaaccaatgacctgacagaagaataggtgttcccatttcagagaataaatataatttatctcagttttttacagtgggtgacaaaaattgtgagataaacnnnnnnnnnnnnnnngtcaagaagtaatcaataaaactagaccaagagataatctattcgccaa

SEQ ID NO: 243392 - DNA, 864 bp, Homo Sapiens
  misc_feature (115)..(126): n is a, c, g, or t
tttcaaagggaaaatcctaatttacagtggagaaacctggcacacaccaccttagccatgtgatcaaagttaccaccacctagtctaggtgtggtggctcatgcctggccaacannnnnnnnnnnnaactatcatcctagagttcaagtagataaacgtttttatgcaacttaaccagaaagacattcagaaattggtaattatgtgtggagggttgaattatgtccccacaaaaattcatgctgaagccctaaccatctacctgtacctcaaaatgtgagtatatttgaagataggccctgaagaggtaactaagttaaaatgggattgttaggatgggccctaatccaacctgagtggtatccttattaaaagagaagattaggacacagacacccagacagagggaccatacaaggacacagtaagaaggcagccatctgcaagccaagcagagaggcctcagaagaatctaaagctgtcgacaccttgtcctggactttcagcctccagaactgcaggaaaataagtttctattgtgtaagtcactcagtttgtggtactttgttatggtatccttagcaaactaataaaggatgaaaccctgaatttttaaaaatttcaaaatgtgtttacataatcttctaccccttttgtcctgattattcaatgagcagactagaaaagcctaatacctttctggggacagctacgttttaataatccacctaccttactaagctgtgtgtgctgggagaaaagtgagggaagtagagtcaggctgtcagtccactgttgcaagctgcaactaatcccaaaagctgaatgcaacaagtcaacagcagtgagagaagccccagccaa

SEQ ID NO: 243393 - DNA, 748 bp, Homo Sapiens
  misc_feature (136)..(390): n is a, c, g, or t
tgagtctaaacaggctctgaaacagattgtgcaaaacctcaggcctccttccttcctcgggaagttccaactggtggcagaaatgaagatggaacttctcaagaataaacagttttggccgggtgtggtggctcannnnnnnnnnnnnnnnnnnnnnnnnnnnnnnnnnnnnnnnnnnnnnnnnnnnnnnnnnnnnnnnnnnnnnnnnnnnnnnnnnnnnnnnnnnnnnnnnnnnnnnnnnnnnnnnnnnnnnnnnnnnnnnnnnnnnnnnnnnnnnnnnnnnnnnnnnnnnnnnnnnnnnnnnnnnnnnnnnnnnnnnnnnnnnnnnnnnnnnnnnnnnnnnnnnnnnnnnnnnnnnnnnnnnnnnnnnnnnnnnnnnnnnnnnnnnnntctgtctcaaaaataaatatagtttctagcactcatcccctagatatcccccaagtgtctctcttcccctttggtcaaggttataactgggataatgattatgacagactggctgggtgtcagaggtacagatttaaggtagatggactcagggtaaggatagctacagctgtgtggggctgaaggtctgtggcactgagctactggggaaggagggctctgttttcattttgacacactgagttaataaagcacttactgagggagccagagcccaaactctaaatgtgctgtagaaaaagggccaagtcattgactgcaccactccttcagccagaggtggaaaggatttacccaa

SEQ ID NO: 243394 - DNA, 539 bp, Homo Sapiens
tcaaaattaatagatataattccaattttaagctgtaggaataaagaagagattaaacataattaatactcaaataaactatattctctctccaaattctgtggcaagagaatccccacttgaggaacataagatctatcaaggaaaatagttaatgggatcaaggtaatgaatcaagttattaaatgcccttattaatatttttaaggctatatatataagtgtgcccatatattcagaaattctaggcaaggaaatgacattcctatacaagctctttgagatttggtaaacatttgtcacaggaactacctaatggcaaacctgttctggtaaatgctactgaattactttgctctatataaatttaggtcttacagcaattataaaattgattcattttagcatggaaaacttggtaaggatctaccttaattgtgatgtctactttcactatgcttagttatcagcatggctttagtttagtactcagaaatccccacattccaggacaggcgtggtggctcatgcctgttacc

SEQ ID NO: 243395 - DNA, 796 bp, Homo Sapiens
ttggctcaagatgttggtggagaacatcctgaagcggacagcacagggctctgaagacgaagacatggccaccaaggccttcaatgcgctcaaggagctggtgcaggagtgcaatgctagtgtacagtccatgaagaggacagaggaactcatccacctgagcaagaagatccactttgagggcaagattttcccgctgatctctcaggcccgctggctggttcggcatggagagttggtagagctggcaccactgcctgcagcaccccctgccaagctgaagctgtccagcaaggcagtctacctccacctcttcaatgactgcttgctgctctctcggcggaaggagctagggaagtttgccgttttcgtccatgccaagatggctgagctgcaggtgcgggacctgagcctgaagctgcagggcatccccggccacgtgttcctcctccagctcctccacgggcagcacatgaagcaccagttcctgctgcgggcccggacggaaagtgagaagcagcgatggatctcagccttgtgcccctccagcccccaggaggacaaggaggtcatcagtgagggggaagattgcccccaggttcagtgtgttaggacatacaaggcactgcacccagatgagctgaccttggagaagactgacatcctgtcagtgaggacctggaccagtgacggctggctggaaggggtccgcctggcagatggtgagaaggggtgggtgccccaggcctatgtggaagagatcagcagcctcagcgcccgcctccgaaacctccgg

SEQ ID NO: 243396 - DNA, 1302 bp, Homo Sapiens
  misc_feature (83)..(110): n is a, c, g, or t
gggtaacataagacatttattactttatactaattttttcattcataaaaaggacaaagcacagtcctatactactccattgnnnnnnnnnnnnnnnnnnnnnnnnnnnncaattcaatatttatcagtatcaaataaaactactatcacctttcctgaaatacaaagaaacaacagatgtatctatacctatataaagtttaattcagaatcttgcgtcttaaagcagatgattattagttagcttgacaacagtttaaaactgatggtcccagttaaatctgtacaactgtatgagaaaatgaaaagcttgagttatcagtgtacgagagattttaaactactttatctctgtcagaaattcaaaactaaacaacctccaaagtctgttttcctcttacctttcagaaccatttcatgcaaaatctaaccagttttgctcgttattatcatatattagaaaataaaaggcaagcatgcatttggcaaaagatttagttgttgattatataaaaatgcccaacatgggtcacattgcaaaagtaaaaccccaaagtgtaacaatgaaaacacaaacatttgtacagaaggtatacagggtattcgtttccctaaagtatgaagacattttgtttctttttcaaatacttaaatattttatgaaatctggcaatgatcttaagactgttgacatacttccactgggaaatcatccatttcacttatttttaaaagtttcattttataccagagttaaatgtaaactaatgaaatatttattgatattttcataatgaagactctaaacatttacacatcgatatatagtacaaaaattatacaaattaaagaaagggggtaaagtcggtaaagtagtaatagatctattttgcttcctgtaaatattttttacgaacctatacggtgtcctttctaaaaagataaactctaattagctagcaagtttgtgctaataaaataggattatacctcttgaagcatccaacactgcactatttcacaagccagctaattctttattactcgatttcttttacatccacactcaaacacatttccatgcacaccatggagaatgaagaaatgtgcatcttccttttcacaacttataaaaacccaaagcaccaacacttgggagacaccatcggaaagacatattatttgcctcctcctggccttccagttttgcatactcttcaaagtaccattagcagtatattgatttggtatttttagccagttttcaccaacttttttgtacaaagttggctattataaggg

SEQ ID NO: 243397 - DNA, 1208 bp, Homo Sapiens
  misc_feature (989)..(1042): n is a, c, g, or t
aaaagtcaaatataaagttcttatattacctttgaaactgagatatgaattgctgatataattaattatattttctataaagaaagttaaataactgtctaggctactaagataggggtatttaagaatatgagagatgatggcacaaagagaaatgagtgaactgattggatatacgcagataaacatattccagtatttcaatacaccaaatatatagcttaaaatcacgttacactggaaacaaaacaaggggaccttgcttttaaagacatcttcataaaacaatgtcaataactttggctctcatacagaatatatcatataaactatattccaaatcaaaattttataagatatcaacatatatcctataataaaccatatctatgtgtgtgtatacttagagcagttatacaagtatatattgatatataagatttgaaatttttaagaaaaaatttggctaaaaggattacattgaatgttgtaaaaaggtatactacataaataagaatcctgaatttaatatcagcaattatttcattgtgcaatgcctttgcttacacacaatgagggaaacagaatcatatgaatcatatgtgagtacactctgaaaaactatcatccccattttttagaacgcaaattaaaggcaggcaaagagcccaactttacctgatcttttctttcttttccattgctatattactgactgcccaggaacattccccaattcacaatttgtcaaggttctaacatgagctatcactaactgatcataatagtccttcctaaggtctacagactactttatgaaaatattactgattttgcaataggagaactgtttctacgtttgttgctaatagaaattaaaaggtatttactataatggataaaaatcaaacaattcattagtgatctacttttacaccaaaaaatgagtaaggttttgtttttgtttttatttctccactgaagtgagnnnnnnnnnnnnnnnnnnnnnnnnnnnnnnnnnnnnnnnnnnnnnnnnnnnnnncaatgctatatttattataatcagtagtatacacaggagaatttgtctcgtagtactttttttaagtaaagaagcaataactcatacttaaaagcactttctattgtcaagagagttaagctgaaaaacaccaaagggatttatagtgtgcatgacactaaacatc

SEQ ID NO: 243398 - DNA, 1261 bp, Homo Sapiens
ttgggtatttatactatcaaagaaggagaagaaaactgaactgaggaaaatggtgttttcctcaagaagactactggaactggatgacctcagaatgaactggattgtggtgttcacaagaaaatcttagtttgtgatgattacattgctttttgttgtccagtagtttagtttgtgtacatatatacacatatatattttgcactacacaaacgataacattttaaggactaatattgctgatacttgaataatcaatctctactaggttataagtagtatacacagatttaccctgcccttgaacttgaaggacattaaattattaatgatcatttggtaacatgtttacctgattatcttccatagagtaacataagctgcttttcaaaggtaccattgtgataatgagatcaaatttataagttattatttttaattttctaaattaaataaaagaaagaatgcaaaccaggagtgaatttcaaatgagatgtaatcgactttatatcttagtcacggagttgccatggcatgtagtagaaaaccacaggaagaatggtcatattcactttgtgggctgcccataatctttcttgggcattcacaactcttgagtttggtgttcaggcatcattattaaaaagtggagtcctatgtaccagactgagtttttacaaatgatttgcaggctagacataacccactgatggaaatggtgaagaatgagcttcatgtaggtttaaaagtgtattctgagcctgtagatgattaatcaggtttttattcaatcatataaatgtattcctttgtaatcatttttgtttaactgaggatatctagtgtctgcttcatagggtgctttgaaatataaaatgaaaacttatttatactgtttttacaacagtcaaaaaggaaacacgaaaatcacttttctgcaactgatgaactatatagactggactcttaacctcttagtgcctcagtttttccttcggggtatactattttagatacacctacttcacaggagtactggagggatttgcaagctaacgggccaaatgcttccatatgaataaggcatgcccagctaacagaaatttaagtccctcttccccacctctctcatctagaccaaaaagaagactacaatttagatccttggagacttttcctgtatgccttcccaaacttcctgctcacttaaatgtaccttgtgctttgaagatttctttgatgcagtctttgtaaccaataa

SEQ ID NO: 243399 - DNA, 814 bp, Homo Sapiens
ttggcggagctccaagttccgtcatgtctttggcaaaccagccagcaaggagaactgctacgactccgtgcctatcacccgcagcgttcacgacaaccacttctgtgccgtgaacccccacttcattgcagttgtgactgagtgtgctggtggaggggccttcctcgtcatccccctgcaccagacagggaagttggacccccactacccaaaagtctgcgggcacagaggcaacgttttggatgtcaagtggaacccttttgatgattttgagatcgcctcctgttctgaagatgccacaattaagatctggagcatccccaagcagctgctgaccaggaacctcacggcctacaggaaggaactcgtgggccacgcgcgcagagtaggcctggtggagtggcaccccacggccgccaacatcctcttcagtgctggctatgactacaaggtgatgatctggaacctggatacaaaggagtctgtcatcacaagccccatgagtacgattagctgtcaccaagatgtgatcctctccatgtccttcaacaccaacggcagcctgttggccaccacctgcaaagaccgcaagattcgggttattgacccccgagcaggggaccgtcctccaggaggccagctacaaagggcaccgggccagcaaagtgctgtttctggggaacctgaagaagctgatgtccacaggcacatcccgatggaacaaccggcagtggccttgtgggaccaggataacctctctgtgcctctgatggaggaggacctggacggctcctcgggcgtgctgtttcccttc

SEQ ID NO: 243400 - DNA, 1035 bp, Homo Sapiens
  misc_feature (106)..(116): n is a, c, g, or t
acttgtcctcctttcttttaatccttcctagaatttaaggattagcaaggatatcaatgtatcttgggaaagccactcaacatctctgaatcttgtttgaaatttnnnnnnnnnnncttttctttctttttttaaagttttaattatggataatttaaaacatatccacaagtggagataatagcataatgatgcccccatatatccactgtctagcttcaacaattaattcattaccagtctcatttcatttataccctcactttatctaccactcactgaactactttgaagcaaatattttttgaaacaaatctctgaatcttgcttttgaccattctgaaataagaaagttgatctatatatatctatgtatcctataacatcatgttataaacctcaaatataaagaataaaatttattttaaaaaagaaagaaaatatcttgacagtaatttcatctttggcctatttcaggctttatatttaattcaacacaaatgtacttcatattcactataacatcttttttcaagatttactgatctcctgagtcaatacaatccatatagttagcaccaatagataagaactataattatattttactttgtacttatattttatgaatattaattcccagttagatctttaaggttcctattttatatttcagtgttcagcagagtactgaacaaacacataggtaatactaaattgctccagtttacaataactaatcaactgattggttttaatctgaatggtacagacagaattaaaacatttatatttttaatagtgggtagctccatattaacactattaatcattttaatcaataacatgtttgcttactagatgaaattcctgttttatgagtgctataaaatagatggtgaaataaaacaaaaaatgagattttcttcttgaaggaaaaatggaaaatgtaacttagttctggattttatttgttcataattgagtaaatttattttactctagtgcaggtattttataaatgaaatgtattct

SEQ ID NO: 243401 - DNA, 738 bp, Homo Sapiens
tacaaaaaagttggctcaactttggccaagtggtggccgatgtgctctgcgagttcctggaggtggctgtgcatctcatcctctacgtgcgcgaggtctaccccgtgggcatcttccagaaacgcaagaagtacaacgtgccggtccagatgtcctgccacccggagctgaatcagtatatccaggacacgctgcactgcgtcaagccactcctggagaagaatgatgtggagaaagtggtggtggtgattttggataaagagcaccgcccagtggagaaattcgtctttgagatcacccagcctccactgctgtccatcagctcagactcgctgttgtctcatgtggagcagctgctccgggccttcatcctgaagatcagcgtgtgcgatgccgtcctggaccacaaccccccaggctgtaccttcacagtcctggtgcacacgagagaagccgccactcgcaacatggagaagatccaggtcatcaaggatttcccctggatcctggcggatgagcaggatgtccacatgcatgacccccggctgataccactaaaaaccatgacgtcggacattttaaagatgcagctttacgtggaagagcgcgctcataaaggcagctgagggggcacctgccaccccactgatgcccaaactgtcagactttgggggatccccgcctagggcagtgctgcatggctgccctgattccaagtgctcttatcgcctctgtgtg

SEQ ID NO: 243402 - DNA, 864 bp, Homo Sapiens
ttaaagggctattattagggaaccaggggaatgagctgcttatccctttataacagtctagagcaggtcatcaggcccaggatggagagaggttatcaaaggtgctgtggtgtgctttgctgcacgtgcttagggcctggaaggaaaggtggtggcaacagaggttggcaggaactggtgttagtcaaaacaccaaaatcctgggggagagcccctctaccttccttctaactccacttgaggtgggagcattccaggagacagagaatgtgaccaggatgcagcagtgtcatctgaacccctggcttcgttcagtgctacttcacttgccagccctccactcttcttgccttttagtgattaggtatttgaagaactcatacacagaccatgcgatggctgtggaggggatctggtaaattactctggcctgcacccctcggaaataggcggtcaccccacctacttgatataccgtcctgaaggcactagccatgcctgtgatatgtcctgtaatgtgtgagttcaaagccaaggactcctgggtgttgagcagtgttttgcaaacgtccagtggggttgtggctgcggcagctacagctcctgcgcaagctccagagaggacgtgggagcttgggttgtaccgtctctgggggttaaagtgctcctgcaggaattcataggtcatgaagtgaatggcttggaaaggaacgttcatggtcagctgggtggtgtagctgcggtaaaaggccccggccccttcattttgccacactgcccgtacacagtctgtcacccggtggtatggtgagttgtacatctgcatcctctgcttgaccactattagtggcatcaacgagccaa

SEQ ID NO: 243403 - DNA, 1380 bp, Homo Sapiens
  misc_feature (858)..(936): n is a, c, g, or t
ttggcttatatgtacctggagtggatgacttctttcttttgggggaagaatgagagatgcacatttcgttagtaaattgtgaacaacttgaaacaaacccaaatccaattttgaatttaggaagtagagttaaaatgaaaggtagccattcaaatactatgccttgctaccttcacttgttgagttaggattttcttccttttagccctttagggacacagtagtttaaaagagcagtagccacatatgagaagtaccagatttagcttagagggaattccttagaccagccctgctgttaggacttgacattcaatattgtttgatcacattccaaaatatatcttagctaatggaaacatttataaacatataaattgcaaaagaagctttcttgtgtacatacatttttaaaagcttgaaattgatgtgaacctttaaaaacacgtaggatctgtattacattatacatctcaaaacatttaaagtgaatatcattccagtatatgcaatatacctaagccccagaattagcacattgatttactagttgaaaatataacagtgaatcaccaaacttaagtgtatactttttgggagagaatgaaattacagtatttcttaatttactgtaatgtcatctttgtaattatgaattaataattcaatgagaggagacttggttgattaaattaacgctggtcctacacattatatctaaaggatcttcgtatatgactaatatcctcttggattattttaacagttaaaatatacaaagtggcccattaaaaacagagttgacttttcactattgctgtttttctggtgagacatgtggacaggaaggacaggtgnnnnnnnnnnnnnnnnnnnnnnnnnnnnnnnnnnnnnnnnnnnnnnnnnnnnnnnnnnnnnnnnnnnnnnnnnnnnnnncaaagggtaaatcatatgcttaatcactaagatctgttagatactgcagttaagattctttatcagcaaattattggactctagtgttaacatagctagaggtggaaaagggagcaaggccaggtgctgggatgaataattaagcgagataacatcagttttcaccataggaagaagtaccatggttgctcgtaaagtaagagatgtttcctattttatgtaattttattaaaggatagtgttttcttttgtcactgatataaatgtacctggctggttctcagccatttggctaagatcgagcacaaagtgtacctgagacttttatatctaatctaatgtagaccagcctgttaaagagaaaagacaattggttaaactgctgatgtgttgctttgtcttctcaaagctttgttctaaaatacaatatgtaaaagatgttac

SEQ ID NO: 243404 - DNA, 547 bp, Homo Sapiens
  misc_feature (311)..(335): n is a, c, g, or t
caggctcctctcgagggatatgaagcaccgccaggtcctctgagttttaagttggggtttgtagtgttgtggcgagcagttttgccgatgtaactgacgaggccttgtggtaagcattcttgggtatctaatcccagtctggctgctaggtgcggggcgttcagaacacttaaagccagcatgccagtctattttgtgtcaaaaagagttttttgccgccgccacctccaccgccccccccaggatggcaaaatgtgacccactgccgaggcgggcgtgcatggaaccccgccacactggtgaaaaagggnnnnnnnnnnnnnnnnnnnnnnnnngcttcctggctccttcccttccccaactcccgtcttgcccttttcccgccgccctcccggcagtctacacgatgtaaggtccgttggattaagagggcagtattaagtatgtctcccttcccaccaccgcctcgagaagaggcgaaactcaaagggatgctccctcacccccttcctccttccaaagaagtttcagcggcaatgggccccaa

SEQ ID NO: 243405 - DNA, 1704 bp, Homo Sapiens
  misc_feature (326)..(468): n is a, c, g, or t
aaactaagaacaagcatatatattgtggtggttctgtggtagacaaacgtaccagaagcctttgaagcttaacattattgaaggtttctgtacattactgggtaactaaaatcaactttcacttgatggaaagctgaaagttctgaaaaatgatttatactgactgtgggaaggttaaacctggggtctgatttaaagagggtggaggataggattgatagagagaaaacagagcccagatgtaaaagaggtatctctggtgcacagtgatatgcaaggcctatagacttggtaggtcaggatgctacaggggctaacaaggggannnnnnnnnnnnnnnnnnnnnnnnnnnnnnnnnnnnnnnnnnnnnnnnnnnnnnnnnnnnnnnnnnnnnnnnnnnnnnnnnnnnnnnnnnnnnnnnnnnnnnnnnnnnnnnnnnnnnnnnnnnnnnnnnnnnnnnnnnnnnnngttatacatctcatttgaagcttaaagagcacaatatgtgaggaagactggatttgaacccaggaccatttcactccattaccgatattctttcccctgtattactacatttcccataaacctaattcatagttgctgtttaagtcgatctgaagttttggtatgatctttcaaagcctaaatctggacttataaaacacaatagatggtactctaggctgtagaacttcctttctgaggggagagaaaatttcatttacttggttttacagaaaactgaccagcttgagcagcttttcagggtttctttaagaatatggcaattgagagtgagtcaaaacatcttgtacaactataaaactgcagaagaatttgtctcatggcacagaaataaaagggtaactactacttttaaagtttagactgtgagttaaattgtcaacatgtttaccaagttcttattaggagctcttaacacaaaattttaaaacggtgtttaagtattcatttttttaaaagtaccaaaaagtatcattttaatagcttaacattccctcaataaatgaactatacttttgtacttcatgcttaagttagagtaaattgctttagttgtcagaatgtgctatgctatcttggttacacatctttttatctggaacagttcttccccagaccctctctcacccaaaactggagttacatgactcccaaatacagtaccttgtattttccccatcacaccacgaatcctactataggataattgcttaattttctgtatcctttaatggtctttaagctctgcaggggcaagaactgtgtgcatattgttcaggacagtatccccagttgaccagcacagtatctggccctcaacaaatgtttgttgaatgaatgaattagaacagaagtcttaacatggaaacaatgatttatagcaatggccccaacagcaattttctagcttccaatgtgtcactaataatttcattagtatgtgtttcataagcagagatcctcatcaagatagcctgtgttcattaataaattttcaatgttttaatagtaagctcagagtgacccaatttattttgttcgtatacaatttataatgtagttgcattattccgtatttgtatacaaatctgctgttcaataagaacacattctctttactgtaccacagtacagtaaatggatccaatcccaattatgcattaaattgtgccccaa

SEQ ID NO: 243406 - DNA, 1236 bp, Homo Sapiens
tccatggttcatccgggcccagggtgtgcttcctaattgagggtcccgcatggcctaaagaggggccagggtcagcacgggcagctcggctgcagggcgctcaggccccgtgggctctgccacctggtaccagtgagaaaggggctcccagagccacctgccccaccccaccctggcaggcaggtgagcagcgagagcacaggactgggtggggtccccacctgctcagccaccatggaagggcaatggggccagcatcataaggtgtgtcccgaaaaggctacaggggcctcctgacccccagtgcttggaaatgtggccatatttgcaaacagggttgatgcagatgtaactgaggtgcatcctaacccaactgaccggggtccttctaagaaaaggaaagacaggaagacacaggcaggcggggagggggccacacgaagacagagaccacctggagcaacgcggccacaagccaagaaacaccaagggctgtggcaaacaccagaagctggggggcaacggaggtctctaagagggttcagagggaacggggctgccagtactttcatcttggacttccagcctccaaaactaagacaatctatttctgttttttaagccacccagtttgtgacactttgttacagcagccacagtaaacgaacagattttggtaccaggaagggccaggaggggtgctgccaaaacctaacaccaagaactgtggcagcagctttggaagtgggtgatggggagaggctggaagaactggtgaggcctgcacgactgctggtagaaaggcatgaagacaagcctggaaatggctggaagaggagagctgccgccgtcttggagaatgcacacagcatcacagactggatgtcggcagcaatgccgacccaacaggtgcttccagtgaggtctcagatggaaatgaccgtgctactgggaaccggaggaggcagcagagagcttggctggctgctgctctgctgttgggtgcgaagtgggacctgcagctgatgagcctggacatcaagctgagatttccaagcagtgtggaaggtgccacctggcttctccttgctacttatagcagaatgcaagagggaaacaatcagtgaggcagggaccattaagcaaaaaggcaccagcccttggggatctgaaaaatactctatccaggcagctctgagacgtggccaagggtgtggctggaccagggtttgccaa

SEQ ID NO: 243407 - DNA, 857 bp, Homo Sapiens
gccaactttgtacaaaaaagttgggatgcgggcatcttcgtctcccgcattgccgagggcggtgctgctcaccgcgcgggcacactgcaggttggcgaccgcgtcctctctattaatggagtggacgtgactgaggccaggcatgaccacgccgtctccctgctgaccgctgcctcccccaccatcgccctgctgttggagcgggaggctgggggccctcttcctcccagccctctgccacattcctcaccccccaccgctgctgttgccaccaccagcataaccactgccacccccggggtgcctgggttgccgagcctggcccccagcctgctggctgccgcgttggaagggccatacccagtggaggagatccgtctgccaagagctgggggccctctggggcttagtattgtcggaggctccgaccattccagccacccgtttggtgtccaggagcctggtgtgttcatctccaaggtgctcccgcggggcctggccgctcgcagcggcctgcgggttggggaccgcatcctggcagtgaacgggcaagacgtgcgggatgccacgcaccaagaagcagtcagtgccctgctccggccctgcctggagctgtcgctgctggtgcggagggacccggcacccccgggcctacgggaactgtgcatccagaaggcacctggggagaggctgggcatcagcatccgcgggggtgccaggggccacgctggtttctcttgcgaccccacagacgagggcatcttcatctcctaggtgcgccccacgggggcagccgggcgcgacggtcggctgcgtgtgggtttgcagctgttggaggtgatatagcagagcctgct

SEQ ID NO: 243408 - DNA, 938 bp, Homo Sapiens
ttgggtaacatggccgctgtctcgtgagtcccgctagtgccgggcgggagttgttaagcggccagggtcaggtgtgctggagcggggtccgggcccgggttccagggcgaggcggcggagcgtggcaggcaagcctagagcggcgtggtccatgcgccggcgccgggggcagagcggagccgcagactcccctggccccggcgcggccccggcagccgcgggctaaggagtcgcgaggttcccccagctgccaccatgaaccccgagaaggatttcgcgccgctcacgcctaacatcgtgcgcgccctcaatgacaagctgtacgaaaagcggaaggtggcagcgctggagatcgagaagctggtccgggagttcgtggcccagaacaataccgtgcaaatcaagcatgtgatccagaccctgtcccaggagtttgccctgtctcagcacccccacagccggaaagggggcctcatcggcctggccgcctgctccatcgcactgggcaaggactcagggctctacctgaaggagctgatcgagccagtgctgacctgcttcaatgatgcagacagcaggctgcgctactatgcctgcgaggccctctacaacatcgtcaaggtggcccggggcgctgtgctgccccacttcaacgtgctctttgacgggctgagcaagctggcagccgacccagaccccaatgtgaaaagcggatctgagctcctagaccgccttttaaaggacattgtgactgagagcaacaagtttgacctggtgagcttcatccccttgtttgcgagagaggatttactccaacaaccagtatgcccggcagttcatcatctcctggatccctggttctggagtcggtgccagaacattaaccctgctggattacctgccgggaagatccctggatgggactcttcccaaatcct

SEQ ID NO: 243409 - DNA, 1339 bp, Homo Sapiens
  misc_feature (379)..(427): n is a, c, g, or t
ttgggtcttttaaaaaggcagtgctgtcttacctcttgctagtgggttaaatgttttcaaaaattatagcagtagtagaagttttgtataaaatttgtccttatttgttaattgtatataaatgttaattatttgatacgaatgttatgcatttagtatgcacattgaagtctaaactgtagaagagtctaaaacaagttctctttttgcagattcacatactaatggtttaattctgtgctctgtttaaagtactattataactagagtagatctgaatgaggataaccctaaaatcatgaggaatggaagaatggaccttgaaactacctaggcttttatgcatggcacctctttataatgaagacactttttaaannnnnnnnnnnnnnnnnnnnnnnnnnnnnnnnnnnnnnnnnnnnnnnnnaaaatccattttactggaaagttggccagcagagggagtagaaattattaaaattctagtgtttggattgggcccttctctaacagtacatactcattcccaaagcaatccaaaaacaaaatgtgaaccatttgggtttcaaatgttaagaacactaaatagcatgatttaaaaaatgaaaaatgctaacacccaagaaaagaagatattaagtgctttttaacaactcctagagtacaaaatgagtacatcataatgctggctcttctactaatgaaccatcgagtgatattgaataaattatttatcttctcagtttccttatctgtaaattacaatattagactaagtaagtttttccaactcttcactaccaattaccttaggcttttataatgctccgcctacttcagtcccatgtttcagaagcttttgtctattttttaaactcattgattaaataatgattaatgcattctccacattttaatattgcaaaggcccattggagtttctgaagtggctccacagaattgaaataatttcaaataactgtaaaggaactgaaaatcttcacagagatgaagtggggtttccattaggtgctttgaaatttgataacaaatcatcaacttccactggtcaatatatagattttgggtgtctgaggccccaagattagatgccactaatctccaaagattccctccaattatgaaatattttaatgtctacttttagagagcactagccagtatatgaccatgtgattaatttcttttcacactagataaaattacctggttcaaaagtggtttttgtttattaaatttggtaataaatatatataatacacagacaggatagtttttatgctgaagtttttggccagctttagtttgaaggactcct

SEQ ID NO: 243410 - DNA, 1047 bp, Homo Sapiens
ttgtgcaaacaattccccccttgtgcaaaagggggagcttcctgctccccctttcacattaataacttacaaattcagatcacaacaaaaccccagactctagttttctgtttgaaaggtactgagctgggataatgggttgctaggaaagagctaatgcaagcccaaaggaaataaaatgttttctttatcagaaaagaataataacaaggcctcactctccaaaggaaaacagacgtcccaagatgttgtggaacagtattaagtaaccaaatacaattccaatggttatttcaccttcattttttatacttacactcatctcttttaattaaataagcgaaaccagaaaagtgcaattcgaagggactctgaactgtcagggaacgttataaaaataatctgacgtcagtgactaaagagtgcgggtcatcaggctgccggccggcctcctgcaagggcactggccagggaggccacagctgccaaagcggggaggtgcgccaggccccacatcacctgcctcggggtccatgccaggcaagaaagaaacatacacctgggcctagccaagggtggtgccctgccaggtaactcttcaggtacaaaatctacaaaggggatcagtcctggagaacacatttctcttcccctctctaggcagagaaatacctggctgaagaaaaactacacaacactcaagtaatgtataagggagggttcctgtggaaggcaacgattcatgatttagaaactgaagtgtaaaaaatacagatcaacaattgtgcctttcattcttgtaaaatatcgctttaaaatcccgttttagatggttgatgtctgaaacgaaaccacggccttttaaaatatttttgattccaagcctttttataaggaagaggaattaacacctcaatcatcctagtcacaagagactattcaggaccaaaactgtataggctttctatgtgttcactaaagactgtgatgggcaattatagaatgacagcttattagaaaaaaattgcttttatcaacatctgccaa

SEQ ID NO: 243411 - DNA, 140 bp, Homo Sapiens
cttaatccaattttaaattctattcccaaaagcacacttcatgtgcctcttcttcttttcttgtttcctcagtatggaaaggagtgaacttactgtgaggcatctgaaatatttattaaagccaggcagcaagaagccaa

SEQ ID NO: 243412 - DNA, 1596 bp, Homo Sapiens
  misc_feature (362)..(380): n is a, c, g, or t
  misc_feature (460)..(695): n is a, c, g, or t
  misc_feature (716)..(739): n is a, c, g, or t
  misc_feature (1171)..(1230): n is a, c, g, or t
  misc_feature (1271)..(1334): n is a, c, g, or t
caaacttggtaacttctcaccctcccagatatttgaaccatattaaaaaattgaagataggatatcactgtgatcttaaaaagagaactttaaaaataacacattatgggaatagtaaaactgagctgctaaaaccaaagtagtaaacagttttcctgatgtcctcacactcttaactaaaacccaaattaaaactaccagctaaatttaatctaagtgttgactttttaaatgtcaatactttcaaacctcctttaataatattttaaaatatacataaacttaatacattacttaagagttaatctcatttctttgaatgtgggctttggcctaacttgcagaatgctggggaaacattnnnnnnnnnnnnnnnnnnnctaaatcagcaattttcttactttctaagtacttacactgttaaataaaataactgaggctgggcgcagtggctcgcacnnnnnnnnnnnnnnnnnnnnnnnnnnnnnnnnnnnnnnnnnnnnnnnnnnnnnnnnnnnnnnnnnnnnnnnnnnnnnnnnnnnnnnnnnnnnnnnnnnnnnnnnnnnnnnnnnnnnnnnnnnnnnnnnnnnnnnnnnnnnnnnnnnnnnnnnnnnnnnnnnnnnnnnnnnnnnnnnnnnnnnnnnnnnnnnnnnnnnnnnnnnnnnnnnnnnnnnnnnnnnnnnnnnnnnnnnnnncgttgacagagaccctctctnnnnnnnnnnnnnnnnnnnnnnnnttttttttggtacaagaatcaggtagatgattctcatttgggggttacaatgaaaaaaagactcaaaatctatttcattaaggggaatggcactattttgagtcaataaaaatccgaagggttgcagttttgtagtcaactgaaatttctgaaaagcgatataaaattaaaggcaatgtctcgatatagaagatacgggacatatttttacaattacatttcataacagctacattttctgttaaatctaaagagtctgtaacatacacccatgtgtattttatttcagaagagtcagtggctcagagatgtttagtttcgacttctggttcagtgaaatagtctaaatgtcagaattaaatatatgacttgctactcgccaaagatccacaatatattcacaccagatagaccaagattaactctcctgannnnnnnnnnnnnnnnnnnnnnnnnnnnnnnnnnnnnnnnnnnnnnnnnnnnnnnnnnnnccggcatggtggcgggcatctgtagttccagctacttgggnnnnnnnnnnnnnnnnnnnnnnnnnnnnnnnnnnnnnnnnnnnnnnnnnnnnnnnnnnnnnnnntccatccaagcattcctgactctttggtctttatgatgtagagaaacatcaacaatgtatgaaacatattatttctgccctttggcaggttgtatacatgacgctggtagatgagctcataatggggagggttgatagcactctgataaatgcaaaaaacattctcatttgtaacatctggtttatttggtgtctgaacaaagtgctgagaagtaaaagtttttccgtaagggatacttcggccaacttttttgtacaaagt

SEQ ID NO: 243413 - DNA, 1065 bp, Homo Sapiens
  misc_feature (385)..(394): n is a, c, g, or t
ccccctgacttttaaatgacttttataatactgcagatggtatatgttcaggggctaaatgggatctactttaaaggcaactactctatgtcactataatgaaaggaaagaataaattaagaaaattaagtcctgctaaaatgcacaaagacttgaagaaaatatctgggtgtattaaaagtgagatgctctttttcacgtactcattgaaaggttacaattaccataaacattttaactccattaaagatcatggcaaaagcttgctttcgtatctgcaaaagggctctgcctttccacaggctcggagggaaagcagcacaccgtggaagagtcactcgtcctggggaagcaggcatcagactatttgaagttgcataggcannnnnnnnnnaatccattttgtaaaagatactatggaaccttgagaattttccctccttcaatagtcattgtggcatcagttgttttaatccctttagcgcccaaatgtgcaaaaacactctagtaaaaaacgttacaatggcgttttggataaattcactatacattacatgacttgggaacaacgaagaaaaaagcccaagcttgactcaactatttcatatagaaaagcactgcaggagaaaactttgtttaaaaacattaaaactcaggtgaatataaatacatttttggttcatctgtgctatgtccatatagaaatcccgtcagatattcagtctaccgggtaattcagttggatttcgtgtctgactgaatcagtagaagaatatacacttgcatatacttacacagatatgcatttacatatacaattcagaccatgaaaatttgttttaaatacatttacttaaaacatgtacctctaaaaataaatacactagcctccatttagctaattctcagagttctttcacaaaccaattagaacagtttatcaacaatggcagacaatcaattagccgccctttaaatccattatctatcagtaaacattttaaaattcagatgtataacagaaataacatccgcagaatagaatgtagatagaattctcgccaa

SEQ ID NO: 243414 - DNA, 1690 bp, Homo Sapiens
tgtacaaataatgtggcatattgggatgtattgaaggcatgtaaagttgaagatctgggcaaagtggattttgaagatgaaattaagaaaagatttaaaatggtgtatgtgccaaattggttctcagtagacttaaaaacagggatgttaactattactttggatgaaagtgattgttttgctgcctgggtttctgcaaaagatgctggtttcagcagccctgatgggtcagatccaaaattgaatttaggaggacttttactccaagcactcctggaatattggcctagaacacatgtgaatccaatggatgaagaggaaaatgaagtaaaccatgtaaatggggagcaggagaaccgagtgcagaagggaaatggatattttcaagtgcccccacatacacccgtgatctttggtgaagctggaggtcgcacactgttcaggctgctctgccgagattccgggggtgagactgagtctatgcttcttaatgaaacagtgccacaatgggtaattgacatcactgtggataaaaatatgcccaaattcaacaaaattcctttctacctccaacctcatgcatcttcaggagcaaaaaccttaaaaaaagatagactctctgctagtgacatgctccaagtccgaaaagttatggaacatgtttatgaaaaaattatcaacttggataatgagtctcaaaccactagctcttctaataatgaaaaaccaggagaacaggaaaaagaagaagatattgctgtgttggcagaggagaaaattgaacttttgtgccaggaccaggttttggatccaaatatggaccttcgaacagtgaaacacttcatatggaagagcggtggagacctcaccctccattaccgtcagaagtccacgtgaaggctgggctaatgctcctggatattcatttacgaccttcctctatggccccaagagtagtcctaggaagcccactgatccccaacgggagcaagacttctaacggctgattggtatggaccgagattatctttcaattgaagtgactaatcgagatgtaatatagaaaccagtctccatgtgtagattaagctgtccccagggaagcagagtgcaagagcagaagagccccaagcagactatgtctttcaagatgtacagaagactgacaacaggccagtgcagactttgcttcctccttttgtttcaaaggaccttatctacccattaacacttgttagagacacctcagtcgggccacaactgtctctgtttcaactttaagcccacacactctgtagcttttctaaaacagtacattccattcatgcagtagatatgaaggctttttccaagtttgtcatataaagtaatcaaattgttttcaccgtttaagacagttatttttaatgggaatttgctgttgcacaatttgagaaccagcccatttcataataaaagattaatgttgggcttgttgttaatattgcatctcagatgtgttcttgtagaagatctgttgaaattccaggtgctggatcatagcacttggactgttgggccggagtttgtgcagcagtttcactccttcctccactgttgtccagttttatttacacaaagcgagctgagaccacaggttcttgctctggatgagcagcatgacacatcaaatttaagacatgatgaaatt

SEQ ID NO: 243415 - DNA, 1383 bp, Homo Sapiens
ttggcatagaatgaagggcatccagatagaaatctttggttaataattagaaatatagacctagaaattaggaggaaacctgagacagagacaaatatttcaaagcttacaatacagagatgatacctgattctattggagcaggtttgatcatctaggcagaaattaggatgagaaaaaaggagatccaataatacaaccttatagtcacagaagtaagaaaaaaagggtagttgttttgaagaagccaggataggtgtggaaagtactcaaaaagaaatcttcagggataaaataaagtgataatttaaaagaaatcaatggattaaacatattgaaactgttctataggcagtggtcattgagtcagctttcagtgcattaggaagaagatgcataggtgtcaactcttttctgacagcatttactagagaagagaaaaagctggggactacatcttcaaggaagggactttttttggatgagcagttttgagtgtgtttgtcagttaaagagaggaattaggttggttttcatttgggaaaaattgtatatatatttaatgtaagttatcacattgcatcttaaaaatattcttatttaatacatatatttcctacatgtatatgtggtagcatgatagcaaataacatttgtttggtatttccaaaggactttcatgtacattgcctcattttacctttacagctactctgaaatacacaggcattatcccttttattcagctgagaaaactgagcttcattgaggtggaggtcaaaaatcacaaaatttgtgatgaattaagatttgaacatatgttttgtgactccagttttcctttcagattttaaaattaattaaagggatcttcattatacttttattgttaactttttgttaacataatttattcatacattcagtgaaaattttgttgaggtactgggacaggttaaaaaatacagttgtagccctcaggatatttaatatccagtgaaaagtgacagtcagtaaaccaacaatctcaatactttgatatatgttgtgaggttgtgataaccgattcttgtttagtttaattctatatctcccttagaccagtgttaaatttaaataaaacacctcattttttccaattcagggaaggcactaaacataaagcataggatagaaatgttgaactcatccaaaatattattttgtttaatgaaaatgatgaagattaaggaatacttccatgtattgagtaaggttgataattttctaattcttcactgtgcattattttgtttgaagttggtaaatttggagtatcctgcagacacatttttgctttatgtactacaacattctacaaccaataaaaattattttgattta

SEQ ID NO: 243416 - DNA, 1401 bp, Homo Sapiens
  misc_feature (583)..(655): n is a, c, g, or t
gtgttcagatttctgactctaacagaccatctaaccatggaagcctacagcccttttaaaacatgtacttttcaatgttgtgagctgagtatatataacaacatattgctagtatgtaaatgtgcttaaaacaaaaatgaagttcttatctctagcagaactggagtcacacataaattacaacattcagacaaggccttccttttaagtagacatgacagaattttaaatttataaaacgaattaatgtatcgcatacattcactttacatattcaaaaaacgctaaacttaagaaactgaaaagttgaaaaataagaggtagtagtacccactgagtgacgttctggcattctattaaatattctacattagaagattatagggaaaagggagctgaattctaagagaacaaatgtagagaaggcaaccctatggtcttgggaaaagacaataatggaaggaaaaatatattcaaaatgtattgtacaaattgttagacatgcatcacttacaataaacagaaggtaattatttgtggtagcataaagagagaagggaataggccaggcacattggctcannnnnnnnnnnnnnnnnnnnnnnnnnnnnnnnnnnnnnnnnnnnnnnnnnnnnnnnnnnnnnnnnnnnnnnnncagtacaattcaaaataagagtttctaaatttttttaatccttatgttaaaataataaataatctcatttcagttgttttttcacccaattactaaaaaacaaaatagtcataaaaaagaattcatttagcaaaggtactatttgtagatattagccacttattaaaaacatatttctattaagattgttcttacattcttagatttagaacacctgatatctggacccagctgagtttttattttacagatcataaaacggatgaaagtatatcacagtaattaatgaagccgttctaatttagcttgaagagatttaaaattcccagtgatggcttgtactgctactgacgagctcatagactggagctcaacaaggtaaccacaaacagcatccaggcagagatttgtaaatcttctcatataacaatttaaaacttggctgggattctcaacatatcttatcaataatacatgtatacaatccaaaaggtgcagtggcttcttcattctgttccagaatggatcccgtgatttgaacaactgatcataaacttctagtagtctaggcaatggtactccaatttcattcattgtctgtattacgaagcccacatcccagttcaaagtacaaacctgctgttctaaaaactgtacaataaaatctaaaggaaagaagcgtggtgtgccagcataaattttgccaaggagaactaatcttgggactaagagccaacttttttgta

SEQ ID NO: 243417 - DNA, 980 bp, Homo Sapiens
ttggccttaagaaacacaataaatcactgtttaaaaaagatctcaatttatataaagtactggaaaaaagctaagtaatttttagttctatctataatctccgtaggatgaattagaaataaattgtgatgaaaagaaattaactgcttatttatgaatctaatcatttagaaatgtctgagagtaacactgcattcttatagaaacaaagcacaaattgcattcaagctctgaattgattttttgcttggagctgttgttacagtagctgtaatttttgctaccagaatgtcttaattttttaaatttgtttttatttctaagctcttggcaatgacaataattataattttaacatatcttcactgtagtcaacatgtagagtctgcttccctcattattgcattgctaaggcctttttaaaaagcttatgcttacataatatactcttttttatggacacgttatatgtttccaaatctgtgtattgtgatttttacatactaatgaatataaacaggtgattttaaaatattactgtgcttctttggttgaatgagctggtattgatgtaaaatactctgtcattgatggaccactacctgcagctaagcagtgagcagaatctccgggaaatgacttagtctggccacatgcatagcccatcttcataatgtcgcagcagaaggttctttgtggttaaaagttttaaagcctatttctttataggtaaccctctcggtatatttacctgggtagaaaaacatgtagattgtttctattacttaaatgttttaaattggactgtagtttagaaattacaggaccagcttgttacagattatacactattctgttacttttatttctgaaacttaaatacataaattctttttctgtgtttccaggttagcacttttttattttattgcacactgaccaaatactgttgcctattgaatattgtgtaaacccttctt

SEQ ID NO: 243418 - DNA, 1381 bp, Homo Sapiens
agtcttttaatttggtcctccaatcagctcaactctgatctaccaattttcactctattataaatgtcaaagcttgttttgaatgtgaactcctatatgaagccattcctcaccaaagaatatatgactttatatctaattccaaataaccaacaccagttcactcaaaacgtgttgacctaaagaggtacagaccaggatccttgaagtcaggagtcacgtataagactacacaaccattaagcattacagtgaaggcaagggaaaaacatactataattttattgctagtttgagctcttactagtttttgtaacttccaaatcacttaacctcaacttcctttagcctctgctccttctataaaatgaaaaaacaacctattgcacaagatttttatatatgaaaatactctgtaaattgtgaatcataatacgaatggtacttgttggtactacatacaactttcattcttatatatctatttttcaaataaatatacatattatatctaatcacctctaccatctcccactacaatgtctccttttaaattctatcgaatttccactactttattcacctttaatttcaacatactccaatatgttgtctcaaatctaacttttcttccttaggtttcttctatacccactcttagtcaagtggtcctaactagcagactcttttatccagtttccaaatttcagttatttattgtctctgatggtatatcccaaatctagaagacagcccatgtttgtgagacctcactcctaacttctattattatagaggtgaaatttcatcttctctacaaaatcctcactaaagtaaaaggaatcaaaatacaaagaccaaaatttaattctggaatgaattaattcattcacaaagatcacagtttataatctagcttgaaatatcacaaattaaatctttctctagtgtcttttctctgaaaaagatgtttatttaggtttagattgtcttgttagtaatataaaacatttgcaaaatggtttcttggacctctccatcctcacccaaagatatcaacaaattttctttttctccttgtccggcacaaatcttgaatcatcttatataaactcaagataatttgtactgctttctttacactattttttcacaactgcataaacatattcaagtgcatcaatagtttaaaaatgtaaacaaaaaaaggaatttgaaatatcttgtaatacaataaaccaccaacagttctaacaccaattcagatattactcacttcaaactcctgaattttaagaaatcaaaaaagggttccttctgccaatcaatggtatgaacatggcacagtgctcaacacattcaaaattcctttccttgccaa

SEQ ID NO: 243419 - DNA, 954 bp, Homo Sapiens
tacaaaaaagttggcacaagatggcggctctggcggcctaaagaaggcggccgcggctcagccgtgggctctaacgcggggctgggggccggagacagacttcgcccaggtgacgggtagtaggggcggcgccgcttggcctcgtggggtgtaagacccacttgctgttgcccccggaccttgccgccacaccagccctgtcctggggcggaaccgaaggaaggtcgggccctgctgccccgccccgtccttcctccttcccgggcggtcactgtgcgtggctcacttttagagtttacttcaaccacgtggagcttccatggcggcctctcaggtcctgggggagaagattaacatcctgtcgggagagactgtcaaagctggggacagggacccgctggggaacgactgtcccgagcaagataggctcccccagcgctcctggaggcagaagtgtgcctcctacgtgttggccctgaggccctggagcttcagtgcctcactcacaccggtggccctgggcagtgcccttgcctacagatcccacggtgtcctggatcccaggctcttggtgggttgtgccgtggctgtcctggctgtgcacggggccggtaatttggtcaacacttactatgacttttccaagggcattgaccacaaaaagagtgatgacaggacacttgtggaccgaatcttggagccgcaggatgtcgtccggttcggagtcttcctctacacgttgggctgcgtctgtgccgcttgcctctactacctgtcccctctgaaactggagcacttggctcttatctactttggaggcctgtctggctcctttctctacacaggaggaattggattcaagtacgtggctctgggagacctcatcatcctcatcacttttgggcccgctggctgtgatgttcgcctacgccatccaaggtgggggtccctggg

SEQ ID NO: 243420 - DNA, 735 bp, Homo Sapiens
ttccctggaatgagtgagggtgtgtgggggctggcctggtgattggaagtctatttacagcgtgtggggagaagagggcgctgggtcctgtccatcctgcaggaacagcccagctcagaccccataaatcagtgtgtgagtgacagagagacagcaggggtgttgactatccctcctcctaaggggaagaaggtgggcttctgtgtgcctgggctgtggaaggaacaggcacagatggaaaaacaaaaagaggggtgagggaggtaccagcaagggggaccctggaccccccccaccaaaaactgtctggggaacaggcagctgcccgtggttaaagcgcttagagggtgactcaggcaaaaggatgttggggagtaaccctggtgagggtttcagtcctgcctccttggaatggccccaacccccttctctggctctggcaaggggggcgggcaggatcctgtgtgcaccaaaggcagggagcccgggggcgcaaagtggggaccagggtggggatagggggacagaagtcgctactggaaacaccttgggacaatgactgcacacacaagcccctccccccatggacatacgcaccctacacctcctctccccagacatacacacatccccgcttacaagctgaggtgggagggcagaagaaagaagcaaaaagccagcatcacccaggatctttcctttagtctgaaacttagccaacttttttgtacaaag

SEQ ID NO: 243421 - DNA, 819 bp, Homo Sapiens
ttaagctcatcacgactattatgtatatggtatgttgtgcctgactcggggcatttgccatgaatgtaattctcttctcttggacagactggtcacttaagtcaaggcaagtacatgagttacggcgctaacagtctgtccaagagaaaagaatggtgaagacaaaggtgacaaattccacaacaaaaatatgtaattgataagatgaaaccacaccataatagcagatacttttcattcattaacccacagggtcaaagtagggttcattagtgaactataaaatatatgctcagatagctattttcttaatccctgcatgccaaaatagacctaaacattcaggaaaaaaagttacagaattacatagtaggggctatttgatagtgtgatttcagaggtagcattgaggataatgtggtgtattagcaaacaaagagaactttaggaatgccatggggtctcaagggttaggatgcccatgagtcctaaattgtctatccccttggcatgtgaaaccaagtggcaaaaaagagctgatgattcacctttaaagatggctcagtttctatgcttacctggcaacccaagggagggcatccctattaaggagacctcacactactagtcttatctccccaacaaaatgatgtgttctttgaagatgaccaatacatattccacagtataagaaacctgtaatccgaacataataaatattttgtagactagctatagtacagggggtctagataaagaaataaaagaaatagactaatttcgatccaacgaatccatttccaacttttttgtacaaag

SEQ ID NO: 243422 - DNA, 890 bp, Homo Sapiens
acattttttacattggtacgggttctctacaatatgtattctctgctgttgagtcattattaaagacatgcaagagacattgccacattcttgcattgaatggtttttctccagtatggcttatcttacatttatttagatttgcaaatttactaaaacctttcacacatttattgcattgaaagtttttgctatgagtagttgctgagcataggtcaagtccattataacttgccttctgccctttccactcacccacaatttcccagtcattccttaagcgtaatttctcaagacaacatctttcatatcttctcagcatcactttttggaatgaaacttgcaggccctgctctggcaaaatgtcttcagtaagataagaagacaaaactggaaaaaataaaaacaacaaattattccacttactagatagcatcctttacaaatctaaggcataaaattatacaagcatattagcaagatagcataatgaaataccacaggcccttattccttcatagtcataatcctaacaaaaatatactaagcaaaatgccattatgagaatcctaaaagcagccaaagggggaaaaaaagaaatgacgtacaatgaagctccagtacgcctcactgcagacttttcaccggaaaacttacaggccaggagagagtggtatgacatacttaaagtgctgaaagaaaaaaaacctttaccctagaatattatatccagcaaaaatatccttcaaacataaagagaaataaggatggccaaacaaaagctgaggtatttcatcaataccagacctgtcctacgagaaatgataaaaggagtacttcaatcagaaaagaacattaattaggcagatcacctgccaacttttttgtac

SEQ ID NO: 243423 - DNA, 927 bp, Homo Sapiens
tgccctggagcttatgcagacaaagctgcaggttagcatatgttatactatgtgctggtaccctgtgtttgagctcccggtggcttagagtggttggtgctcactgtggctgtgccggggccccactctcttagaaatgtgcctttctcagccctgtactggttcaattacgagctagtgaagagctggctgaatgggctcaggccaaaggaactccatggtcccatgacaaccataggagtcagctttgcagctggcagcatcaccatgatgctggctacagtgctgaccctaacctttgtcgtgatgaagactcaacaccaggccacactcggagtgatggaagccgtggaagtgacatccctggatgcggactctacctggttgctcagaggtggatctgtgccaagtcgggcatcagagggctctttgcaggcttcctcccttggatcatcaagtctatcccctcctatgctatcacgatcaccacttatgagttcagcaaaagtctcttaaagagactcaatcaggaccagcatctgggccattcaaaggggcaaggaggcaaggacccccatctctccaacagatggggaaagaggggaggagggactgaacccctcagccctgaggggaggatccttgtttccattcccgctgtgcaacagccccaggggtccaggggtaggctgcccctctgggcagcccaggccatcctcagacacagcttcctcctgctgcttccatcctggggatcatccatttcctaccctccaagttcaagaccaaatctgctatctgcccctcccctatgtttccctctgtgcttgctgtagctgggcctgccccaaggagtcaagatatcctgggacctggtctagtctccctgctcctttgttaattcccaacttttttgtacaaagttgg

SEQ ID NO: 243424 - DNA, 815 bp, Homo Sapiens
gttgtattatactccatcagaccccgtgcctcctccccacctacctccctacctttccccccatcccagcagacatgggcccgggctgcacagaggcctcaacagcgcacgcagcaccatgtgggctctgattccccaagatgaaaaagtgggtgcccctgtcctcaaggagctcacagtccagtgagggtcatgggcccaacacaaccaggggcaatacaacagtctaagtgttctgtgtggaaaggggctcagggagctcaggagcggggagcagttccctctggctggggatcagggaaagtgtcacagaagtgtcaccagatgctagactctgaggatgtctgggattgggcaggtggaggagaaaagtgcatgccagagggaacctaagagaaggataaagacttgcaagtgggcacatgcctggcctggccagggcatctgggggagcctgtgggatgggctggcaggcagaagaggctggaagagtcaccatgatgagtgggggccctgaacgctgtgctaaactttatcgaacagtcagtggtttttaagctgtacttctcagagcactggggcttctgggggagcctagaagctgggggcatgaagtggggactgaagagagggactctaggacccccaccgttgtcttagccagggaatctccgcttgtatttgttttatagattgaggtttttacatttgcttttatgtgataaaaagactctgggactacaaaataaagtctgaaaacccctgctacaggcactggggagccattgaatgttcaaagcagaagagtgatccaa

SEQ ID NO: 243425 - DNA, 1108 bp, Homo Sapiens
ttggcggtgggcctgccccacccgcgaggccctcgagtgcaggcatcgcgcgcgcagaggagcccctgaatcctgggcggctggaggtctccagacgcgcgccccacttgccccacgaacccggcaggaaatactcttaattctaaggaaaacctggaagcacaatgggagatgacagtgagtggttgaaactgccagttgatcagaaatgtgaacacaagctgtggaaagcaaggttaagtgggtatgaagaggccctgaagatcttccagaaaataaaggatgaaaagagcccagagtggtccaaatttttaggattgatcaaaaaatttgtcactgattccaatgcagtggttcaattgaaaggattagaagctgcacttgtttatgttgaaaatgcccatgtagcaggaaaaaccacaggagaagttgtgtcaggtgttgtaagtaaggtgttcaatcaacctaaagctaaagccaaggagctgggcatagagatctgtcttatgtacatagagattgagaaaggagaggctgttcaagaagagctcctgaaaggcttggacaataagaatcccaagatcatagtggcctgtatagagacactgaggaaagccttaagtgaatttggttccaaaatcatcttgcttaagccaattatcaaagtgttgccaaaactctttgagtctcgagagaaggctgttcgagatgaagccaaactaattgctgtggagatttacagatggattcgggatgctctgagacccccattacaaaatataaactctgttcagttgaaagaactagaagaagaatgggtcaaactgccaacaagtgctcctagacctactcgatttcttcgttcccaacaagaactagaagctaaattggaacaacaacagtctgctggtggagatgctgaaggaggtggtgatgatggtgatgaggtgccacaaatagatgcttatgagcttttagaagctgtagaaatcctttccaaacttcccaaagacttttatgacaaaattgaggcaaaaaaatggcaagagagaaagaggccctggagtctgtagaagtactaataaaaaaccccaaactggaagctggc

SEQ ID NO: 243426 - DNA, 1298 bp, Homo Sapiens
ttggctttcagctatttctagaaattagacacatcttcctaagcgaaggtttaccatgtttaaggttccatgaaagaatgtgccctaagttgttgcccagcccctggctgagaagaaacgggcgtgtgggaggcgggtgaagagcacacagggaggggacggagaagctcctgagccagcctccttcatggctcagtttcatttcagtgcgtggcacttcccagaagaaacgagtctcgttgtcactgtgatctgtacccaggtggggagagatggggtgtgggccatgcatgtaaattgacaacacccctccccgtgtagggtgccctcaggtggtcaggaacacttttggaagataaatctaaggaagagagtggtacttagcagctgtcattttcctttcaggctcctgtgacgtttgatgacatcactgtgtacttactccaggaggaatgggtgctgctgagccagcaacagaaggagctctgtggttccaacaagctggtggcaccactgggaccaactgttgccaatcctgagctgttctgcaagttcggacgagggccagagccatggcttggcagcgtccagggccagaggagccttctggagcatcacccaggaaaaaaacagatgggctacatgggagaaatggaggtgcaaggtcccaccagggagagtggacagtccctcccgcctcagaagaaagcctacctttcccacctcagtacaggcagtggacacatcgagggagactgggccggaagaaacaggaaacttctgaagccccggtccatccagaagtcgtggtttgtgcagtttccgtggctgatcatgaatgaggagcagacggctctgttctgctctgcttgccgagaatacccctccatcagggacaaacggtcaagactaatagaaggttatacaggaccattcaaggtggagactctcaaataccacgcgaagagcaaggcccacatgttctgtgtcaatgccttggcagcgagggaccccatctgggcagcccggttccggagcatcagagacccacctggagatgttctggccagcccggagccgctcttcactgcagattgccccatattctaccccccagggcctctgggaggatttgatagcatggctgagctcctgccaagttcaagagctgaactagaggaccctgggggggatggagcaattcctgcaatgtatctagactgcatttcagatttgaggcaaaaagaaatcactgatggcatccacagctcctcagacattaatattttatataatga

SEQ ID NO: 243427 - DNA, 1126 bp, Homo Sapiens
ttgggtttctgggccgggcttctcaggaccgggctggaacgtgcagctcctggccgggacactctgtgctttgcggggaagggaagtggcggagcccgaggatccgctgccgctcgggactgagcccgccacgcaggcgcctgtgccagcgtcgccattgttgcctgtggccttagggccgctccggctgcccgtcggccgggtcccagcgacagggtctcttatccatccctgcaagttctgggctcagaatttgtcactaaggctgctaactctaccttgattctgttctgccctcggctgcagcagcctttgatatagtgtccttgtgactctagcatgagacttcaagcagttggctcactactggagaaataaaggatattgccagattgactctcctgtctgtagcaatgttagcctcaagcaagaggatgaacagttcttcacgttctcaaatccttctaaggtggaagtcagacaaggctcagagtggaccctacaatgttgagaaggaaatccttacttcaagattcttgcgtgacactgagacctgtcgacagaattttaggaattttccatacccagacctggctggtcctcgaaaggcattgagtcaactccgagagctctgccttaagtggctgagacctgagattcactcaaaggaacaaattttggagctgctggtgctggagcaattcctgaccatcctgcctggtgaggttaggacttgggtaaagtcccagtatccagagagcagcgaggaagcagtgactctggtggaggatttgactcagattctagaagaggaagctcctcaaaactctaccctttcccaagataccccagaggaagaccccagaggaaaacatgctttccagacaggatggctaaatgacttggtgaccaaagaatcgatgacattcaaagatgtggctgtagacatcacccaggaggactgggagttaatgcgtcctgtgcagaaggaatatacaagactgtgacgttacagaactattggaacatggtttctctgggacttacagtgtacagacccaactgtgattcccatattggaagaaccatggatggtgataaaagaaattttagaaagccctagtcc

SEQ ID NO: 243428 - DNA, 1368 bp, Homo Sapiens
ttgggtttaatgttgaaaccttttgaaagtcaggtagaagggtatctttcttcccaaccaacccaaaatacaattagaaaattatcaagtgagaacttgaatgctaagaataatactaactcagcatgtttctgcagaaaggcattagagggtgtgccagttggtaaagctacaattttaaatacagaaaacttgtctagtacacctgctccgaagtatttgaaaatattgccttctggtcttaagtataatgcaagacatccttctaccaaggtaatgaagcaaatggatataggtgtgtattttggactacctcccaaaagaaaggaagagaaattgctaggggaaagtgcattagaagggataaacttaaatccagttccaagtcctaatcaaaagaggtcctcgcagtgcaagaggaaagcagaaaaatctttaagtgatttagaatttgatgcaagtactttacatgagagtcagctttctgtggaactttctagtgagaggtcacagcgtcaaaaaaagagatgtagaaagtcaaattcactgcaggaaggagcgtgtcagaagagatcagatcaccttattaatacagaatctgaagcagtcaatttaagtaaagtcaaagtcttcacaaaatcagctcatggtgggctgcaaaggggcaacaagaaaatcccagagtcatctaatgtaggaggatcaagaaaaaagacatgtccattctataagaaaatacctggaaccggctttacagttgatgcctttcagtatggcgtggttgaaggttgcacagcctattttctcacacattttcattctgatcattatgctggattgtctaaacacttcacatttccagtttattgtagtgagataactggcaatttgttgaagaacaagcttcatgtgcaagaacaatatattcacccattgccactggacactgaatgtattgtgaatggtgtcaaagttgttttgcttgatgccaatcactgtccaggtgctgtcatgatcctcttttatcttcctaatggtactgtcatattacacacgggagacttcagagcagatcccagcatggaacgttctcttcttgcggaccagaaagtccatatgctgtacttagataccacatattgtagcccagaatacacctttccatctcagcaagaggttatccggtttgccatcaacactgcctttgaggctgtaactctaaacccacatgctcttgttgtctgtggcacttactctattggaaaagagaaagtcttcctagccattgctgatgttttaagttcaaaagtgggcatgtcccaggaaaaatataaaactctacagtgcctcaatataccagaaataatt

SEQ ID NO: 243429 - DNA, 727 bp, Homo Sapiens
aggacagcgaggaggggctgcggccagtccttgcagggctgcgtgggagcgggtactgtgaggtgggggtgaccatgctgccctcaactcccatcaccagcacgccccatgccacagtccctgtgcacgcagaatgttccgggtgaggacgctgttggaggacactgcaccagccacacgaccaaccccacagctgggcggcgactccgagcgaccagggcacacaggcccacctgcctcagccagcagcacaggccaggattcatcattaaagaaacaggaaaacagagaggccggggagagcgaccaagctaggctgagctgaaggagggcacgggcctgtggggctgtgggcagcccccgggcaacagccccaggtgcgtcatctctgcagggatgaactatgtccacaagtgcacagtggccatctgacagcctcagagctttcagaaaggcagatctaagaggggtcaagtcaaccactagaaatgtaagcggaaacaggcctccatggttcatccagaaccactctttcatcccgggtgacatttattccaccccaggagaattctttaaaaggaacattccagcagaacggaaaacttcgctatgaaatcaccctgacttcagggcgggagggacgtcaacgggaatccacaccttctcggactttccaaagtcacccgctcccgagccggcaggatagagccaacttttttgtacaaag

SEQ ID NO: 243430 - DNA, 626 bp, Homo Sapiens
  misc_feature (514)..(561): n is a, c, g, or t
ttggattcctttagtgctgcgccgacagcggtcaggatctcggctttcttgcttcgagagggactaggtgcctccaccagagcttctgtcgctctgtaacctgcactgtgacctacactagtcgcgggagccacgcagaggacgccggaacaccctggaagccgagaaatggtgtgtgtgagggggctggcgtccgggcgactgggagaggggctggaatcggccggaaccggctgaggcgggacccgggcctccacgcggcgactccggggtcgtggacgcgagtcccctcggtcgcagggtggggctgggccggcagccgggaccccgggcctcctgtcccgtcccttcacggcgactgcggccccggctccggagcctaatctgggcagctccgcgtctccccacattatgcgggggccacgggagggatatggggggatcccgcctcggatatggggtttgttagaaacaagtgcccggtgccgcaaagaaaaccagcatctaggcagannnnnnnnnnnnnnnnnnnnnnnnnnnnnnnnnnnnnnnnnnnnnnnngccagtcacaagagcacagcgagcggggtagggcaggggtttttctccttaacgcagttcctagc

SEQ ID NO: 243431 - DNA, 854 bp, Homo Sapiens
tacaattcacagtaacatacactagctctaacctgcctggatacaattaagtctcctcaacacactatttatcgccaaacttacattctggcttttataatcattttgcaacacctggtacagtatacacctatagctttgccatagaaatgcccctaaatgcccttcagagagcagaggtgaatactttctcatgaagaaacgccaacttttctaagcgagttcgtttcagtagtgggagccattcccagtaggataactctaccacacggtagccaagccgagccagctgccgcctcttcatattgtgcagtccaaggagatccctggagccatagcaatactggttcctgtttgtgaactgaacagccagcttcattcttggggtctgcatgcaggctgcggggcacaggccagccatctccatggcccctgatttatctgctacattgcaaaggaagccccccagaggtacagctgccttattctccaactccatgggctgctgcccaggctctgactcagttttgccctggaaatgtcctcttgctttcccttttagtaacttattcatcaaatcatctgtaaggctgactcccacatgctcaagccttaatttggctacattttcagccggcgtggcttctctattaaatggtaatggcttcaggttaacatcaagctggacctctaagtcagaagatcgggtatgaggcaaaatcatatggtgcttgacgtactggggcccccccagcatggtctccagtaaaaagacagtttctaagaattcaggctttgaattcatatccttgtctgctaaatccaacttttttgtacaaagttgttttttaaag

SEQ ID NO: 243432 - DNA, 1556 bp, Homo Sapiens
cccccagaggtacagctgccttattttccaactccatgggctgctgcacaggctctgaattcagttttgccctggaaatgtcctcttgctttcccattttagtaacttattcatcaaatcatctgtaaggctgactcccacatgctcaagccttaattggctacattttcagccggcgtggcttctctattaaatggtaatggcttcaggttaacatcaagctggacctctaagtcagaagatcgggtatgaggcaaaatcatatggtgcttgacgtactggggcccccccagcatggtctccagtaaaaagacagtttctaagaattcaggctttgaattcatatccttctctgctaaataccacagcaattcagacccctcttgctgaaggtgagtactaagacgattgcctctgtaatctggacactcaatgccaactgtaccatcgagggtatatagttccttaaggaggtcaaacttagttctctcctgagctaacctgacaaaccctggactgagagcgaaatcaattaactctactggaaagtactccaaaaatgccaggcccagcaggcaggtgggcaggtgttctgggtactggttgaattcaggcatctttctgtgaatctcacttatcaggctggagtaaaattcttctgcattgggtggcttataattcagagttccaaatgaccacagaatcttggcaacatctttacttcgacagtgtgccactctaggaggcaaagacgcagccactgcattcattactccttcattcaggaagcgtaaggccgagcagtaaagagtcaggtgcatgacaccttgaactcccagggaaggaattcgctgaggagctatctctccaatctgcttcatgaaattgatgtgatccacgtgagtgaaacggaacattttaacaatattcactaaggagcgactactcagatgctgaatgttagcacaagccaagtctccaattttccgcatgacaaattcagagagattagtacttgatttaaagaaccccaaacagatggtaccaacctcctccaaattgatcaaatctatatatttaaggatcaatgattccaatttttgcattaggtcctgggatacctgacgattttcacctataacataaattaagtgaactagctgagacaaggatagatccttccagtgcaaattaagataactagaaaaaatgtttaaaaacctaggtactttgcggcctaagtacctccagagatcagccaccaaaaggagctgatccatattcatctcccatacctgatggcaacacttggtctcatacacatctagcattgaatgggagtgagggattcctaaaatgacaaaagctttcaaaacattgatcagatcttgggtatcaaagagctgtatcttcttcacactcagctggcagagcagagcaaagctggtactgcccagcaagacaggatgctgctctgcaggcaaagagctcagcttacacaaataatcaacaatgacttgagcctggagattattttgattaactctgacccaact

SEQ ID NO: 243433 - DNA, 925 bp, Homo Sapiens
ttggcttctgccttgtccctctgtcctgaacacacttctggccatgtctctttctggcttcaagcccctcccttagacaaggtctgagtggcttggcctggccctggctgtcttaccccttcacctctcaccagggcccaccctcttgtacaggtcccagggctgcacaggggatacccacctcaaaggcatgttgggagtctcacatgagatgctgttgatgagcacctaacagtgtgtctgacacgcaggaagagctcaggaaatgtttggcccctgccctgccttccctgtgcctgtcacacagtaggtatataccaggactagggtcactgactgaatcattaaattacttagaaccagccagaaaatgatgcagagaaatcaggcaaaggtggtgtggatcagattaagtgatctggggcccatctagggtgaagggtggcccctgcctgaccaggggtctgataagtggcaggatgttctatcccagctgtggtaccctgggcaagaccccctcttcccatagcctcctgatcagggtagtggctctgaacttggcattgaactgaactgaagaggaggaaaagacggatctcccagaactgtctgagaagcagcgaggtgcagtgggcagagtcctgggccagggcaggagtgaggcagggtaggctgtttcaccccattttacagaggaggaaacctgatgcttagagagctagcacccagcatcacatcacagtgctgcttcctgtttctcatgcatgtggcctgagcaaggtgcctccctcctggtgcccttgtttcttcctccgtgaaatcagggtgaaaattcttccttgcttgccatcctcctgaggttctgatgagatgccagtgggcacagaagagctttgtaaactgtgagcagtgctagataattgta

SEQ ID NO: 243434 - DNA, 162 bp, Homo Sapiens
tcagttgaggttcccatcatgattgactcatttggcgggaaaaccaaatttacatgccaattggaacaaagaagtgtgggtatgggggaacagcggggggaaagaaatggtgggagaggattccttggttttaggagatcataaaccaacttttttgtacaa

SEQ ID NO: 243435 - DNA, 508 bp, Homo Sapiens
agaacacattcacaggagcccttcctccctagcattaaaactaaattatggatattaagccattattccatgaggctaatttgtttttaactttctgtgatatttagacgacacagaatcaaatgatctggaatcctaattgtgctggattagagttgaacacactttcatggtcagaaccgtgatacttctactgggtttatctccacaaaaagattcataacaaaggccaattgctgttcttcaaacccctagtcagccgtatcccaaaggacccgggcagatggtaaaggggactgcagagaagtcacctggcggatgggagggcattggctagtgttccagcttcacttctgagtccaacgggctctgtaaccttggaccgggcaccttttctctctgggtcccagtttcttttcttcattcataaaatgggtagaactagattattctttaaatcccacatttaacagtttaaaagcaactggggcatgttgcggtggcttat

SEQ ID NO: 243436 - DNA, 788 bp, Homo Sapiens
aattttctctgcatgcttcttggaatatataggtgttgtaatggtctcctccagcctttccaggaacaaacattcctcatttggtgtctgctaaaaagataaaaccacaagagagtaggacaatcagtgagtagtttcacatgggggtccccatttactagctgtgtgacattgggcaaaatactaaagctctccatgcctcagtctccttttcaggaaaattggggtcatggtggaacttatttcacagggtagtcataaggacttagaacagcaccgggcactaaagagctgtcaatatgcatttgctattattgtaaacttcctttccatttaaaatccattgtaaagtaattaagatgctactgataagagcacttctaagagtcctcaggactctagaatctcccactggggacattctgctcgactgtaagtaccttgagggcagggctgaatctttcatctctgtagtggcctggcacacaggcctgaccatggaaaaacattccaaataggtaaaaaccagactgtgatgtagtgggttgttgttgttgctgttgttttaacttgaaggctagacttaaagaataaacaaaaagctgctaaaatgccttttatcctggtgattttcactaacgtcaggattttacctgagtattgttatgaagatatgcttgtgcaaaatttatcctaagcatgaaacatatcctagaatgtagattttttaaaatgaaaatagctttattttttgctgacttataaaaagccaacttttttgtacaaag

SEQ ID NO: 243437 - DNA, 958 bp, Homo Sapiens
ttggcagcatgggagtctcaaggtaatcagacttgttacatgagagaccagaaggccatgtggatgagtacttcagtgaggacacatgaaagtgatgccttcttggactttccatcccagcccagccatcaactgaatgtagatgagtgaatgatcccaaatgatgccagatgacatccagtgcagcagaagagctgcctaatctagcttttacccaattcctggccagggaattgtgagacatataaatccttattgtctgaaaataaataaataaataaaagtaggtttatttgagtgcagatctgtatctgttctgctctgtcctggttttctgtgttaacaatgtcctatttttaaattcctgtactccaatcttgtagctggagctctctgctatctactgtaagcattgcctgctgccatgtttccttactgtgtttttccgtgattgctgggataccacctgcttatctgacctctacaatgctaaagacctgcttgcctggatcactgcttattgtctggtactgtaagctctggatactattttctaactgcctgtctctattgcctctcatcatcattagcgagtttccctcttctcccctaattttccctatcacagccctatcagcccttgagttttagtttgtcaatgtgaaacttggcaaaacttctgaaattatttgggatgatttaaaatcttcttgatgttagttgttataagtccattatgccttgtctggactcttgtagtagtctttttaagtgcagtttgctatagttttgccctttataatctcctttacactgtagccagagtgatctgacattcatatctgatcagaattcttttgttatctctccatctctctataaaataaaatgaaggagttttccaaggggattaaagttatttgggaaatatcagtttttaagattatattattttgtg

SEQ ID NO: 243438 - DNA, 654 bp, Homo Sapiens
tcctatcactcattttgataaaatataaaatgtatcaattaaacacaattaggatatacaatgactacattatcatcaactaaaagatactaccatttatttaactaattacctatcattaaacatctagaagctgttatccaggttctcagttttataaataatgatggccaaatgaccattatggtcaactcttataatttttgacccagaaatgtcaactccgcctttttatgaagtatttgatacgcactgccaaattatctccagaaagacagtaccaggttagaaccacaccatgctgtaaattgataaagccatgttggagacaacttgacaatatagatagaacaattgatcacctagagtgaccttatttaaagaaatatttaaaatagtaaaaatttggaaacaatctaaatattcgttaatccaggaattcatatatttgtcacacagcaataaattcatacatttgtcacacagcaagaaaaatatatgagctagatctatacataacaacatagatctctgaaaaacagaatgtcataacattgagtgaaaaaatcttggtaaaagcatacatacagaatggaatcatttatgtaaaattttttcaaaacggaaataaaaatccaacttttttgtacaaag

SEQ ID NO: 243439 - DNA, 306 bp, Homo Sapiens
caggagccccaaaccccaaacccttcctgtgtggtctaagtacacaactgtcagacacctctgggtcccaaccacttgcccttgtgaaacaggaaactggctcccccaggggctctcccaggggccagccgtcctgggggaggggaggggcgggcactccactctccctggggctgagaccacccggcccaccccttctcccctctcccctgctgtacacaggcagctctggccctgcctggggcccctcccgccactctcctggccccctccttggcctcagctcaggggccctggttgtgccaa

SEQ ID NO: 243440 - DNA, 329 bp, Homo Sapiens
caagtcacccaaattttttacagcttggtttggaaggcaatgtagtatattaaaattatgggccctggagtcagaaagatccaggtttgaacacagagtccgtcatttattagctttatgaatttgagcaatttcgtctcacttgtaaatatagggaatagctcctacctctcaggtatgttgcaaaaaactatataaaagcacttagcatagtggccatgacagagtaagcactcagtaaatcatgccatttatctcatctataaggcatgaaagtagaattttacaagttgtacagaaatagaaggcttgccaacttttttgtacaa

SEQ ID NO: 243441 - DNA, 196 bp, Homo Sapiens
ggcactgggtgggcccttctctatttcaagctcagtggtctggatgtgggcagaaagaggagtctggatctgggttaaagctacaagaactccctccccagggttaacaccaatattttctgtaacactcccctgccggtattgaagagaacagaaagaagggcaaaggaaagaaaataaacaatttatttttctt

SEQ ID NO: 243442 - DNA, 169 bp, Homo Sapiens
tgtgacatggcaaatttatttaaactacctgagcctcggtttcataatctcaaagtaagaatattagtaatacctacttcactgaattgttctgaggatgtagtaaattaataaacataaatcagtgccagacacatagtgaacacaaagccaacttttttgtacaaag

SEQ ID NO: 243443 - DNA, 281 bp, Homo Sapiens
agataaattctaacgggcacagccaaagtaacaaaaatgtacatttacatacaactgatccaaacaggaagtaaaagcattatgaaaaaagaacatgatgcaaatcatttccccctgacaaaaggagggatctgcgtgaattacagcaaatcaaatgatttccacattataaaagcaagccatggcttctacagatattttaattccttgggaggaagtttcacctcatcttttttccccatgtaaagtaacaatcacccaacttttttgtacaaagttgg

SEQ ID NO: 243444 - DNA, 1451 bp, Homo Sapiens
  misc_feature (1201)..(1223): n is a, c, g, or t
ttgatctgaagaggttaaattctccctcagccagctttttaggaatgaccttactgtgcactaggtcaccagccacagagaaacatcagttcctccctggcatatgtcaggaaatggctgcaggagtgattgcctctgagggggaaaagggagctgtacaaccaatcgcctaaaactaccaacaccacatggaatcaggggatgtcacaaaagccagctttaatcaagcttgattgtggaaaacataaaaacatacgcagctgcagcacaatatcttattaatcgtcaccagtgttccaagaggtaggtgttaattgtctcttgtgcttctctgggtatgtctggtagccggttttgctgttaacttgaacacggattagatgtgaggaagaacaaaaggatcaggaggatttctaggcaacacaatctcttataaaatggcatggctattgggggaagaagataatgctttgcagaattctaattttgaccctcttctgaaaaaggaatccaattttaataatcattgcccgatgaaatggtcacccttgcagtgctgcaggctgtacacgtgcctgaatttgattagacggcatcccgagaaagggttcatctgcttttgtctctgggtgattacgtctgtgcaagtgtctgtcaagtctgaattattctgcctcacattatatttctgcccagcaacatagtgctgcatgttgtgacaatgaccttaccttccaaacacctttcaaacaaaatgtctggttcaccccggctcattataactagatatgccaactgttatccttcaatctgaaaagagagaaatagttcagatgtccaaaaggaaggatatgaatagatgttacagaagccagagaatggagaaaatacacaggatcaagtaacaatatcaaagagaaaaatatgacttcgaggccacagccttctcttttttgttctttaccttccagtccttccttatttctttaaccccctcctcccaaactcttaatgatgtcaagatttctgtttcttccctctcaaacctacatataggaaagaatgtaagatgaaaaatgggatcagatggccgagacttaagtccaggctgcttccctaatcagcttgggactctgcaaaagtcaggatcctgctccaggtctctgaaggttagatgatatttcagactcttctggccacnnnnnnnnnnnnnnnnnnnnnnngccagcaaccatcactcctacttcaagccattttagtatatgtggtctaggagggacctggaaagccaccaaggtccaagatgctgctttcccctccaactctctttcactctttcatgccactctcaggacatctgtgtttcccttgatgctccattctcctttcactgccaacttgtcagtttctcagagaagagccaccttggttcaggtaccaatccatgccaa

SEQ ID NO: 243445 - DNA, 285 bp, Homo Sapiens
ctttgtacaaaaaagttggctctgagcattccctccgtccctgggaacgtttcctttcttttgttccctaagggctagagaggacattaactttataaaactggagtggaagtgggcacaaaagaacagtcagaggacttcagacctctcctcatctcttaagctagtgacaccaccattcaccagataaggggtcggttaatggctttctttcctaccctactcccaggtgcagtcgtccattaacccttgtggatttaaatttagaaagatttctggagtgca

SEQ ID NO: 243446 - DNA, 578 bp, Homo Sapiens
gcataattctccagtgaggggtgaggaggtgggagtttcaatccaccaactcctcccctcattgatggaaaggggctcctcaggatgttagcttccctggctagaaaccctgccaggtagaaggacatagaaagtcaaagatgtggacaggaggccctgcagatggcatctgaagtggcctcggccatatgggtggggcaccgggagagtcagcttatgttctttacccagcaacagatcacataacaagaaagttattactttgtcaattcattgtccatcgtaaatccctcaaagagaaatgctcaaattgaggatacttcaccttgaatactcccctaacgtttaccatgcccaatctttctcttctacgtacaaagaggctcagacaatagcacctagttagaatttatttacattagtttgtgcatattttattttgatacttatctatttatggcaagcatactggttttttgtttaccatagtaatataaactttccattaaatataaatatgaaagaaaaaatacattgttttacagaaaattatgaagcctttttcaggtcaaagccaa

SEQ ID NO: 243447 - DNA, 899 bp, Homo Sapiens
cctaatgactgctagctgtctgtcttgccaatagtgttagaaatgaacaaagatgtagacctcaaactttgggttatcaatcctggggacagtaatctgctcagaatttagggctctgaggttggtctgcgtctgtccaattataatgtcaatctgagggagaagaactagaacacaaggaggaagagtaagcaccaagctggagacagattcaggcagtcagaaacagtggtgtgctctgaccttgagtgatattttagattactgcttcactcttcctttccttgaatgtgaagagacactgtaattgtgtagcataaattttcaagtctccatttaggctatagggaaaagtgtaagaattccaattagattttacgtttatcttcaccctttttagttccctgctgtgagtcaagggaattatatatgagcactagttaattgtctaggggttagagatatctattattaagcaccaatgagtccagaagtacaacctatttcagaatccatactctattctaattttcctttgggtcagggaagagcaaagcaatggcatgaatttaaattcttgttccacaagagaaaacaatgtccaagaaccaaactgtttttcaaaaataatcagctctccagttggctgggttccattatggatttactcttaatgcagaagctgcagaggtaaaaagtgttaaacacttcttagaacagaggccgcagattactctgtagtctattgagccacaagagaagtgcatgcatatgcatctttttttattactagagagcattctatgggaaggatctggtggcacttcctaaattccctacagtctgcaactctgagatttcctttttttacagttttacacttgtagacgaaaagccaa

SEQ ID NO: 243448 - DNA, 759 bp, Homo Sapiens
aaagcaaaatatagaaattcaaagtttcatttcagcagccaccaggaattatgttttttatacatactttcataaacgttatctattgtgtagttatatcaacttttttcaaatccaaagaacgaggacataactcatacaaatttattttaaataagccttaaaatcagaattaaattgataaatgaagtaatctattgaaaaatgttattttacatccattctgggtattaccacaaattttaaaagtagaagcatagcatttgccagttattttaaaaaaccgagtcaatacaaattagtctcaaagttcttgaaaattaataagtgatttttctcactacttaaccatacctggaataacctttgaagaaacactactagcaaactttagacaacaattataaaaccagattgttggcagaggacacaacaaaatgtaagttagaaaattcataaacatacatttattcaggaaatacaattactagaatccttgatatttcaatgatcattccacattataaaatattcacaaacatgtagttttttaagtctacaccaggtcatgctgacattctttttggataagccataaccatttcttctattaaatgctataatatccattttaattgtaaacaaagtacttgagccagactacttaagtacttgagcaaaataacttaaaaaaatcttaagaggaggaggacaatgatattttttaaaaacatatttgaggctgggcatggtggctca

SEQ ID NO: 243449 - DNA, 777 bp, Homo Sapiens
atggctagtccaaaatgacatgcacttattgtaggtaacctctgtctgtttcacagctaattgtgcaacgaagaacaaggatttggtagagttggtagaataatcgggaagcctgggcaccaccccagataaaggacatctagggtggagtcctggcattcctatgcttgatcttcacagactggtcactctgatgcagatggttctcacactggcttttgggaactgctggtctggaaaggcagatgaggacgcaaaccctaaaaacaaagtatgaggaatggcaataaatgagagctcctaggattttctgacttcttagatgggcagatcttggaatggaattgaagcccagaaggtgggaaatctacatacgggtcacaagaaagccttgtgtggctgtcaaggtctcacaaagagccaccacttgaatcagttatcttcctgccaacagcctgacacatccagatgcctcatcttatcaaaccctgacaattagtgggtgctaattcatgctgactaagccctaggaggttcaagtctctaacacagcatagcaactgttaattttcactgagaatcaataacaaccaaggtagccaaacacttgtattcttcccacgggtagatcacacagaaagccaaattgtcatcagaaagttactggtagagatggaatcagagcggagaggagttaattgcatgattcaaatgtttaggggcatcaggctgtgatagctgggtgcctcctctacaagtgccaacttttttgtacaa

SEQ ID NO: 243450 - DNA, 858 bp, Homo Sapiens
gcataggacccatttactagctataatgtatacattctcaagcaagttacttaacctctgtgcctctctgtaccctcatctgtaaaataagactgctaatggtactggccttataggatttgttgtggagataagaagacttaaaatacaatttaaaaatcttagggaagtaaatgcgtgacacaaaccagacattgtaaggattaaataagataataaatgtacaccacttagaatggtgccaagtatatagtaattatacaatatatgtacattatattgctataattcattaaaaggaagtcacttattgacttccaattttaacatggtaaaaacatttccatacccccaaacataaaggtaaacaagaaacagaaacacattcaataacccacaaagacatttataaccctaagctaaaatgcatgaggatggaaaacatttgaaagaaaggtaaatgactcagcagaatgggaaaaggtcaagttaaaatgcctgcagaggaaactgttcatgtgagcaagctaaatcacccccagagaaccccaaaaggctccaaattatagaagcacctgtaatcaccaaaggcagaggactggggagggcaagataaagaatgcaaacaggggaaatgtctgaaacggatttaaggagttttattccccaagtcctcacactcgtaacacttaggattaataatttcctgggagaagaaccagatttggggtcactgggtatagagagaagcaaggatgaggtaagaacggaaaatgcagaataatatataagtctacacacgcgctgttggtttcagaaagcagagagccaggctaatgttccccaagaagtccccaa

SEQ ID NO: 243451 - DNA, 568 bp, Homo Sapiens
ctgatttccaatgtacaattaaactcttggctattaggagcatctatacatcccccaactcagagtaaccactttagctattcttagccagtgaagccaaagaacacagaagactgcgctcctgttctagttcttttatgtaccttgttttaagtcttccttgttccccgctccctctcaccataaggacgtggctctgctgacttttctctttaaaactctctatcctaccctgctccattcacctcttttatactaattaaagcctcctcttccttctgatctcaacttaagagacactgtcttgaggcacctttccttagccttccaaatctggctctttcataaaaccatcctacagatcatcgttctttttcatcagcatggttgtctcaatttgatgactgatgtgatgatgtgaccggtgcatgtcttcagtgaactgtcggaaagcagagctcgtgtgcactggagagtgtattcctgtgagtgtattcctgttcccttccaggtgcgtgtggatgacccagcagccaggccaacttttttgtacaaagttggccattat

SEQ ID NO: 243452 - DNA, 487 bp, Homo Sapiens
ttggattatagcccaaggcaggacaaaggacgtggaatagtgggagaattaactgggaaagaacttgttctgtaaggatttacgaagaaggaggcagattgccaagaagcagttcctatttttcagtgacatgagaggttttatttccatcagtgttttttcaaaatttaaggacctttccttccgcagccagagggtggagcgacacgtggggatctacccggttccctccatgggctgggccacctcatccctcacgctcccttggcccccgacagagaaccgcagagccgtgctaggctctctctgtctgccctcttcatggctggcaccttccggtggctgcttgcatggctggtgtgccttcggggatgctgttgatgtgcttgtagtttctttggaagaaatagggacacccccacccattgccttctttggactgattaattcagccacatctgatcccaagcagaggatagttctaatc

SEQ ID NO: 243453 - DNA, 825 bp, Homo Sapiens
ttttaaatgaaagtggatgcgggtcagatgagaatgaaagaaacacatttaatctgagtgctcttgccagtgcagtgcggtgcctgacgctaagcacttcaatctccactgtcaccactcatggacctaacaggccactcctctttagagattaggaagtgagagtgggaagccagcacccaaagcaaacacaaggcaaacgggcacacgtgaccccttgtgccagcagcagcagacctcaggagggaggaaggagccaggtctctgcactgctccggctgcccgagctcccttacatcccaccacaaactctggaagactgctctgtgcaggaaagcagaactgggggccagcttgcttgcctgtaagccccaccatgtcttccaaaaaatcaccagcacctcatcttcctgcaactccagcgatcggccagaggaaggctatgtgcccctggaggctgtgggcagtgccaacagtattaacacacacggagggagaaggaccttctgcctcagtccagaagccgagtgtgagcacacgctcaggaacaggctcatagggcctagccagagctgaccttggcaggtacttttgctcccttcttggtaagtaaaatgggattattcaggggctcagacccaccacttcaccagcttaagtgctaccagtactaacagcttcacgtatttaaatcataccccaggcccctccccaacacacaaaaaagaaatgtaaaattacagagaagcattaaaatgtcatctacctggaaagaataacagaaacctagaagttcagaaacaggtctcatttcatattccccaa

SEQ ID NO: 243454 - DNA, 895 bp, Homo Sapiens
ttggccacactcactttcagccagcccagcccatgtttgtgtaacaggcggtgggggtgtgggcagcagccacggagtgggtgattctggctgaccccctcgagctgatgtggcctggccccactgccgggctcttccctgctgccctggacccatcctgttggcttcatgtgccagccttgccccaggggagatggaggcaccctcctttcagacatctgctctgggccacagatccttctgtctgtggctccccaccttcccacaaatgcaaagctgtggggaagacccctggggcacgctggggcgctcactgcagtggggagcttgaccctggggagtggcttttcacagtggcccttggcatgggactctaggctctcatgcctgtggtctcagtgtcatctcgccttaggagcagcacagggtgggtcgggagaggggtgtggaaaggtgtccagccactgccccaggcattgtgacactaggaatggactcacacaggacttcctgcctccttgcagacactggggcaggaggaaaggggaaggcatctgaggcaggagtagaggggctgctgggctccttacgggaggttaaaggaggaaaagctgtgacctgttgagatggtgagggtcgaggtgggagccctgaggagggaagcttgggaacaggcaatgtgtaacgtggtctattgctacacttgggcctggggaaaaagtgacagaatgaaaagttgagccactggcctggcagtagcactgatcagagctccagcttaacaggcagggtggagggggatggccctatggaagagcagtgtgttgccctcatttcccttatctgtaaatggggaatcgtactccctttgttgctggtggttgcgagggataaa

SEQ ID NO: 243455 - DNA, 564 bp, Homo Sapiens
tacaaatattctcagatatataggttttcagacgtttactaaacatagaactttttttcaacatttttggaggctacattaacaaaaattataatggggtgaggagatacctatatgaatatgtggagtaaagtttataagaaattttgtaaggcttaggatgtcaaaaaattttttaaaaataagaaaagaacatttgtatactataaaaatcttaaaactccagttgtaggtagaagatcaacacataaaactctgttgtgtttctacacaccagcaatctgaacagtgaatataaaaggtaaattaagaaaacaattccaaaataatgaaataactaggaataaatttcaccaaagaagcaaaatacttatatacaaaaattgatgaaacattgctgaaagacattaaggaagacacaagtaagtagaaagacatcccatgttcatggataagatgacttgatactgttaagatatcaatactacccaaagcaatctaaagattcattaaaatccaacttttttgtacaaagccctttttatgaaaaagcattgctcatca

SEQ ID NO: 243456 - DNA, 491 bp, Homo Sapiens
ggggcttgagggggtggtgggcgccgagcaaggcactgtataaataaatgcaaaggccaagagctcgggggaaatgttagtgtacacctctgatcagaaatgtggcaagatccacacgaaaaagtgccaagtttttttcccaagcccctcagccaaagcagggagcagggtagagctcctctgaggctgagggagcatcgccccgaaggaccccactttccttcacatttcactggctttggaacagtccccagggctcagctgaaaagggggtagttctttgggaacgagattcatttagtgcaattttctcttagtgcagagccagccctgggattggtgttatgcttttctggggtcactggtctgttcccctaggagccagccagtgacagcgagaccctctccaggcagctgggctcagaggaaaaagccagacactgactcctgtccaagtccctgacctgatacactgccaacttttttgtaca

SEQ ID NO: 243457 - DNA, 972 bp, Homo Sapiens
  misc_feature (864)..(873): n is a, c, g, or t
actaagacttttgatcttagaatcactgtatttagttccacaagaactaaaggccatatactctaaagaacaagtccaatgttcagatattctatattatcatgtttaagatccaatgatccaaggttagtgaaatgcctcatatacaaagagcaatagtatttaaaaagtatataatgtgaaatagcaagcaatacccttgaattctaaatgaagattttagacatcttgcattgtgtacaatatcaagcctgggcattaaaatgtttagagaaccattacatttacagaacccaattatgatagacctgtgttatgaaacagatgcttcaccccacaacttaggaatgctgctactttttacttaagagctcaaagttaaaatggtatcacaaattaagttaatctgtgattacaaaaattaagcttaactttcttcaaaccagttatcctggttaaggggagttacctctgataaggtacagctttcaatggcctaaaattaacgcagcattttagtataagagggaaatattttaatttggacatctgcactaactagatagaagtggaagatctcattaaactttgaaaacaatataatcagtttatataaactcaaaatcactaagacacttatatattcatagggggccccaggttcaggtttcactttatagtacagatgtaaacaaaagaaggagctcaaaatgccaaataaagcaagactaaataataaagctgcatcaatggtctctggaaagctcttttctatgatgtgtttgaacttggagaaagcatcaaactttaatataagctttgcatgttgctaatgcgtttttggaagccataaatcaggcaggnnnnnnnnnnctaacaaaaactaagtgatacaacgtgaaaatggcaaaatatacactccaaacattttttattgcaagaaacaaaaagcacacaacagcctgtacccaa

SEQ ID NO: 243458 - DNA, 942 bp, Homo Sapiens
ttgggtcacaaacaacgccacgttgactaactttgtacatacatcattttgtatttttcagttacatctaactagggaaatagtccttgaaatgggattactggatcaaagacttagaggtttttcagactattccaaatagtgtgaattcagactccaaacctcatgagggtcagccagtggctatatgaattctcactaatgagaattccttccactagaatctccttccactagtgttaagcaagtcagaaagtttccttactgtctgcctccacagtaatttttttctctggtacaccctcctcctgcgcgtatagccctttgatgggctctggctttatttgaggtctgatcaggtctgtcctgctgtgcgcttgggcctcctcccagtcagcactgattgttgctgtggagtagccagcacctgcaccctgatctggtattctactttgatgagggtttccctcactatcttgcaagttcaattttagagggtggtgatgtttttttctaacttttattaatgttataccaatgtaacatccaacaacatgaactttaatatcctctaatacccagtttatgttaaatttcacccaactgtctcagaagtgtcttttatacataataggtttgttcaaatcaggatccaggcaagggccacccacttggttgaaatgtctcaagttccacaaccctatcccacactgccactattatgtcgtttgttgaaggtcatttgtcctatagaatatactattctggattttggctggttgcttcctctttcccccatactttcacttatttatcatatttgggtgttgtcaacctgacccatccatttacaagctccttattgactttttcacctagtgattttatccagcagtgaccatacctggatctttatttcattaaggggtttctaaatgggga

SEQ ID NO: 243459 - DNA, 977 bp, Homo Sapiens
ctttgtacaaaaaagttgggttttcatattatgtttgtaactgtatagctatgattcagtttcctaaatgaaaaaagaaactgttttaatgtacagactatttagatttgaaaagactgtgagagctttttcttttatagcaagacaagtcaagaatagaaggcacactgcgagagggatgtcttttgaaagaaaagaaacactactttttatattctcaaatcactgaagaaagctttagacataatttcaaacactagctcctgtttaattcagatgcacagaatgcattaaaaccacgagtgtagtggacgtgatttatacattctcttagcacaaatcagtacctatcttcactgtaattagacttttcttcctttctccttctcaaaagctacttttgaaaccttatgttttccctggacatattttctgtacttcataaaatagctcagttctgcaactaactgcaaatatttgcaaaagggaacaaatgtaaaataaacgtcccctaatgcagtgtttggtgaagaaacatatgtctgacattagttggttaacctgaaaaatagtaagaaacaactctacttaggggaaagggggtagaattgagcccgtactgtgcaaatcaagagaaagctataatttacgcaatttttattaaagagaatacaagtgctgtaggcttggggtggtgctaggtcatatttaagcctaattgagctttttctatatcattagaaaaaatgggccaagtttcctatattatagggtaaatacaacattttcttcctgcaaatattaaataccactggctttttaagacgtaaacatccaaatctcaaatgtctttattcatgccaatgcaatacaataaaaatattccccatatacacttaaatcactgcaagtaagccttaaaatccccacaagtattattacttactatatctcagaaactttcacacacattattt

SEQ ID NO: 243460 - DNA, 762 bp, Homo Sapiens
  misc_feature (418)..(498): n is a, c, g, or t
ttggccaggcgtgagtcaccgcgtcctgcctgctcttcctgtttctttcccaagggtcacactcagtagggagatgaaggtggaaacatccttgctgtggctttctggcctcagagcaggttttagaggaaggggccacaggctgcctagtgcatcctggctgtgggcagcccctttcctggagccctcctgcctaccccgtacctcccatctggctgcacagctccatccttagccacgcaaggggagaacatgggcagagtctccatccagcagctgggggttctggtggcactccctgtgcccctgctgctgctgggctgtgggtctgccctgcacccaggagccccacggtccatcccccacaccatgcccagcaccagggaggttgggcagacaagacctgggccatgccagnnnnnnnnnnnnnnnnnnnnnnnnnnnnnnnnnnnnnnnnnnnnnnnnnnnnnnnnnnnnnnnnnnnnnnnnnnnnnnnnngcatggaggagcactctgtcccaccaaggacaactagaaaccaaagccatctgacagccagtgcggtaagggcgggggatgtgtgtgtgaggtgtgcacaccccccgagaacctggccctggactggcctcacaggacaggaggcagccccttgtagagctagggctcagccccatcagtctcaaaggtaaagccaccaatcaccaccgaggcacccctcatgccctggtggcactgtccactattactaaacagaccccaccc

SEQ ID NO: 243461 - DNA, 424 bp, Homo Sapiens
ttggcttagaaaatttccttggctttagttttatatcatatttagaaaataataatgaaaagcatccccaaaatttcaatgatgtgaatttttaaattacctttatttctttaaactaattccattgattgttacttaaattttccacctggaatcatggatttaaaatttccccacctcatggggaaaaaactaacccagaagttcaaagcctttaaagtttcatctgattctggccttagaattgtccttaaaagctttctcctggccgataggaggaagcatatatcaaggaggttctttcccttcccattatcattttgtggcaagccttaagttaacaatgtgtctaccaagaacaattgagttttctaaaagtaataatgaagattatgcaattctaactgtagaagagatagctatt

SEQ ID NO: 243462 - DNA, 1298 bp, Homo Sapiens
  misc_feature (1076)..(1086): n is a, c, g, or t
actttgtacaaaaaagttggctaaaattatgccgtgtctatgtacagttagttatattagcagccctctgagatggcgtatctatcggaaggatttcaaacaccaattgctttacctgaacaaatggtgcttaccctttgaacagcagagtgaccacgtagaaggaaggaaaagggcaaaatcgcttcagttaaactgaaattaaatgaacaataaggcaactatataagtaacttctagtagcattgcctgagagacaaattattgtttgataattttcattgtgaataggaatccaatagatcatattgcttactttgttctttttatactatagaataatattttgttctctagtatatcaaaataccaaaatattatctcatattttctccctctttctcttactcttaccaagttttcctggtggcttggcttccctgactaaagaattaagtctcatttttactttccatttctattttcttaccacttggttggctccctttgtctctgtacctttaccaacattaggatctcacctctttcttcctcccttaattcataagcaccactcctatcaaagtcccatctcttaaccctgggtatcaaacaaactgtgagttttccagaatctgtttcccagttttcccctcagctttcctggtctcccatctgaactgcttctttgtgcacctcttgttctttctcttggctcccagtcttgattcctgtgatcactcttgcatcactaattgcacaagtgatttcaggtgcaattctgattagcctgcgtccacacagtgatcgatgatcctatgtgcctagaaaggacactgtgtgctgctcatgacctgcaacaggaaaaaagccatttcttgttagcagtgtaagaaccttagagcaaaggagttgaccttctgattgaatataagcacaaccatattaaatgaatcaatacaagaaaattatttctgatactatgtatgtacatatttcttctctaaaatgtatcattcttttctaatgtatatgatctaacaaaaatgaaacatgaaatgcagtagcaaccactnnnnnnnnnnnttcaaggacatctaactttttctctcacttttgccctttgtttatccttccctgtgattagataaacaaaataaaaaacaaaatgctgtatttctcttcttacgccagtcagaaccaatccgaaaagaatgtgtgttgactcagtttggagtatttcaggaagacagatattgaccttttatttgataatattcttattatcctggaatgcc

SEQ ID NO: 243463 - DNA, 1119 bp, Homo Sapiens
  misc_feature (141)..(154): n is a, c, g, or t
  misc_feature (837)..(846): n is a, c, g, or t
cgaagcactgtgtttagatcaagatgtctggtaaagcaaatgcttccaagaaaaacgctcaacagttaaaaagaaatccaaagagaaaaaaggataatgaggaagttgtgttgtcagagaataaggttagaaacacagtgnnnnnnnnnnnnnntcatctgaaagatctgtcttctgaaggacaaacaaagcacactaacctaaaacacggaaagacagcagccagcaagagaaaaacctggcaacctctgtcaaagagtaccagagaccatttgcaaactatgatggaatcagtaataatgacaattttgagtaacagtattaaagaaaaagaagaaatacaataccatctcaacttcctgaagaaaagattgctacaacagtgtgaaactctgaaagtccctcccaaaaagatggaagatttaactaatgtatcaagtctactgaatatggaaagggcacgagacaaagctaatgaagaaggtctggcattactacaggaagaaatagataaaatggtagagaccacagagttaatgactgggaatattcagagcctaaagaacaaaattcagattctggcaagtgaggtggaagaagaagaggagagagtaaaacagatgcatcaaataaatagtagtggagtactctctcttccggaactttctcagaaaactctcaaagcacccacacttcagaaagaaattttggcgctaattccaaaccagaatgctcttctaaaggacttggatattcttcataattcatcacagatgaagagcatgtcaaccttcattgaagaagcctataagaaactggatgcatcttaaagagtgnnnnnnnnnnagattgttccatattaatttaatgttcgtgaatttgtaaaactgttaacctatgattatatgtacagaggctaagcttctgcaggatttattatctcctgatatgcactttaaaattagtctttgtagttctatcattagcatctaatgtagttctgaagactgtttttagcagttgccaaatctagggaaactaacatttatattgctgtatctataagtatttgcctaaaaccataaaataaggaattgccttaaagatctaatagtttat

SEQ ID NO: 243464 - DNA, 935 bp, Homo Sapiens
actttgtacaaaaaagttggcattagcaaaggcagaggagccaagagcaggcaaagaggaatctggagtttcagtctccaactctcagcccaccaatgaaagccactctatcaaagccatcctgaaaaatatctcagtcctggctttctctgtctgcttcatcttcactatcaccattgggtttccagccgtgactgttgaggtcaagtccagcatcgcaggcagcagcacctgggaacgttacttcattcctgtgtcctgtttcttgactttcaatatctttgactggttgggccggagcctcacagctgtattcatgtggcctgggaaggacagccgctggctgccaagcctggtgctggcccggctggtgtttgtgccactgctgctgctgtgcaacattaagccccgccgctacctgactgtggtcttcgagcacgatgcctggttcatcttcttcatggctgcctttgccttctccaacggctacctcgccagcctctgcatgtgcttcgggcccaagaaagtgaagccagctgaggcagagaccgcaggagccatcatggccttcttcctgtgtctgggtctggcactgggggctgttttctccttcctgttccgggcaattgtgtgacaaaggatggacagaaggactgcctgcctccctccctgtctgcctcctgccccttccttctgccaggggtgatcctgagtggtctggcggttttttcttctaactgacttctgctttccacggcgtgtgctgggcccggatctccaggccctggggagggagcctctggacggacagtggggacattgtgggtttggggctcaagtcaagggacggggtgtagcctcggcatttgcttgagtttctccactcttggctctgactgatccctggctttgtgcaagcagttggaggctcttgg

SEQ ID NO: 243465 - DNA, 1480 bp, Homo Sapiens
aggacggggaggaggaggccgctccagggccgcggcaggcgcacgacagcctctaccgcgtccacatgcccagcctgtacagctgtggcagcagctacggcagtgagaccagcatcccggccgcggcccacaccgtcagcaacgccccggtcactgagtacatgagccagaacgctaatttccagaacccccgctgtgagaacaccccactcattgggcgcgagtccccgccgccctcatacacctccagcatgagagccaaatacctcgccacgagccagcctcgccctgactccagcggcagccactagaccgcgcccggcagccacccaccccacgtgccaacttcccctccccgtgccagcactgccgcttccacctgggccacccaccggaccctcgcacgccgtgccaggcctgccccagacgcgtctgcaggccgcttgccctcctgtcccctccccgcaggggcacagtggagacgcaggggctctgggcccgtaccgccaactcgggtcacacctgaacgctgctgccagccgatgccccagccctgcacgccacccactatcccggcacgctccctctgcagatggtcgccgcacctacaagccctggccgcacccaacctgtgttgttgccgcccggcccttccctccacagctctccttcctcccgcccggcacttctgtggaccccttcttagttcacaggcacggctggggccgctctgtgctggcgcctgctggccactgagggacagggacacgtgccacctgctcatctctgccctgaggtcaccccgtggtccctccacgtgcccatctctctgcagtgccctcctcgcctgtgcagcccgcccacccacaggctcacccctcctgccggctgccagaggccccctccagcagggcctctctccgttgccccagcttcactctctccctcagcacctgccctgctggaggccccagccctccgtggacagcaggggccacgtggagcccgggccgctcacccgccacccagtgctggccgccttcttggtgccaaacccccttcccccacccagagactgggcagctgtgtctggttcgttctttgcactaaccacatttgtcatctctagggcaggctggggctgcgggctgagggggaccgctggcaccccccttccctcccttcttggttccatttccatccatgacaggtacagcatcccaggagcccggcctgaggggctggacccgagctggctgtgaacatccctcagcccctgctgtccccccttgggactaaccactaacctcacccccaaactccacgggtgcccctagctggcccagagccggcagtgtgagcccaagtccgggctggagccgacccggagcagctgtctgggagtcaaggctgcagtagcgtttcttcatggggtgctccagggggtgccacagaccgacaggcagcccaagggcctgga

SEQ ID NO: 243466 - DNA, 1236 bp, Homo Sapiens
aaaataccagtgtcgcttttcacagaattagaaaaaacaaccataagattcatatggaaccaaaacaaagcccaagtaaccaaagcaatcttaagcaaaaagatcacagctggaagcatcactttatttgccttcaaataatattacaacgctctagtaagcaaaataacatgatagtgatataaaaatagtatacagattaatataaaagaatagtgaatccagaaataaagccacatatttacagccaactgatttttgacaaaaccaacaacacatacagtgggggaaagaagacccgctttaataaatggcttaaaaattgaatatctattgcagaaaaatgaaactgaatccttatctctcaccacatacaaaaaccatctcaagatggattaaaacttacatgtaagacccaatactttaaaaatgttagaaggaaacctagagtaaactcttctggacattgatctaggcaccaaattaatgattaagaactcaaaagcacaggcaacagaagaaaaaatagacaaatgggacttaattaaactaaaaagcttcttcgcagcaaaggaaacaatcaacatagagaagagacaacctgttatatgggagaaaatattttcaaactatcaatccaacagaggactaatatccagaatatacaaggaactcaaacaataaaatcaaataatcccatgtgggacaaaagacatgaacagacatttttcaaaagagacatacaaatggccaacaggtatatgaaaaaatgctcatcattaatcatcagggaaatgcaaatcaaaaccacaatgatatttcattttaccccagctagaatggccattattaaaaagacaaaaaagagcagatgttggtgaggatatggagaaaagagaactcatactgttgctcggaatggatattagtacagcctttacggaaaacagtatggtttttcaaagaactaaaagaactatcattcaatccagcaataccactgctaggtatctactgaaaggaaaaaaatcaatatatcaaaaacatacctgctcctgcatgcccatcacaccactattcatagcaaaggggaatcaacctaagtgtctatcaacagataaatgagcaagaaaatgtggtgtatatacacaatggaatcctattcaaccataaaaaagaatacaatcatgtattttgcagccatacagatgaaactgaaggtcattatctttgcta

SEQ ID NO: 243467 - DNA, 738 bp, Homo Sapiens
aaaaagttggatacctgttaaatgaggcttctttcctttctcattcatagccagcgtggaaaaatcatcaggtagtttgcccagatttgccagagccctaaataaaatggcaaaacgatctccctgcctgcttctcctccccacccccacttacatgcacaccgtaaatcaagaaatgctttttgggcaattagactttatcttctaaatttttgcatagaatggctaaacatgatcttttgcctcactttgtaattcctacaccttccttgtaagcttcaccttttgcttacctaatattttatttaaacatggttttttaaaaaacctgaagctttaaaatcatagtcataattaattttaccctaaaggacagaagaaattatacaacacataaaagaagccactacttcacatagcaagcaaattgaaatcaaaatgacagaagaatgagaaattctttaaaagcttcaggttttttttgttgttgttgttaaattcctgcatgatgcatcatgtgcgagggaaacttaatatacttttacacccttaacctttataaagtgactagcttttcgcttaacataagaatttttaacctggagcccacactacttgaaaaatacacacaaaatgtggggttatgtgtgcatgtacataagtcccatttttttctagggagaagatcactatttattaaatttgtggagggatttgggtgatcccctctctcccctc

SEQ ID NO: 243468 - DNA, 828 bp, Homo Sapiens
taaagctgaaatagtttatcagaggcttgtctagtcttttgactatttattcttacacacattcattcaaagcttacagcaaattaaggaatggcatatacataacagaaagcacaaaggttaaagatctaacaaaggaggaaaaaactatgaaaagtaattgtggattccacatcttacgtggaaaatgttctggaaacaattaagtttggaaaaatgttgggtgaaacaaaattaaacaggtttgtttacctctggacttagtccatttagactacagttctaaatggaatataaaaatgcagcctttcacaaacttatctgacaagagaatcttttgttaggggatctcttgcagaaacagtgttttgcaaaaactacagagaaaactgacttgaaatacagataattaccgaaaagtaaactgcaatcctatggttccttacgtttttagtaacgataatataaataatatataaaagaaggctaaaagcaagtttagtaatatttgtaatgttatagaacgttaaagcacgagttatgaacacaaatacatataattatataatatatatgaccacacatttttaaaaacatgcaaaatctaatttttagaagttacaaagaaagacttccaattctttaactcttgagttcaatgcacatggctactttcccacaagcttcagacctcaagttactaattctggtagcacagtgcccatcacatagcagcacttaataactattaagtatcagtaaaaacacacacacatacacccaacttttttgtacaaagttgctctatttatagaaaaagcattgctc

SEQ ID NO: 243469 - DNA, 467 bp, Homo Sapiens
  misc_feature (138)..(146): n is a, c, g, or t
ctttgtacaaaaaagttggctgaggatcacccccaaaaaaagagatccacataccattctcaatcccactgaaattgctggcattctcaaaggcagggcagagggggatctggggtagaggagggttctgtctaatcnnnnnnnnngtgttgtgtatctgcacttgcagcctcagctttcacacttcagcccttaagttcactaagaaggtctgaatttctgctgcagatagtggtgttaactgctccaactcttgtcttgcttaatttctacaaatatttttgcttcttgtcctttgaagggttaagaagcaaaaacaatccagaatttgttctgtgtttttagggcaatcccaaccctgctggacacccacatgttaaatcaggagatcagagatgctggtcatcagtcccaacaagatggcctagagatcgcattctcacctcgccttgctgctgcgttaattc

SEQ ID NO: 243470 - DNA, 819 bp, Homo Sapiens
ctcctgttacatgccttttagacatttggttgctctaaccaaggtgggtagcaaaagagaaaggagacagaactctatcagtcattgtatttatttaccagcatttatggcaaatggccagacctgggcagggtggtagcaatgatagattttacaaattaaggcattgttctttatttcaaaattttcatttacctatattttccttggtcttagaaatatgaataatttagagctggcaatactcaccatcaggatataataaacggaggtttctttgtctgaaatccataaaatgtagtaatactctattgtacttttaaaaatcctatttttgcagttggcttcctctcagtgaattagttaggtagttttggtacatttggagggtcataaacatgtcatagaaagagtactggcattatgaaaacctggatgttagggacttcacaatttggtcattttgcagctgtacaaccttagaaatgtaagttctctgaatttcggtttcctctgctgtaaaatagagataggaatatccatctgatatatttcacaggtactactgtgagtattaaatgatattgtgtgtttgtgcactggaatgtgtaatataataaagttgttgattaatgctttaaaaatgtagcttgccctgtatattttttaaaaatcaaaatagaaatcattgggaaatgtaaatgtttatgaatcttacagctcaaatgcaaataatttacaaatgctttataataaaatcaaagatattcatggatttttttaagtaggaaaatctttgcccaacttttttgtacaaag

SEQ ID NO: 243471 - DNA, 533 bp, Homo Sapiens
ccacccagatgttgtatcaagaatgactgtggttgccattagggaaagaaagacacataatgctcagaaacggtcaaagacattttaaatttgcaaaataggctgatatatgcctcaaccatttcatcattacctggaaagtagctgagaagcaatgattccgttcgggagatagtctcattcaatgaccaaactacaatacaaagatttgtgggtcagaagaagtgggtgaagtagatttagaaattcttgagttcattccaactctcaacaactctcaatgcttatgcatggtagagaacatagaggttcatagaatgctttgactatcaacccatttttgaatgctttttgtgacaataggtcaatcacttttggactgtattaaatccgtagttttcacgtggcagactaaactgctagattattgacaacaatccaagagtcagtaaatccataaggctcatcaagaggggtattgaccagagatataagattgaagggctgcccagtgccaacttttttgtacaaag

SEQ ID NO: 243472 - DNA, 717 bp, Homo Sapiens
tattacttcatcaaattcttaaaaacagtaatacagtacattcattgagatatatatggaaaatgtgagccatctcttcttgtttaaagggaaattacaaaccaaaagtcaatcgcctcccaagacgtggtcctcccagcaatgccgcacccaatgccacaagtatgcctgtccaccagaactgggggctcttaccaaaacctgcccatctcctcatcttgctcctacagtctgtgcagaaacaagtggctcctaacttttgtgcatataattaaactcccagccactatgaacacaaatacagaggagagattgtcagtttgtaagttccctttaagcggcttttatatttttgtatttatttttaatgcatggcctgttaaacatacttgggtgccaaggtgaatgagaacactgaaaaagaagggctttgagaaccgctagtccttgctaccgtgcagtttctttgttagaagagattttaaaactgtccaacctgtctcatttgctggtttcaaataagctacctcacctttgatttcccactgcaacttggtttcaacttacacttcagtactctagttgttagtaccatacaattgccaagaggctttttgttaaaggctacttctgatatcaggttccagctaagctactcagtaaaatggctcaaaccccagcctctctattttagtcttcaggggtactcttacccaa

SEQ ID NO: 243473 - DNA, 933 bp, Homo Sapiens
ttggctatcgtcccccttctcactgacctgaccgcccaccacctccttccccctcatcacatgacaaaggataatgtgcaagaaaagtatttttatgtatcataaatgtattttgaaacaaatgagaagaagaaaggtagaagggtttattttattaaatgagcctgacttagtgacagtgtgtgagcatttgcaatgtaagggcctcagcttccttggagaagccaccccaggtttccagacatagatgttgaattgtttgtggggggtgtgccaggccacgtctcgtgtgtccgtatgcaggcatgcctgtgtatactgtgtatgggcacactgtgggactagctgggacaattcctagagattcaactgcccaattctaaccaacattggcagcggctgaacttggcatttccttgctaactgccagatgtggccaacctttgtccatatgcaaaccactgaaaaatgatctggatttctatagcaaggcccttggggagggcactctcccatgcccttggcctcgctggccacattggccaatgagccagggctggagtctgagacctttggttgttctttaaggcacctcctgccactttctccctcagaggcacaaacactttgtgttccacgtcagtttgaggggacggtggggggatgatatgaatgtcacaggaggagacaccttctgtctttgtttcaaagaaagtgatgtgccatttgttaatatacaagagaaatattgaaaatatattgaaaagagcaattttaaattatttttggcttatgttgcaatatttattttcttgtattagaaaagattcctttgtagagaaaaaatgtatttttcattaacgcaaagacctatttctcctttttgtacattgtccatgtgcgcaaccccttaacgagcaatagaatgtatgg

SEQ ID NO: 243474 - DNA, 1228 bp, Homo Sapiens
ttgtattttaaatttaatatcataaacaatttttaaaggtaaatataatatagaagttctcagaatgaaacaaaaggaaggctaaacttcattttagactcatggtaacaccaaagcaattttaagaatgtgaataggaagctaaacactgcaaagagaattcttaaaaatcagattagttaagaaattttgaagagaactaaactcttcacagcaaacttgaaaagaatattgattaatcaaaagcctgtgaatcctgggacatacgtttactgatatctatggtgaatagagtccaggagcagttgcataataagtacatgtaaggcctaagtttaagaattgcaattaggagtattttacatttaatttataatcttagtagaggaaaagttctgatgtgattttaaaaacagaatcccttctcgccttacttacttggtactttaaccattacaaatttattcaggaaaactaaaattatttaaagaagagacatctagttctagagtaatctggcacattcatatgtgaaaaaaattagaaatcacttgatacatctacaatacacaaatagacgtataaacattgtattttaataatactctttgtcacttcaatttaaatcattccattatgaaaatttcttaattgaagggagactatttcttcaaaactctaaattaaacagagctttatcaattaagtttacagcaatatagcctttagaaatacatatttcttcattttataataatacttcccctttaaaaatttgccatggtttgtcacagatttaaaatacaaggcacctaatgctataaaagaataatacagtaaatgtagtgtaagtgaaccagatattttctcaaatacttattctttttaaagtcccatgaaatttgcacaaacatgcttgttgcataaattaaacattttttgtgtggttaatttgcaatattatacaaaacccaaaaatataatccacacttattacaggtagcttattttagcattttacctgtcagaaatactggtctatgaacacttaagtgatttcttgaaaacattttcataatatattccagcatttaacatgtgaaaataaagtcccagaacattaggatttattccttgattagttcaaatgatttcaacagctgaattccttgagatgtgtaaggcaggttggtcctttggatggatttttaggactgaaacttcccca

SEQ ID NO: 243475 - DNA, 831 bp, Homo Sapiens
ttgggttctgtgtcctacatagagcagcaactttatctgcggtgggctccaagctagatttccgacagcattattctgagagctggctaccattacccttcttgctattggaaactcagcacatttgaacttgggtttgattcagtattaacagatcttgactacactaattctttatattatagaaccaacggaaatatgggcactattttgaattctagagatggtttttgttaaatctactaataaactgttctcttagtagattaagagagagtaatattaattgtgcatgtgcagttgtatttctcattaactgacagtatgcccatttgtttttatggctttcttatctaaactgcactgatgaactagattaaagccttgggagatttatactataaattcagtgatggcaagaaccaacactgtttttttgtgagaattgtcagtgtaactattacctaccagtattgttcagagagattgaaacagaataaacgggctgttcttgaagaagcaaaaccagaatatgcattactttggtttaatacttagtgctaacattgaaactgttggtggtgatggattttgtagcttgctgcttgtttcaccactggtcaaattttaaccattaaattgccattcacttttagaatcttgtatttaagttttgattttcaaatgttctgcttcatgtgtctgtgaagaattgtactttaagtgtgtgtcctctgaggtgcttgagaaagtgtacactgcagaactgcccattctcattactgtgtcctatttaaatcatgcctgtgtgtttttcttaactatgaattc

SEQ ID NO: 243476 - DNA, 592 bp, Homo Sapiens
ttggatttctttttaaaacctactatttcgtctgaccacagccaaaataaagcaagtaatacagttttgttttgaatctatgtaacagtctcatgaacacaattaggagtcaaattctctacttttctgaagaaaaatatttcaaaatatttcagccagttaaggcttttagttacacagaatgctgctcaggcagaaatggactctcattcacatctgaggaagtagtccttgcctcgaaaaatgttgaggacggtaagtgtgaaaatagaaaaaaaacatacatagtgtgacaacctttaagttaaaagggatatatattaagaagctcagtatgactacttcaagcaccagctaaaaattaagcggaaattctcactatgagaaagctatacaatagatgaggcaacaatagctgattacttactgattaaggctaggctgtttaaaatcttttaccaggggaacaaggactaaaccctaggagaattgtaactgcacccataatcaaacttgatggtgttggtataaaatctagtcagattaagaaattaaaacactctagagacattaatcacctgaacagattaag

SEQ ID NO: 243477 - DNA, 1214 bp, Homo Sapiens
tgggctttttggaatgagtcttcctggtcccgacagttctcctgcatgtccttgtggtggccagtctctgttctttgatgacgaatttgctttctgagtagagtctggtcacctggagctggtttggtggaataaaggacaatggggttctaggatgtagctgggagatacaagctgtgagtactctaataatgagataagttttcttatgcaggccccagttggtcctgaagtccttcctcaaagaggcgatcctgaaacctacaccaagtgacgtgagcatcaggagaatgcgcgtgcagcagcctcccagggtgagtatgtgatgggctggcattcgtttggaagcttagatactgggctggtcattaaaaccttggcttaccttacccgtttggggctcgatgggtgctaaagcagttctgtttgtactttctcgaaaaatggaaggctgtcaatttaaattaaatttatattggtccaaaaaaggccgggtctaaaggatttccattcctcagaggcagacagcaagggggaccctttctccccttccttctcttcaagtgcttgcttcccagcccactggacatgcgtgtcctttgtgtcgcctgctccctggaggaataaggtcccaagcaccagcagtgcacaggccagtccttggcgggtggcctcagcacagtgacctgcccggcaggaggtctcagcaccttaatcacaggacttccctgcggtgtctctctagcgggtcagacactgcccttgggtctgtcccaaggaaccctgtccttcccccagatctggaggccccgggggcaaggcacggggagcgcctagtcctccgggatgggagtgttgcagttcccgtggtagatcttgacgtggccctcacacctgaaataggcctcgaagacgtcactgtagccatggtccctccaccaggtgcacagctgccggttccaggtacagtccagcacatggaagagcttggggtgctccatgccgatcatggtgaagaagtcctggtccccgaggtggccgcggaagtggtacttgtcggccagctgctgcacctgcgccggctccagcaggcggctgtagagcggggactggcgcatggcctccaggttcagcaacatcaccccgctgttgaagcccggcagcccctcggggggcgggcccccaacccgggtctgggggttctcatggcccaa

SEQ ID NO: 243478 - DNA, 1624 bp, Homo Sapiens
  misc_feature (156)..(214): n is a, c, g, or t
  misc_feature (476)..(518): n is a, c, g, or t
  misc_feature (520)..(552): n is a, c, g, or t
ttgggtgcaaatttcttctttccatccagcaacaaatcgacaactcagccagcacttaagttggggtaaaaattaattaaaagaagaatgtatcaagcagagataaaagaacaaaaaagctattgcagctgtcctctccatgacagaggcctgtgnnnnnnnnnnnnnnnnnnnnnnnnnnnnnnnnnnnnnnnnnnnnnnnnnnnnnnnnnnncactatctcttatttgtagatacaaatttttcatatttaaaagctattttaaatataatctttaaaaggagaagcattcttttttttaattgcacaaaatactgaaggtgagatccactgattgcaatgcaatgggacagtatctctggaagcaattttatccagaaaaataaatagctttaaaacaattcacaaccttggacctaataacctctacttctaggaagctagcctatgaaggtttctgctgaaggatgtttannnnnnnnnnnnnnnnnnnnnnnnnnnnnnnnnnnnnnnnnnntnnnnnnnnnnnnnnnnnnnnnnnnnnnnnnnnngttattaagtctcacatgctgtcttggagccatcttagtgttgagggattcaagagactggagagaccaatgggtgagacaggaggattttattaaagtgaccacttgcccagtggattttcatccaaaaggctgagcccggaaaaaagacggggcctggtttttaagcatgcagctgtgcagaacttacagggcgggcttagcaagcttacagaagcagaacaaaggcagttaatcaaacagtgacaagtgtatgactcaaacatgtctgatgacctctgctgggccacccagcaggctctcagcagatggtaactattttaggcttgctcaggcatgtcttgtgaccttctcagggtcacacagatggaaaacaggaacttaaaaaatccttataaacttacagagatagttacaaaaatagttatgagagcagaacaaagagatattggcctgggaaagaatctcaaagggggaagctgataagaacttgtttttctcatccctgttcctggaatccattccttctgggctcttcctggccttgtatataaagttatcttaatcctagcacggccttggagtgagtcagcctggaacaggcaggaacttaggtttttctctttttaatttctgctttagtaggccagggttctgattttcactgctgagaaagtaaagtgtgttcaggctgcccatggttctgggcacccccgggtctctgaggagggctgtcccctccatcacagagaatatcaggacactagcttgttctagttatacttacacactcctctcatgttgtctatggagtggtggatgctgcagggagggtgacatcctagttagtcctaagagccagactgcctgaagctcactataacaagtcctgccttggggaagaaggaagtgtgtctctgtgaacctcccacctgggccgaaagggaggccactctctctgctgcctctccccaaccttggccttctgtgctcctagtgaacctctcaccccctgcctacagcctcgaatctcagaccatgatgacctctggtcaccctgaatcagagcttt

SEQ ID NO: 243479 - DNA, 1217 bp, Homo Sapiens
actttgttagtgaaattttcattggaagaaagtagttgatcacttttggctttgattaagaggtctttttcataagtaacttttgcaaaacatcttgtttctcctttagctgcttgatttctgaatcggtttgttcgtgttcttttctttctagctctgaggtggcagcaatcgaatcagacaatctgtggttattttcctggagagttctaattgttgcatctttttcctgtagtgattttcttagctcttctaactcttgctgaagcaattcagaagattcactcaatacttcagacttacttgctctaagacactctgcagactggggagtaagcaatgatgcagaagacagctggggtgaaataatatcaagttttcctaaaagaagatccttggtattgcaaagctgcccaatgctgtgctgaacttgtgctaattcctgcccaaaatttttgagtttggtttcattctgctcataactttggatcaggccagtatagtccacttgtaatttagaattattatcactgtcaaccaaaacctgtgcttgaagttggtgaagctcttcctgaagctgggctgactcgtgttgcatattttgtactgtggtcatcacctgctgcttccactcttccattttctttacttgctgttttaacttgtcacgttcctgtagaagctcctcaaattgattactattaacacctccagcctcattaccagtgctggatgtttgtaaaactgccaataaagtctgacatttctgacttagtgcatctatttcgatgtctttttctcgaatgatacgtgataaattctgaatagtttctctaaacatatcttggccactactttcaaatctagtggacaattttttattttcatcttgcagtttgataagagctgcttccttggcagcaacaatatccatcattttgtgatattctgtttttagatggctattttccctagtcttctcattcaaaacagcaaataccttttctctttccatagcataagcctgcagttgctgttgaaggtaaacaacatcttgagtatgggaagttgaagaaattctagcatgaagagcttgtatctccaaatctttctgctgaataatctgagttagtttaccaacttcatctttggacaactgatcaatctgtttagttaaagatatattcttttcatttagaagtttaatctccagccaa

SEQ ID NO: 243480 - DNA, 1053 bp, Homo Sapiens
ggagttgtccctgtttcctgtcggagtggggccccttcatgataacggggaaactggcctttgccttctgttacctcctctgtccctgtcccccaatcctgggagcatgtgtgagttctgtcttcattctaccacagtctcccctctgcctccctccggagcactccctgccaatgacccactctctaaaatgatcccccctctccttgctactgcacatctcagatgggtccaggaggacagcagtctgatggaattagctcacactaaaaaatgaaagaggtgctttcctctttatctctccttgaggagtctgtcttttcaaaagagctttttgggtcactcaatgatctcctccctcttatccacttctttgaaagggcccttttccccaaggtttctgcaaactcacttttcagtctgtggagtctcctcaatgcagcctctggggagggtggttccatcaaagggaggaggtgggagaatcttcccaggggtgacaactgaagtatctaaccagtgtggaatgagcaccagtgaactgctggctctgggactccacagccttggatcggccaggcagtaaccagatcgtaggagtcctgggggaagtgccaggcggtggggggcacctggagtcacttgggggagtagatatttaccaacgagtacagaagggtttctgcattttatcaactggtgtggcaacactggtcccactgggtgtcagtccaggctccgctgttctgctgggaacgactgctggaccatttgtttcctctgttagaaaaagtggcctagggtggagccggggaatgaaatggcttctgagcagagccagctctgtggagtcctggtgaacaggatctcaggcgctcgacccactgcatgaccttgaagggccaaggtgcctcgaatcatcctttctcttgcccctccttgcagttatttttgtccagcctgacagtccttggctgttccagcagtctgggctctgtgagccggatgcaaaccaggcagcacagacgtctggtgctgaatcccaagagccaa

SEQ ID NO: 243481 - DNA, 1628 bp, Homo Sapiens
ttggatttccttaccagacttgtctcaagaagagcctcagctgaagaccccagcgctggcaaatgaggaagcactgcagaagatttgcgctctcgaaaatgaacttgctgctctcagagctcagattgccaaaattgtgacccagcaggagcagcaaaatctcactgcaggtgacttagattctaccacatttggtaccataccaccacaccctccacctcccccaccgcccctgcctccccctgcactggggctccaccaaagtacatctgctgttgatctgattaaagaacgaagagagaaaagagccaatgctggaaagactttggttaagaacaatccaaagaaacctgaaatgccaaatatgctagagatccttaaagagatgaacagtgtaaaacttcggtcagtgaagaggtcagagcaagatgtgaagcccaagccagtggatgctactgaccctgctgccctcatagcagaggctctgaaaaagaaatttgcttatcggtatcgaagtgatagccaagatgaagttgaaaaaggaattccaaagtctgaatcagaggccacctcagagagagtgttgtttgggccacacatgctgaagccaacaggaaaaatgaaggctttaattgaaaatgtatcagactcctaatagacaatgagctgcgaaaagactcctggttcccctgttgatttgtgagggccaagtttgctagtagaaatcgacactgtttagtaaatacctctttagtattcagtggtcttcttttcaggctaattagtggattaagcaataatgaaagcactaagtttggttttgcttttgtgagatggtcagctttggtgctctccacaacatgtgtgttctgacatgtttctaatatgtggccagggcgttcagaattccagttttgaaaacaattgtatagatttcacaacacaaaaaggacatttgtggatgttactgcacattttaaattcttaacactaatttatctgtataagtgttttatatgcatatttttggacataaacagtttatgtaaaattaataatgaatgatggcaacgagggcactgttatcttcgtttgttttcaatgatcatttagcattcaatgatggaacagctggtataacataagttgttggcatgaaatatttgagattggaaacttcttgccttgaacagaacttatatcttagattctctctcacattttcttggagctggggtttgaataggaaccagatgatgttcactgctgaaattccataatgcttcccattgaagggaaattgagaaccaggaaagctgctttcacgtcattgccatccagtactgacagggaagaaagatgtaattttccagtattgatgaatcaaattattgaattaaatttcttcttaagaagtaaaaactcagaatgtaccatcttgtttcctttcagtttattaaatggcatcatagacatgactttgctaagttaatagagttaaacatttttttatataagccaaatattaacttaatgaaacattgacttggcaaatgaatttcctataaattatcattggtcagaatgctgatttgttaataatattacgcaacataaaccataagtgt

SEQ ID NO: 243482 - DNA, 707 bp, Homo Sapiens
ttgggtttaaacaaaacagcagttctctgctgcaatattcccattgaccacttaaatgaccataagtggtcatttaagaacatgttagggttagccctgatctgaatataaaagtgagaaaagggctacagtgcatttcttgttagcttaaactgagtcttgaagttataatgatccattcgagttctgtgatccttattgttcttaattgtgtttctctacgtattgttacagatgagccatacgtttctttgtatcaatgtagacatgacttcagatacctctgaggacctacccagcagtctaggaccctgggccaagtgctgggactatggtactaaatccagtagatgggctgtgtagcaactctcccagggaacacactagggtacttagggaggtgctttgtggagcatgttgaagctttgagatctgagcaggaggcagtgatgtccctggtctattcagggaaagatttcagtgtgaaatggtaaacatccaattgacaggatttagattttgcttagtttttctgctttttaatgtttctatcccccatctcagtgttttctttatccatcccagtgatgccttatttgaaactgggcttaaactgcaaaaagaatgaagttggatttaggaagctgttagatcattgagtggtgttgagagtgaagtttcactagcagggaagtttccttgagcct

SEQ ID NO: 243483 - DNA, 583 bp, Homo Sapiens
cagcccaggaggcgccttggcgcggtgcccaggctgcgggcaaggggtgcaggcgggttgtccagggggctgcgtggaggaggaggatggggggtcgccagccgagggctgcgcggaagctgagggctgtctcaggagggaggggcaggagtgcggggtctacacccctaactgcgccccaggactgcagtgccatccgcccaaggacgacgaggcgcctttgcgggcgctgctgctcggccgaggccgctgccttccggcccgcgcgcctgctgttgcagaggagaatcctaaggagagtaaaccccaagcaggcactgcccgcccacaggatgtgaaccgcagagaccaacagaggaatccaggcacctctaccacgccctcccagcccaattctgcgggtgtccaagacactgagatgggcccatgccgtagacatctggactcagtgctgcagcaactccagactgaggtctaccgaggggctcaacactctacgtgcccaatgtgaccatccaggcttctaccggaagcggcagtgccgctcctcccagggggcagcgccgaggtccctgctggtgtg

SEQ ID NO: 243484 - DNA, 866 bp, Homo Sapiens
ttggctatcagccgctcactccgtctcaatatgtctcaagatggcggccaatgtgggatcgatgtttcaatattggaagcgctttgatttacagcagctgcagagagaactcgatgccaccgcaacggtattggcgaaccggcaggatgaaagtgagcagtccagaaagcggcttatcgaacagagccgggagttcaagaagaacactccagaggatttgcgcaagcaggtagcgccgctgctgaagagtttccaaggagagattgatgcactgagtaaaagaagcaaggaagctgaagcagctttcttgaatgtctacaaaagattgattgacgtcccagatcccgtaccagctttggatctcggacagcaactccagctcaaagtgcagcgcctgcacgatattgaaacagagaaccagaaacttagggaaactctggaagaatacaacaaggaatttgctgaagtgaaaaatcaagaggttacgataaaagcacttaaagagaaaatccgagaatatgaacagacactgaagaaccaagccgaaaccatagctcttgagaaggaacagaagttacagaatgactttgcagaaaaggagagaaagctgcagtagacacagatgtccaccacctcaaagctggaggaagctgagcataaggttcagagcctacaaacagccctggaaaaaactcgaacagaattatttgacctgaaaaccaaatacgatgaagaaactactgcaaaggccgacgagattgaaatgatcatgacggaccttgaaagggcaaaccagagggcagaggtggctcagagagaggcggagaccttaagggaacagctctcatcggccaatcactccctcc

SEQ ID NO: 243485 - DNA, 958 bp, Homo Sapiens
actttgtacaaaaaagttgggtctgcccctggagaacccagaagaacacagctgtgcgcgcccacaggctctgggggcgggagaagataagtcgcaaggagggggcgggacctacacctcaggaaagccggagaattggggcacgaagcggggctttgatgacccgcaaagggcgaggcatgcaggaggtggaggaattaagtgaaacagggaaggttgttaaacagcaccgtgtgggcgaggccttaagggtcgtggtccttgtctgggcggggtctttgggcgtcgacgaggcctggttctgggtaggcggggctactacggggcggtgcctgctgtggaaatgcctgcccgcgcgcttctgcccaggcgcatggggcatcgtactctagcctccactcctgccctgtgggcctccatcccgtgccctcgctctgagctgcgcctggacctggttctgccttctggacaatctttccggtggagggagcaaagtcctgcacactggagtggtgtactagcggatcaagtatggacactgactcagactgaggagcagctccactgcactgtgtaccgaggagacaagagccaggctagcaggcccacaccagacgagctggaggccgtgcgcaagtacttccagctagatgttaccctggctcaactgtatcaccactggggttccgtggactcccacttccaagaggtggctcagaaattccaaggtgtgcgactgctgcgacaagaccccatcgaatgccttttctcttttatctgttcctccaacaacaacatcgcccgcatcactggcatggtggagcggctgtgccaggcttttggacctcggctcatccagcttgatgatgtcacctaccatggcttccccagcctgcaggccctggctgggccagaggtggaggctcatctcaggaaacctggggcctgggctatcgtg

SEQ ID NO: 243486 - DNA, 1070 bp, Homo Sapiens
ttgggtttgaagctttttataattctgttaagcctatccagattatcaacagcaccatagaaatggtgaagccggggaaatttcccagcggcaaaacagaaatcccttttgaatttcctctgcacttgaagggtaacaaagttctgtatgagacgtatcatggcgtgtttgtcaacattcagtatacactgcgctgtgacatgaagcggtctctgttggccaaggacttgacaaagacctgtgaatttatcgttcactccgctcctcagaaggggaagtttactcccagtcccgtggacttcacgattacacctgaaaccttacagaacgtcaaagagagagctttgcttcccaaatttctccttcgaggacatctcaactcaacaaactgtgtcatcacgcagccactaacgggagagctggtggtggagagctcggaagccgccatcagaagcgtggagctgcagctggtgcgcgtggagacgtgcgggtgtgcagaaggctatgcccgcgacgccacggagattcagaacattcagatcgccgacggggatgtgtgcaggggcctctctgtccccatctacatggtcttccctaggctgttcacctgccctacactggagaccaccaacttcaaagtggaatttgaggttaacatcgtggtgctgcttcaccctgaccacctcatcacggagaacttcccgctgaagctctgcaggatatagcccggaggagggaagcatagagaacgggagtggccatctggaaatccagctggttatccaaatcctaagggagctacagccagcggcatatacttgtttttgtgattattctgtatcagaaatgaaacagaccctcaaattaactttccttcctcatttcttgaggcttctgcttccaacaggcacctctaatcagaccttttctttgaaattcaacaagatttcttaatgctatttgccaagaccatttcacagaaaacattgactgtggctcttgccttatctgttcctttttaaggtacagtaaacaattgttgacagcagtttgagcttgctggagagtgg

SEQ ID NO: 243487 - DNA, 2430 bp, Homo Sapiens
  misc_feature (252)..(541): n is a, c, g, or t
  misc_feature (2089)..(2102): n is a, c, g, or t
accggactgcaagtctgcgtggggcaacaataccaactttggagataaaggccagatgggaaagttaatttctacaaaattaacaaacacttgtatctgctcagtgcttcacaactttcaaggcttttctcaacctcctgatgaccaggcatgcaggctggccaagtggctccccaagctgactcatccctcatcacacaggtaggggcctgcaatcagggcccacagagctccagggtccggtttttgccnnnnnnnnnnnnnnnnnnnnnnnnnnnnnnnnnnnnnnnnnnnnnnnnnnnnnnnnnnnnnnnnnnnnnnnnnnnnnnnnnnnnnnnnnnnnnnnnnnnnnnnnnnnnnnnnnnnnnnnnnnnnnnnnnnnnnnnnnnnnnnnnnnnnnnnnnnnnnnnnnnnnnnnnnnnnnnnnnnnnnnnnnnnnnnnnnnnnnnnnnnnnnnnnnnnnnnnnnnnnnnnnnnnnnnnnnnnnnnnnnnnnnnnnnnnnnnnnnnnnnnnnnnnnnnnnnnnnnnnnnnnnnnnnnnttcacctctccttcttgcatccctctaaccaaaggagtgctcctagagaaatcaagtttattttctaaacaccagtgaaagcaaaatccagtaggaaataccttgcttcagcgtggcatatcttaagtggaccaaaaggggtggtaggataatttttttacaaatttgctttaaattctactttgaaatttagaatttgatttttttcccctccatttgcagaatttaacaccatttaacacgaacccaaggcaggttgagagcggagatgtaaacattttcaacagtagcgtggactttacggctttctacatccccatgtgggttgaggctgcaactggttttggggagtggggggcagagcagggagaaggcgttaactgccagatgggacagggcagcagccaagccccacagcccagctgcaaagggctgttcacggggcacacgtgggaggtacccagtttggctctttcccatccctgatctgaaaaaggaactccactgactgataaaattcttcatcgctattagggcaaaatctactccccaaggcactgtgtgcatggtcccaagatggaaattctccacgtgttacttcctaggcagtagcaccactcaaaagaatccaggcctgcgcctcctcggtaagatgcaccacgctgaccgtgatgggtggcggcaggtcaggacccggctcactgaaatgcaaacatacatgagcttcctgctcatttttaaagacaagctccggtgagggctccaaatcagagacagtgcagctcgtctcgtcggtattcccttgcacggcagcctggcagagcaccaaatggcacagctagggaaaacgggcttgtattttctctgagcggcaatctgactcggcacacaccatttcagaaagcgaggctgcgaagcctgtgttctcgggtgacgcagagcagacaaggatgcagaatggcttctggagaggggtcttccgactcgggcatgagggtccaggtcagacctcagccgcagggccctagcagataggcctggctcttgtcacatgcagtgagaagctgtgacatgagaattaatggttgggacaagacagggacaaagactggagacatgcttccctagactgcacagggaaacacaggagatgagattcagtcaaaacacacatagatcacgttacctgaagtgcctgagttaaaaggctgatgcagaaataagtcctaggatgaaggtaggatttatcccaaacacctgccccacaagtcgccaaatgctgcctatcaagggcttctaagtgctgaccggggaaggcaggcattcacatcactcacaaccagggaaggaagcagtctcagcaggtttatgcccagtcaccccaattctactgggctccaccaccctccagcgggcgagatcctgccacccagcatgtgtgcgtgtgtgtacacagcaagagaaaataggccagggccagatctctggtcctggaattttggggaaagacaaaggaaaaaggcacatgaaggtggctgattgaatttnnnnnnnnnnnnnnggtagctgcaagtgacatatcattattttgatttttttaacgtaccttttttcccccatgaaaagagaaattcaaaatataaactttattattttacattcaagtgaaacttccatctggaggggctaaacacagctgccggccacattcactgatttattactttgttgcctttttcgttcacctgatggaagaattcaaccctcttaaaaacataacaacaacaaaaacagctggagagtcccagccgtaatactaggtgtagacacgcacaagcacacacacaaattcaaaaacttctacatagaaaaataaaggataaacccaa

SEQ ID NO: 243488 - DNA, 1249 bp, Homo Sapiens
ttggccagcgtttccgcaccctctccgattagcggtcccaggagtttccaaggtaaccgcgcagtagggcggatctcattaggcggaaagcgaaacccggaagtgacgcttttaccgggtgtcagcagcgagagggttcgaagatggcggcgcgcaagggtcggcgtcgcacgtgtgaaaccggggaacccatggaagccgagtccggcgacacaagttccgagggcccggcccaggtctacctgcccggccgggggccgccgctacgcgaaggggaggagctggtcatggacgaggaggcctatgtgctctaccaccgagcgcagactggcgccccctgtctcagctttgacatagtccgggatcacctgggagacaaccggacagagcttcctcttacactttacttgtgtgctgtggcccaggctgagagcgcccagagcaacagactgatgatgcttcggatgcacaatctgcatgggacaaagcccccaccctcagagggcagtgatgaagaagaagaggaggaagatgaagaggatgaagaagagcggaaacctcagctggagctggccatggtgccccactatggtggcatcaaccgagttcgggtgtcatggctgggtgaagagcctgtggctggggtgtggtcagagaagggccaggtggaggtgtttgcgctgcggcggcttctgcaggtggtggaggagccccaggccctggcagccttcctccgggatgagcaggcccaaatgaagcccatcttctccttcgctggacacatgggcgagggctttgcccttgactggtccccccgggtgaccggtcgcctgctgaccggtgactgtcaaaagaacatccacctctggacacctacggacggcggctcctggcacgtggaccagcggccattcgtgggccacacacgctctgtggaggacctgcagtggtcaccgactgagaacacggtgtttgcctcctgctcagctgacgcctccatccgcatctgggacatccgggcagcccccagcaaggcctgcatgctcaccacagccaccgcccatgatggggacgtcaatgtcatcagctggagccgccgggagcccttcctgctcagtggcggggatgatgggggccctcaagatctgggaccttcggcagttcaagtctggttccccagtggccaccttcaatgcagcacgtggcccccgtgaccttcctcgagtggcacccccaggacagcggggtc

SEQ ID NO: 243489 - DNA, 1063 bp, Homo Sapiens
aaaagccaactttgtacaaaaaagttggtatttcagaaccacgccgtggtgtctattgaggctcacctgcattgaattccttcctttttatgttgcgatctcccaagattgcattgtggagggttttcgaatccattttgaaatccccgtgcgtgcgctatgcaggcctcagtctttttccattccattcttaactctactttcgacggaagcagtgttttaccccgacactggcttgcctaggaccttgtgctctgcacaactagcagggcccggcaggatgtactgaattcttgctctcgtgtccagctggacggtgatggctttcaagtccttggctgttgggagcttactataaatgttcgtcttggctacaaactctccactctttcctcggcactctctcagcattgccaccactgtctttcctcttggccaactgttttctttacttaggctttcccttgctagaaagtccaggtaactttctccacgggacctggtttccttcgcacatcccagctggcctcgaggaaaggtagctcttcccaaatcagagaatctggatgctgggctgggctctgcaccaaccagctgggccgcttcacccgctgggccccaaactactcatctgtgaagcgaaggcaccgcgcttgatgccttctgcaacgttcttcagtttggaaatccttctgtttcgttggggatatttcacggcctcttctcaaggttgcacttttgccagctgccagggatcgtctcaaaacaggttcttagtgcattcatagcttgagctgctgtcttgaaagtagtacattcctttttctgccaacttttttctgagaaagtttttgaatgcacacgtgcacccaacagagtgagagtggctgttaagagagagggcgccatttcctttgccctccagcctgtccctgtgcaccctggagggcccgttttttccaccgcttagataaaatctagggcaagttcctgaacttctcttgtctctctcaggtaacaaaaattcttttgggctcttttagtcacaagatattcacgattt

SEQ ID NO: 243490 - DNA, 1252 bp, Homo Sapiens
ttggattggcccccctggcccagctggtgctaatggcgagaagggagaagttggacctcctggtcctgcaggaagtgctggtgctcgtggcgctccgggtgaacgtggagagactgggccccccggaccagcgggatttgctgggcctcctggtgctgatggccagcctggggccaagggtgagcaaggagaggccggccagaaaggcgatgctggtgcccctggtcctcagggcccctctggagcacctgggcctcagggtcctactggagtgactggtcctaaaggagcccgaggtgcccaaggccccccgggagccactggattccctggagctgctggccgcgttggacccccaggctccaatggcaaccctggaccccctggtccccctggtccttctggaaaagatggtcccaaaggtgctcgaggagacagcggcccccctggccgagctggtgaacccggcctccaaggtcctgctggaccccctggcgagaagggagagcctggagatgacggtccctctggtgccgaaggtccaccaggtccccagggtctggctggtcagagaggcatcgtcggtctgcctgggcaacgtggtgagagaggattccctggcttgcctggcccgtcgggtgagcccggcaagcagggtgctcctggagcatctggagacagaggtcctcctggccccgtgggtcctcctggcctgacgggtcctgcaggtgaacctggacgagagggaagccccggtgctgatggcccccctggcagagatggcgctgctggagtcaagggtgatcgtggtgagactggtgctgtgggagctcctggagcccctgggccccctggctcccctggccccgctggtccaactggcaagcaaggagacagaggagaagctggtgcacaaggccccatgggaccctcaggaccagctggagcccggggaatccagggtcctcaaggccccagaggtgacaaaggagaggctggagagcctggcgagagaggcctgaagggacaccgtggcttcactggtctgcagggtctgcccggccctcctggtccttctggagaccaaggtgcttctggtcctgctggtccttctggccctagaggtcctcctggccccgtcggtccctctggcaaagatggtgctaatggaatccctggccccattgggcctcctggtccccgtggacgatcaggcgaaaccggccctgctggtcctcctggaaatcctgga

SEQ ID NO: 243491 - DNA, 1572 bp, Homo Sapiens
  misc_feature (501)..(523): n is a, c, g, or t
ttggcttccagacggaccgggcagcccctctccgtcctcagggctgtgcctctgggagccactgggccaggggccccgggtcgcagagagcacgttcccgttatttattcccctccgcgtcctacacaggctgccctggcagctgtcttcaagggtaggctgagctccccaccctggagcccctgagggcggcccctgagcactcctctctctccactctctctgtccctgccccagcggcttccagtgtggcatctcagcagtgtcctggcccctccagagcagtgggacatctggggactgtttttgtgtttaggggaaaaaattctgctgcactctgcttgggccttgaggtctgtggcagggctcctctggcccgcagtggcctggatctatctgggccatgagtgacgggcagtgaccagagggactggaggccagcggtgtccacccttgccctcagcaagagagaatgcattcttaaaagaaagctgtacatgnnnnnnnnnnnnnnnnnnnnnnngtggctctagcctcaggctccagccccagtggggtactgtacagttaactgaagaagaattttaaagacgatttgaacaagaaaatgaaggcagtgggaaagcaatgccaaatggttgtggagaaagtggccggagcctccctggagtggagcagccctgaagcctgtgccccccgacctgcgggccgctgttttggtttgacatgacaaggaaaggacttcctgctgaccctgagagcctctggggtgccgcggcaccacggggcatgcatgattgtgctagcgtttagtctgagttgatctttttaaaactgcaagtgttgaatactagaggttgttagacccttttttatgttttttaattaatcagtcacttgtaaaagcaaacaagcggtccatccccttttcaaggtcacttttttgatggtaccgaagatcccatggacattaagggacagctaactgtggccagactcagccccatgtccttggccaggcccaaggagaggactcggccccatggggtgtgccagtcttgcagtccgccccagctgagtagcgtgagccagatgacgccacagagacccgcctcttccctgaacgcgggtcggtgtggagtcagtgactgctgactcagggagctccttggccccgtgggcactgtgccagggctggggccttctgctgctgccacacccagctcaggcctgggccagcccctgcccccagcccactgagggggtgggcttactccctgggcagtcttgggggccagagctgaggccagtccatattacagtggctgggctgtttttttcagtaacccctagcattggctgggattcctgttcctgggtgcgcctccacctcccttctgatgtttcctggctatggtggggtgggaacctcagtttcccccaaagtcttccctggatgctggcttcaggttgaagtccctggttcttccagttcctcacgggttaagtaggggctcctgcatcaccttcagaatccagttccaacccccactctcccttaggccttgtgct

SEQ ID NO: 243492 - DNA, 870 bp, Homo Sapiens
ttggcacgcctccccttcagcttctcttcacgcactccaagatctaaaccgagaatcgaaactaagctggggtccatggagcctgcacccgcccgatctccgaggccccagcaggaccccgcccggccccaggagcccaccatgcctccccccgagaccccctctgaaggccgccagcccagccccagccccagccctacagagcgagcccccgcttcggaggaggagttccagtttctgcgctgccagcaatgccaggcggaagccaagtgcccgaagctgctgccttgtctgcacacgctgtgctcaggatgcctggaggcgtcgggcatgcagtgccccatctgccaggcgccctggcccctaggtgcagacacacccgccctggataacgtctttttcgagagtctgcagcggcgcctgtcggtgtaccggcagattgtggatgcgcaggctgtgtgcacccgctgcaaagagtcggccgacttctggtgctttgagtgcgagcagctcctctgcgccaagtgcttcgaggcacaccagtggttcctcaagcacgaggcccggcccctagcagagctgcgcaaccagtcggtgcgtgagttcctggacggcacccgcaagaccaacaacatcttctgctccaaccccaaccaccgcacccctacgctgaccagcatctactgccgaggatgttccaagccgctgtgctgctcgtgcgcgctccttgacagcagccacagtgagctcaagtgcgacatcagcgcagagatccagcagcgacaggaggagctggacgccatgacgcaggcgctgcaagagcccgatagtgcctttggcgcggatcacgcgcaaatgcacgcggccgtc

SEQ ID NO: 243493 - DNA, 992 bp, Homo Sapiens
tagaaacatcttattttaccctcataatgatagtttagtgagtacagaattctaggttgaaaatgattttcctcagaattcaaaggctttgttctggttcccaaagatgttgtggaagagccttatgccattttgattctggtccatcaggtaaattgtttctcctgtaattcatttaaggtctttttcagttttaagggaaaaaaaggccttggagaaagtgatgtcagcaagatgacagaataggaagccctggacactccttccctctacagacacactgattcaataacacatggaaaaattccctttgtgggaaatccagaaaccagttgagggtcttctgcactataggaaagcatgaaaccagctgaatcaaagtcggcagaaaaacctgaggcaccctcttgccataattcttcccttcccatggacccagcacagtaccacatgatagagaggaaaccctcagctcccagcttctttttgcagagggaaggaaatgactggaatgtacatccaacattctgacttttctggaacctgcacgagagactgttttctgtcttgcctgagtccgagagctaaaaacaaagggcccaggttggaagttgctgaaatcaaagtggaagtttggactagcaagcatgagctcactacagccgctcccccagctcagtgcagagtaagcaggtagaatccccaacatccccaaatcctagcttttccctagggaggagagatggactgtgaaaatgttccaactttgtaagaggttacctgagggaatggtttctgtagggaatggtttgaagcacagatgggaccagtatattttaggtgcctggggccagtatgaacaaaaaaagagctgggctatgccactggctccaggagacccatgatacagcagataaacacaaaagggagcaagagattataaattcctggggagggaaaaacccagcaaatccaacttttttgtacaaagt

SEQ ID NO: 243494 - DNA, 1338 bp, Homo Sapiens
ttggggcacacaagtccccaaaggcgctgtcatgtttgtggtaccccagcccgttgtgcagagttcaaagcctccggtggtgagcccgaatggcaccagactctctcccattgcccctgctcctgggttttccccttcagcagcaaaagtcactcctcagattgattcatcaaggataaggagtcacatctgtagccacccaggatgtggcaagacatactttaaaagttcccatctgaaggcccacacgaggacgcacacaggagaaaagcctttcagctgtagctggaaaggttgtgaaaggaggtttgcccgttctgatgaactgtccagacacaggcgaacccacacgggtgagaagaaatttgcgtgccccatgtgtgaccggcggttcatgaggagtgaccatttgaccaagcatgcccggcgccatctatcagccaagaagctaccaaactggcagatggaagtgagcaagctaaatgacattgctctacctccaacccctgctcccacacagtgacagaccggaaagtgaagagtcagaactaactttggtctcagcgggagccagtggtgatgtaaaaatgcttccactgcaagtctgtggccccacaacgtgggcttaaagcagaagccccacagcctggcacgaaggccccgcctgggttaggtgactaaaagggcttcggccacaggcaggtcacagaaaggcaggtttcatttcttatcacataagagagatgagaaagcttttattcctttgaatattttttgaaggtttcagatgaggtcaacacaggtagcacagattttgaatctgtgtgcatatttgttactttacttttgctgtttatacttgagaccaacttttcaatgtgattcttctaaagcactggtttcaagaatatggaggctggaaggaaataaacattacggtacagacatggagatgtaaaatgagtttgtattattacaaatattgtcatctttttctagagttatcttctttattattcctagtctttccagtcaacatcgtggatgtagtgattaaatatatctagaactatcatttttacactattgtgaatatttggaattgaacgactgtatattgctaagagggcccaaagaattggaatcctccttaatttaattgctttgaagcatagctacaatttgtttttgcatttttgttttgaaagtttaacaaatgactgtatctaggcatttcattatgctttgaactttagtttgcctgcagtttcttgtgtagatttgaaaattgtataccaatgtgttttctgtagactctagatacactgcactttgttt

SEQ ID NO: 243495 - DNA, 1304 bp, Homo Sapiens
ttggggacctgtccaaattggctgtgacctcctacgcagacattgctgacctcatggactgtggaaataaagcacggactgtggctgccaccaacatgaatgagaccagcagccgttcccatgccgtctttaccatcgtcttcacacagcgctgccatgaccagctcacggggctggactcggagaaggtcagtaagatcagtttggtggaccttgctgggagtgagcgagccgactcctcaggggcccggggcatgcgcctgaaggaaggagccaacatcaataagtccctgactacactagggaaagtgatctcggcccttgcagatatgcaatcaaagaagcgaaagtcggattttatcccctacagggactctgtgctcacctggctgctcaaggaaaatttgggggggaactcacgcacagccatgattgcagccctgagccctgctgacatcaattacgaggagactctcagcaccctcaggtatgctgaccgcaccaagcaaatccgctgcaatgccatcatcaacgaggaccctaatgcccggctgattagagagctgcaggaggaagtagcccggctgcgggaactgctgatggctcagggactgtcagcctctgctctggaaggcctgaagacggaagaagggagtgtcagaggcgccctgccagctgtgtcatctcccccagctccagtttcaccctcatcacccaccacacataatggggagctggagccgtcattctcccccaacacagagtcccagattgggcctgaggaagccatggagaggctgcaggagacagagaagattatagctgagctgaacgagacatgggaggagaagctacgcaagacagaagccctgaggatggagagagaagcattgctggctgagatgggggtggccgtccgggaggatgggggaactgtgggcgtcttctctccaaagaagactccccacctggtgaacctgaacgaagaccctctgatgtctgagtgtctgctctaccacatcaaagatggcgtcaccagggtcggccaagtagatatggacatcaagctgaccggacagttcattcgggagcaacactgtctgttccggagcatcccccagccagatggagaagtggtggtcactctggagccttgtgaaggagctgagacatatgtgaatgggaagcttgtgacggagccgctggtgctgaagtcaagaataggattgtgatgggcaagaccacgttttccgcttcaaccacccggagcaggcaaggctggaacgggaacgaggggtcccccc

SEQ ID NO: 243496 - DNA, 501 bp, Homo Sapiens
aatttaaataaagtaaaaaactaaactatttattaaaatacaattggaaacatgaatacaaactcataacttttctagctataaccacagaaatggcccagaaacagatctccaatgcaagtaacattttgggagcaattttggaaatttaaccatttgaatattagataaagaacttattgaaatataaattggagatcattgacagaaaacaaccacgttgcagaacaatatgctctcattagggttgaaaaaatttatatacagtcatacatcactaaatgacagctatttgttctaacaaatgcatcattagacaattttgtaattgtgcaatcacagagtgtcctaacacaaacctagattgtagagcctactacacacctaggatataaagcatatcctattgctcctaggctacaaacttgttcaacattttactgtactaaatactgtaagcagttgtaacacattggtaagtatttgtgccaacttttttgt

SEQ ID NO: 243497 - DNA, 532 bp, Homo Sapiens
  misc_feature (147)..(181): n is a, c, g, or t
  misc_feature (183)..(191): n is a, c, g, or t
  misc_feature (221)..(230): n is a, c, g, or t
gtttttctaccatctactggaattccttgatgatttgaatgtattaaactgcctattttaaaacaatttcaaagttaaatttgcaaagtatatagagatcatatatctcttatacagattaatcaatttttagtttgcctctcatannnnnnnnnnnnnnnnnnnnnnnnnnnnnnnnnnntnnnnnnnnnggattttcttatgtgcccatagtacagttnnnnnnnnnntgactttgtttacagtactttaaactatagaccatgtttcttaattatatcatttgtctcaataatgtcttctaaataattttttcctttaatctagaattccaggattgtgtatcagtagactttagttatcacaagaatttcatttccaaatatatggtatttttcaatattttcaaatttaagactttagcatatggtcagttaaaaatattttattgtaagaatgtatattttggggtacagtgttccacaatgtccataagacgttatgttaattgtggtattcaatcttatttatc

SEQ ID NO: 243498 - DNA, 910 bp, Homo Sapiens
tcacactgcaggaaggccagtgtggtgacagcagtggcaggtcacggagccagatcctataagctgatgtgagaactaaatgtggtaaaagatcccaagaactaggatgcattaactcctcctctgcaagagctaaaagggctgaacttgtaatccatccaccaaagagagtgggtggtccaagcctaggaagccccaaaccacagcaggcttctgatcggagtctgcattaatttatagacctccctccccaacgcccccacacgatacaggtggtttcctgatgcaggatattaactttcaactgctggaggtcccaaacctccacgctggcctaaaaggtttcatcaggtttggataagcctcagataaggagctgaacttttgcgggcttatgagaactgcacctgcaatccttcagagattcactcatcacgaaccttaatccatctcaaataaaacctgtgcatacagacgtgctttcccacccacggctgtttaataaggaaaaagaacagctttgtctgttctgtaaaagcctcctctatttacactgtacccatggatttaatttccgatatttacattttaattctttaagatatgcaggagataaatggatagagaggcccaggttgagacacagccctttcctgcaaagctactcgccgtgttttcctctctcccaagccctggtttccttctgttgccaaatgtaaactggtttccttttctatcttcctcagggtgtcctccctgtccaccagccctggactctctttcttgccccagtcctcccttgatgcttctcttttattgtgggccacccaggttggctggtcatccatctgtagtggttgaataattctttcccaaaattcttctcccctcgaacctcagcatgtgccaa

SEQ ID NO: 243499 - DNA, 371 bp, Homo Sapiens
aataacaagctcatcctcaattggttctattttctcacatgagcaaaaatgaaaaaagttgaattaagggtaataactctgagctagacagaaaaggggaagaaacaaatccttctaactagggaatcctggggcccctgcaacaactgcagttttcccaaaggctctgcatgtctgtatcagcctgacctttggtttgttctccgtgatcgtctcagatcctagagcctttgaactagaaaccttgggccatagtaagccacagaaatgttcagtgagaaaacgcaaggcttgattcatgaaacatagataattttcaataacttggcataccttatcatgattttaggccaggcgtagtggctcacact

SEQ ID NO: 243500 - DNA, 1581 bp, Homo Sapiens
aacaattttacattgggaagtatcatgaaaagtgttgttatccacatattaaatgtccagggatggttatacaaaagggaatagcagacacagaagggtataggaaacacattcctgtcagtcactgaggcctaatcttcaggaagaggattagaggattagaatccaccaacaccaatacacctggtatttcagcacatgaattaagtgacacatcttcagtggacatgcttccctgagaaaattcccggaaatgcacacctgccaacatcttggctgtaacaaatcaatgtaacccagaaagaatattctggagaagcagtacctcactactctctctgcctacaaacaacgtacatgattcacctaggactattcttattctgcaaatatagaagatatatgcaaatacctcatcttgcatatctagttcttcacttcactaaatatgtaaactagaaaaccttttacaactcaacatgtatgctaataaaataacaaaaagcttttccaagttatccactagttatatgacatcggtgaaacttttgaagagttacttcagcccataaagcaggtttattttattctgatgtcattaaagtttttaatcatatggctaatgtcctagtttttattacctgtatatctggcaatctttgcatcccaatttggcctaacaaggctcaccaagagggagaaaatacagtggctggagaattttagtctccatagtagttatgattcttactagtaattaataaaactgcatcacaaatttatattgcagtaccataaatctgaaaatgtgcgctcccctctttgaagtttctattcttgttgtggtgatatgtttctcagcttgcaacactgacgtgaaccatgaaaaatcatcagttcaataccccctgtgagacatttttcccaagaaatgcattcaaacaacatctgtttcttcttcacctacctgaaagacttcttaatatcttctgcctggattgtcttgagaatctcttgatataactgaggatcaactgttcctgaagatggagcatctgaagggcaatttgtatgtacataataacctatcaaaatcccaaaaataaataaaatggtggctgtgcaaagcatttttaagacgtggcaaaagttgcagcgattgctctttggtgcagatcgtgtataatgggtaatgtagtcagattcttcttgaagtctctggaaccttcctttgggtgaagttgctggttgaatggaatcaagattgaggtctatagtctctgaatgccctaggttctgattctcagcactgtctagctggaattggtcaaaaccagactcctctagttccttctccatgtcccactctaagtcaagggcagtggcttgaaggtcatcattgtctaagtactgtgagtgtcctggagctctttgatctgcatggaccttctgataggccatctttttaccttgcaaagacgtgttaggtaaacttgcttcattctctcccattttattatttctttttaaagagggccaagcagtttcaagttgtgtcacttaccctgcaagctttgccaa

SEQ ID NO: 243501 - DNA, 1544 bp, Homo Sapiens
ttggggtctctcttgctgcacacctgagccactcaggccccatccctgtgcatcagcttcgcaggtacacagctcagctcctgtcaggccttgattatctgcacagcaattctgtggtgcataaggtcctgagtgcatctaatgtcttggtggatgcagaaggcaccgtcaagattacggactatagcatttctaagcgcctcgcagacatttgcaaggaggatgtgtttgagcaaacccgagttcgttttagtgacaatgctctgccttataaaacggggaagaaaggagatgtttggcgtcttggccttctgctgctgtccctcagccaaggacaggaatgtggagagtaccctgtgaccatccctagtgacttaccagctgactttcaagattttctaaagaagggatactgatgctactggccagggaccccactttgagaagccctgggttaaagatgtgtgtgcttggatgacaaggaaagatggagtccccagcagttgttgaaacacagctttataaatccccagccaaaaatgcctctagtggaacaaagtcctgaagattctggaggacaagattatgttgagactgttattcctagcaaccggctacccagtgctgccttctttagtgagacacagagacagttttcccgatacttcattgagtttgaagaattacaacttcttggtaaaggagcttttggagctgtcatcaaggtgcagaacaagttggacggctgctgctacgcagtgaagcgcatccccatcaacccggccagccggcagttccgcaggatcaagggcgaagtgacactgctgtcacggctgcaccatgagaacattgtgcgctactacaacgcctggatcgagcggcacgagcggccggcgggaccggggacgccgcccccggactccgggcccctggccaaggatgaccgagctgcacgcgggcagccggcgagcgacacagacggcctggacagcgtagaggccgccgcgccgccacccatcctcagcagctcggtggagtggagcacttcgggcgagcgctcggccagtgcccgtttccccgccaccggcccgggctccagcgatgacgaggacgacgacgaggacgagcacggtggcgtcttctcccagtccttcctgcctgcttcagattctgaaagtgatattatctttgacaatgaagatgagaacagtaaaagtcagaatcaggatgaagattgcaatgaaaagaatggctgccatgaaagtgagccatcagtgacgactgaggctgtgcactacctatacatccagatggagtactgtgagaagagcactttacgagacaccattgaccagggactgtatcgagacaccgtcagactctggaggctttttcgagagattctggatggattagcttatatccatgagaaaggaatgattcaccgggatttgaagcctgtcaacatttttttggattctgatgaccatgtgaaaataagtgattttggtttggcgacagaccatctagccttttctgctgac

SEQ ID NO: 243502 - DNA, 504 bp, Homo Sapiens
tacaaattacactgagaggtcttcgttcttccagtgggtggaattaaagacaaagtgctggcggcacacagagcgggactgaagcaagtcattattcctcggagaaatgaaaaagaccttgagggaatcccaggcaacgtacgacaggatttaagttttgtcacagcaagctgcctggatgaggttcttaatgcagcttttgatggtggctttactgtcaagaccagacctggtctgttaaatagcaaactgtaggtccaaatctcaattttttagaattttaagttatgaagtgctcaaaggtactgacacagttgattttattcacaccattaggggtatgcaagatgtccctgttttataaacataatcacaacagtaataaacctcaagtagtggctagtgtttagtatagaaatataagatgttgatttagtaaactgataaaaatcgaattcttgtctttttagtgggatccttactgtccctggaaagatatagcat

SEQ ID NO: 243503 - DNA, 1482 bp, Homo Sapiens
ttggtacaacccctgacagcaggaagagaacaagacatttcaataatgacataaaccctgtgtggaatgagacctttgaatttattttggatcctaatcaggaaaatgttttggagattacgttaatggatgccaattatgtcatggatgaaactctagggacagcaacatttactgtatcttctatgaaggtgggagaaaagaaagaagttccttttattttcaaccaagtcactgaaatggttctagaaatgtctcttgaagtttgctcatgcccagacctacgatttagtatggctctgtgtgatcaggagaagactttcagacaacagagaaaagaacacataagggagagcatgaagaaactcttgggtccaaagaatagtgaaggattgcattctgcacgtgatgtgcctgtggtagccatattgggttcaggtgggggtttccgagccatggtgggattctctggtgtgatgaaggcattatacgaatcaggaattctggattgtgctacctacgttgctggtctttctggctccacctggtatatgtcaaccttgtattctcaccctgattttccagagaaagggccagaggagattaatgaagaactaatgaaaaatgttagccacaatccccttttacttctcacaccacagaaagttaaaagatatgttgagtctttatggaagaagaaaagctctggacaacctgtcacctttactgatatctttgggatgttaataggagaaacactaattcataatagaatgaatactactctgagcagtttgaaggaaaaagttaatactgcacaatgccctttacctcttttcacctgtcttcatgtcaaacctgacgtttcagagctgatgtttgcagattgggttgaatttagtccatacgaaattggcatggctaaatatggtacttttatggctcccgacttatttggaagcaaattttttatgggaacagtcgttaagaagtatgaagaaaaccccttgcatttcttaatgggtgtctggggcagtgccttttccatattgttcaacagagttttgggcgtttctggttcacaaagcagaggctccacaatggaggaagaattagaaaatattaccacaaagcatattgtgagtaatgatagctcggacagtgatgatgaatcacacgaacccaaaggcactgaaaatgaagatgctggaagtgactatcaaagtgataatcaagcaagttggattcatcgtatgataatggccttggtgagtgattcagctttattcaataccagagaaggacgtgctgggaaggtacacaacttcatgctgggcttgaatctcaatacatcttatccactgtctcctttgagtgactttgccacacaggactcctttgatgatgatgaactggatgcagctgtagcagatcctgatgaatttgagcgaatatatgagcctctggatgtcaaagtaaaaa

SEQ ID NO: 243504 - DNA, 922 bp, Homo Sapiens
aaagttggggcggcggcgggctcgaggtgacaactgtctccgtcgcaggctccggcgggggcgcaggaggtcgcccggcgcgtcactgtcgggtcggcgagccacgggggccgccgcagcaccatggcgaccaccgtcagcactcagcgcgggccggtgtacatcggtgagctcccgcaggacttcctccgcatcacgcccacacagcagcagcggcaggtccagctggacgcccaggcggcccagcagctgcagtacggaggcgcagtgggcaccgtgggccgactgaacatcacggtggtacaggcaaagttggccaagaattacggcatgacccgcatggacccctactgccgactgcgcctgggctacgcggtgtacgagacgcccacggcacacaatggcgccaagaatccccgctggaataaggtcatccactgcacggtgcccccaggcgtggactctttctatctcgagatcttcgatgagagagccttctccatggacgaccgcattgcctggacccacatcaccatcccggagtccctgaggcagggcaaggtggaggacaagtggtacagcctgagcgggaggcagggggacgacaaggagggcatgatcaacctcgtcatgtcctacgcgctgcttccagctgccatggtgatgccaccccagcccgtggtcctgatgccaacagtgtaccagcagggcgttggctatgtgcccatcacagggatgcccgctgtctgtagccccggcatggtgcccgtggccctgcccccggccgccgtgaacgcccagccccgctgtagcgaggaggacctgaaagccatccaggacatgttccccaacatggaccaggagtgatccgctccgtgctggaagcccagcgagggaacatggatgccgccatcactccctg

SEQ ID NO: 243505 - DNA, 1137 bp, Homo Sapiens
ttggcgatgagagtgtcaggaaggtgacggagcacctgtcaggctgcatccagcagtggggagacagcgtgctgggcaggcgctgccgagaccttctcctgcagctctacctacagcggccggagctgcgggtgcccgtgcctgaggtcctactgcacagcgaaggggctgccagcagcagcgtctgcaagctggacggactcatccaccgcttcatcacgctccttgcggacaccagcgactcccgggcgttggagaaccgaggggcggatgccagcatggcctgccggaagctggcggtggcgcacccgctgctgctgctcaggcacctgcccatgatcgcggcgctcctgcacggccgcacccacctcaacttccaggagttccggcagcagaaccacctgagctgcttcctgcacgtgctgggcctgctggagctgctgcagccgcacgtgttccgcagcgagcaccagggggcgctgtgggactgccttctgtccttcatccgcctgctgctgaattacaggaagtcctcccgccatctggctgccttcatcaacaagtttgtgcagttcatccataagtacattacctacaatgccccagcagccatctccttcctgcagaagcacgccgacccgctccacgacctgtccttcgacaacagtgacctggtgatgctgaaatccctccttgcagggctcagcctgcccagcagggacgacaggaccgaccgaggcctggacgaagagggcgaggaggagagctcagccggctccttgcccctggtcagcgtctccctgttcacccctctgaccgcggccgagatggccccctacatgaaacggctttcccggggccaaacggtggaggatctgctggaggttctgagtgacatagacgagatgtcccggcggagacccgagatcctgagcttcttctcgaccaacctgcagcggctgatgagctcggccgaggagtgttgccgcaacctcgccttcagccctggccctgcgctccatgcagaacagcccccagcatttgcagccgctttcctgcccacgttcatgtactgcctgggcagccagggactttgaggtggtgcagacggccctccggaacctgcctgagtacgct

SEQ ID NO: 243506 - DNA, 1231 bp, Homo Sapiens
cccacccgcgtggtcagaagaaacacaaatatggatgtgtcctcattgtatctcgtaatcagtggctgtcctgaagctattgtagtggtaccatcccatcttgagataggtatacttttgggctctaaggaatacttcaagtatgtccagcatctgccttgactgagaaaacagcaatactcgctgacccctgcttgtgccatattttcaacaaagactcaacaacaatcattttcccagaacgtttccagtacccaaactgatcttcttctagttcatcatcaggaagacctttgagattcttgggacctccagaaaagagatcagggtggttgcaaatttttcttagggctataagtccggagaaaatctgtggtaagaaagagtacatgtacactcagatgaccccatgtaaagtaagattccctaggcaaggaggctgtttaacctataacacagactaaaaaacagttctccaccagcttcttagtttcttctctagtcacagcattatcatgagctgggagaaattaactttcactcatcttgtttccctgatagaacaagttctcagaaacaaaaaaattctactggactgaacacgtctacaggggtcatattcaattgctgataattcattttccctcactagaaaaaaggtatgcagttcacggtattataaacctaatataaaaaaggaattcgccttttaaatatggatcagaaatgtcctatcaacctaaatttggagacatcagtcatgtgacttatcaaatgcatttaaatattacactcctaattacctcactaaaagttctgcagtttaatatgagtcagaggttgaggatccatttacctttagattattattatatcaggaaaaaaactgcatgaaaaatgcacgaataggaatgcacgaatgggaaagatatccaccatgcagaagggcacagaagacaaggggtgagtgccccggcccatccccacaaaagaacattaacaaaacttcaataatggggctcttccagccttgagaggatgattcaaatcaaactcactggtctaaaagcttgagcagaggagaaatcaccattaagccaataatcaaagggtagggtagctatcactagtaaacaacagtaaacagattaacaataaatgatctgaataagtcaggaacattggtaaacctccccagagtcatccgtgactcattcttcttcctttcaat

SEQ ID NO: 243507 - DNA, 1378 bp, Homo Sapiens
  misc_feature (1131)..(1139): n is a, c, g, or t
ttttaataagcaactcaaatgtggcaaactatcttctctgtgcagagggcaaaagcatcaatagacagatgataacatggtttggaagagcacattgaaataagcccataatttctcatctaaaatacctcactgcaaacaaagacttaaaattattttcaaaccctagactttagtctgattcctttcgtccatgattttttcttttaccatacatgctctaatgagacagcagataatatatgtgtttctaaaggtttgcttaaacagacacgcagcaagtgtttatcaaataactaaaaataacatacacataaatcaaaggaagggcaaagcgtctccccaagggatgagaatatcatagagaaaatcctgaagcttggcagcaattccaaacaacagtgagtctcagattccatttcccacaaagggtaagaaacagtcatttaaagctttcaaattgtggaaagaagtattttaaatgaagtagtagaagatcattctggattaaatcaaataaattatatagctcattatatagtggatttaaataaatgcccatgcccaagtcaaggaaatttgtcaactcaactgcagtgatgaagcacggtggtactggaacaagagtaacttttatattagacagacagatttaagttccaattctgtccctgggtgacaattattctatcactctctgccatgttttgtctctggtagatatgctgttaagatattcactccacttatctccgaaatatcaccaattttataaggctcttgtgaagattagaagatacatgtcatgtccctggtatagtaaaactcagtaagtgaccagtaagtggtagctaatagtagtaagtactttcatctcagagatgcttttctaaaagtgcttgagtctgcaacatcattgttttcaaactaccctttggagccatatgtctctacgtgtttttcagagaagccatctcgatggagccagggtggtatagagaaaggggtagatggtgagaatgtaggggaccataaaacagataagttccaggaccattcattccttgtcattgattttaaatattaaagtgatagaaaatattattttttaaaaaagaattctattacttnnnnnnnnntctgaaaatcattgaatgacgcataaccttccagctttaaacatctgaagttttcacgctccttagaatctaacacctatatccagtactttttgaggttttcccatctacgttaatggcctcatgttaagcccttcctctccccactaccaccaaatctctcagttccccttaggacaactgcacatgttcacacacactctctttggttgtgttaacagacaatgctaagtagccaa

SEQ ID NO: 243508 - DNA, 1103 bp, Homo Sapiens
ttggcggtgagcgcccatatgggggttctggagagcggggtgtgggccctcccaggcccaatacttcaaagcatcctacctctgctcaatatatattacttggagaggattgaggaaactgccctcaagaaaggcctctcaactcaggccatctggcgccgactctgggatgaactgatgaagacaaggccttccagtttggaaagtgtgacatgttggcgagccaagtttatggaggcctttttttcccatgttctacgtgggaccattgatgtgtcttctgacaggcgtctttgtgatcagcggttctcacctcttctgcacagctcccgccatgtccgacagctcaccatctgtaacatgctgcagggtgcaaccgagctggtggctgagcccaaccgcagggttctggagaccctggccagctccctgcacactctcaagttccgccacctgctgttctctgatgtggctgctcagcagtcacttcggcagctgttgcatcagctcattcaccatggggctgtcagtcaagtgtcgctatactcctggcctgtgcctgagtcagcccttttcatccttattctcaccatgagtgctggcttctggcaaccagggcctggtggcccaccctgccgcctctgtggagaggcctcccgaggccgggccccatcccgagatgaagggtccctcttattgggctcacgtcggccccgccgggatgctgctgagcgatgtgctgcagccctgatggccagccggcgtaagagtgaagccaagcagatgcccagagctgcacctgccactcgggtaacacgccggagcacacaggagagcctgacagcaggcggaacagaccttaagagggagctgcaccccccagccacctcccatgaggctcctggcaccaagcggtcaccttctgctccagcagccacctcctctgcctcttcttctacatcctcatacaaacgggcaccagctagctcagctccacagcctaagcccctaaagcgtttcagcgagctgcagggaagaaagggtgctcgcactccgtcaagggcctggtgcagagtctgaagacctgtatgacttcgttttta

SEQ ID NO: 243509 - DNA, 1667 bp, Homo Sapiens
ttgggaccaacaatgtgctcctctgctcccaggccgacctccctgacctgcaggccctgcgggtaggtggcctggggctggtggaggcaggcacagggctggggtaaggcctacacagaacaccagtatctgactgtctgcctcctgcaggaggatgttttccagaagaactcggattgcgttggcagctacacactgatcccctatgtggtgacggccactggtcgggtgctgtgtggtgatgcaggccttctgcggggcctggctgatgggctggtacaggctggagtggggaccgaggccctgctcactcccctggtgggccggcttgcccgcctgctggaggccacacccacagactcttgtggctatttccgggagaccattcggcgggacatccggcaggcgcgggagcggttcagtgggccacagctgcggcaggagctggctcgcctgcagcggagactggacagcgtggagctgctgagccccgacatcatcatgaacttgctgctctcctaccgcgatgtgcaggactactcggccatcattgagctggtggagacgctgcaggccttgcccacctgtgatgtggccgagcagcataatgtctgcttccactacacttttgccctcaaccggaggaacaggcctggggaccgggcgaaggccctgtctgtgctgctgccgctggtacagcttgagggctctgtggcgcccgatctgtactgcatgtgtggccgtatctacaacgacatgttcttcagctcgggtttccaggatgctgggcaccgggagcagcctatcactggtatcgcaaggcttttgacgtagagcccagccttcactcaggcatcaatgcagctgtgctcctcattgctgccgggcagcactttgaggattccaaagagctccggctaataggcatgaagctgggctgcctgctggcccgcaaaggctgcgtggagaagatgcagtattactgggatgtgggtttctacctgggagcccagatcctcgccaatgaccccatccaggtggtgctggctgcagagcagctgtataagctcaatgcccccatatggtacctggtgtccgtgatggagaccttcctgctctaccagcacttcaggcccacgccagagccccctggagggccaccacgccgtgcccacttctggctccacttcttgctacagtcctgccaaccattcaagacagcctgtgcccagggcgaccagtgcttggtgctggtcctggagatgaacaaggtgctgctgcctgcaaagctcgaggttcggggtactgacccagtaagcacagtgaccctgagcctgctggagcctgagacccaggacattccctccagctggaccttcccagtcgcctccatatgcggagtcagcgcctcaaagcgcgacgagcgctgctgcttcctctatgcactccccccggctcaggacgtccagctgtgcttccccagcgtaagcactgccagtggttctgcggcctgatccaggcctgggtgacgaacccggattccacagcgcccgcggaggaggcggagggcgcgggggagatgttggagtttgattatgagtacacggagacgggcgagcggctggtgctgggcaagggcacgtatggggtggttgtacgcgggccgc

SEQ ID NO: 243510 - DNA, 1206 bp, Homo Sapiens
actttgtacaaaaaagttggcatggaggcctaccagcaggtccaaaagggacccctgaagctgaaaggcgtcgcagagctgggagtgaccaagcggaagaagaaaaagaaggacaaagacaaagcgaaactcctggaagcaatgggaacgagcaaaaagaacgaggaggagaagcggcgcggcctggacaagcggaccccggcccaggcggccttcgagaaaatgcaggagaagcggcaaatggaaaggatcctaaagaaggcatccaaaacccacaagcagagagtggaggacttcaacagacacctggacacactcacggagcattacgacattcccaaagtcagctggacgaagtagccgcctgcccccagtatggagcagcatcgagggttcgcaaaaggccacactggggttgtgtgtgtttcctttggtatattctggaaacatggctacacacacccttgcatcttctgctacagactgcttttcgaagctgtgtaccctcattctggaacttgattaaagtaagatcgtccttgtactcagtttaggcttcttggcaacatacagaagatacacccttttcgtttggatggaaagtttctaagtttatccagaggtaaagcccattgtgtgtctgtgtcatgtaaaaatgttttcacccgagttgcatgtaacgctctgaggccagccagctgtcttctcctggatgagacagactccagagggtaaggagctagcgccatggtggcctgcagtatgcagagccccgcaggacccagcgtgggcgcccttccaagcttcctctagctttgggcctatgctgtcccctgcaggccctagggaagccacttgcaactatgcggccttcagacttcctcctcagccacctggccactgagacagcatagcctgggtaacggaacagccacctaaagcaagaatggaacggacacaccttgctcctttctgagcccgtttccaaaaccccccttccaggtgcttctaatgggtgttgccatagcagacgctgctaatgcatcacagcattctttgaaatggaaccagacacagcctgcctctcaatcctcagctggggggctcctagcagcctcttgtatttactcagagttgacacatcacacagatcctgtttggcatttcctacccttacggacgtctagggggtgacaggaccagggc

SEQ ID NO: 243511 - DNA, 1050 bp, Homo Sapiens
ttggctgtattaccacggctactaaaaattagtgtgtaaagaatgcattcttcattgtaaacttaaagtattttatgtacttctagaaatgacttaaatttgttttcatacattatgaaaacaactgcatactccttaattgctttaaacacccatccactgtatgtaattctaattaccttataacagtattaagacagcttgtttgtactgtgcaatttgaacaaggaatgcaatgttattttttacaaaaaacaaacttgtttatttttataataacgatgtatttgatgtggaccaaattcgtaccactatctaaaatagcctcttttctcatagtgcagttgtagtttagaaacaaaacttggtcctctctccttgctttttaaagtaaatggctagatttagttgtcttagccaggtttcctttgaagagaaactcaaaaccattttgaaactgcttagttcagaatacatcgaagtatttaaaattactgagttgggtaatttactatcatttactttttacattacaagtgcaataatatttcacaaaatgaaactcccgaatgggtggagtatgtgattattggtacctggtccttctggtgctatttttatttaagtctttgtttcaaaccacctttccctgaatcttaaagataatgttttgcatgtgagtacatgcagcccagcaagaaactaaactgaactctcttctcctatcctagtccattaaggagaagaaccagcattgcttttgtgtttggtgtgaatattcagtcaataaaaatgatttaccattataaagagctgtgatcttttcaagtatctgaaataaaacactgtgctgctgagttcatctcaaacattcttgaaagcagggcaccagtataagttaactgtattcctgtgggttaggccgtgaatgaatcatttcttttatacaataattcttttacactaatagaaatagaagccccccagccagagtttgggcaggtttacagaaaattggtaattatttgttaatacctaattttaaaaccc

SEQ ID NO: 243512 - DNA, 909 bp, Homo Sapiens
tcagggttctggaggccacggctgtgcttgtggtcaagacctggggaagccaccactgtgtcttccctctccatcctccggtgactttggtccaattcctgttgccatggcaatcagcccagctggcctcacagttcactggcctcaaagttggcatctgtaggtgaagccagtgggacccagagaacttaattcttctcaactgagctggcttggaggaacttttctcatcagccactggagcagagaacgtcaccagcgtctcactgacgtcaacatcctgggcctggctctagctgaaaaggaaaattctccccaaggcagacacatctcccgaagcccacacaggcactttctatgattgcactggaaatctgtctcctggggacagggagcgcgtacgctcacagtcaagtcacaatgttgagcagtctccaggactccacgttcatctctaagaacaggagccggtggttgggcgcagattcttgagccagattgctcgcgttcaaaacctggtccctttttattaattgcatgcttagttacattttctgtttgtacttttgtttccttctctgcaagacggggttaatcacagacacttgtacatgatgtaatacacttacaatacttaggacaggccttcctgcatagtaagtgctctgcaaacactggctactattctccctacgtgcaaacttctcccagccaaaagccgcccacaccaagcccctgtgcctttttccttccgcacccacgagcaggctgctcctggggccctggagctcactttcccagccgccctcaccacccaccgtggcgcagaagagcttccgaagtcctggcgtctcccactggtctgggcatctctcgcttcatcttccctcttggcccccacaacgccaa

SEQ ID NO: 243513 - DNA, 1192 bp, Homo Sapiens
  misc_feature (395)..(406): n is a, c, g, or t
gaaggtcgcattatggacagacttcgtgaatgggaatttgcttagaattgtgagtagttctgaattagaaaagtatgtgaaggaaaggcagctgtaaacgtattgtgccctggagagttgtacacatgttgaaatgtaatctgggcttacctgatccatttggagtggatgtcactgccgagtctgttctcacatggaaccatgtgtgtggggttgccagcctcacagatacaatcaatcctattcccctctgacataaggaactcctctggagtggcagagtcttatcacagaaggcagccaccatttcaccaaaacaaaagttcacggcattcaattcctttttcctttagctatttatatatgcagtactctcagtcatatgcagaaatacnnnnnnnnnnnnaattaatagttacaggcttgttggtccagtgggatttgggtagggggagaaagataccttctaaaatggatcaatagaaccaaaataatacagcatgttctataaccacaaggaaatcaaatgatcctgtcatgattccagttagtcataactatgttagcagtgctaaatgcattttagaaatggtgacttctgtggttttcctagcatttgtctctaacaaatggtgaaataattactcatggccctctctgccattgtctttcattttttcacagtgaaattagacccctttacttcaccattctgccactgcaaattaagtataaagaaaatagcaagagtgtccacaccagtagacagtaagcttctctacctgtaagtgatgaaatcatagctaatgcacttgccatggagttttcaagatgattggtgtcagacagttttcactttgtttaaaaagtgttggtggccttttgtggtggtgttacaatcctctgggggcttaggaggatgttgatgcaacttttagaagcttttaatttcaaaaacaactcaaaaatctgaaggacagtcatagctgccactcagccccagttagtcaaaccccagtgacctttgcccctggttgccaagggctttgcaacatcaagcacggaaataaggatctgtctgtttagtggataccgtgtatcctttaatagaccaggtaacagttcgtgttagtttagactatttgttttgtactgtactttcttgggtggcagaggaagaaaagtaaacatt

SEQ ID NO: 243514 - DNA, 512 bp, Homo Sapiens
cctataaaaaacaactttgtacaaaaaagttggctaggactccccggtcagagtcctggggtcaggccagggagagctcggggcaggccttccgccagcactcccactgcccccctgcccagtagcagccgcccacattgtgtcagcatccagggccagggcctggcctcacatccccctgctcctttctctagctggctccacgggagttcaggccccactccccctgaagctgcctctccagcacacacacataagcactgaaatcactttacctgcaggctccatgcacctcccttccctccctgaggcaggtgagaacccagagagaggggcctgcaggtgatcatgcagggctgggccaggtctccggggaggcaggggtcctgcaggtcctggtgggtcagcccaccacctgctcccagtgggagcttcccgggataaactgagcctgttcattctgatgtccatttgtcccaatagctctcctgccctccccttcccctttactc

SEQ ID NO: 243515 - DNA, 1252 bp, Homo Sapiens
  misc_feature (837)..(852): n is a, c, g, or t
tgagccatcgcgcctggcctcagttcttagtgttgaataagagtcacttttaattatttgacattgggaaaacagaggtgtagggaaacagacttcagaatcagaactgtgaaggtaagtattgggcatgatggaggctgtcttcctccccattccgccccatttgtgtgatctcttaatacctccctgaagtaattattctctttacccactaattggtgagcttctggagcaggctcgaggctttcaatctctagggcctagcactgtgccaaacacataaacactttgtgcgttaattggatagttataggacatacatttgatgtattactgaagcttatttttttctgcattaacatagggaagatcataccttaacgccacgtagctcacagttctttttgtatattttgctgttgattcttaccacataccatgaaatcctagttccatttatgggggaggacacttaaatgctttcctttggtcaaaataaggacttggacaagtctttggtaccccatgatgcacctgaggagagcattgccgtcagagtctgggctccagacagggtttgagctgagtcactatgcagaacagtccgcagtaaggcctaggtaccccagggatagatagagttgagcctgcctctcttgaaaggaatgctcttcagagacacagcagtcaggaggcacattcttgtgcctttcttaggctttttaaaatccctgatagtaaggttcttcacaatagacaatctttccttaattaaaaatacttgctctgctcgttaatttttctatggcatgcattttcaaattgggtccttttacnnnnnnnnnnnnnnnnaagtaatatgtttgttacgtttatagtttggagctgaatttcgtcggttttcgctggaaagatcaaaacctggaaaatttgaggagttttatggattactacaacatgttcataagatccccaatgttgacgttttggtaggctatgcagacatccatggagacttactacctataaataatgatgataattatcacaaagctgtttcaacggccaatccactgcttaggatatttatacaaaaagaagggtaagtatcactgtttagaaaaaattgtgtaagaaatagaaatagtgtattttccccactgaaaggatacccagactttgccacaacttagtgaataaacatttttgtgtgatcttcttatgttaactaacatgtgggttaaaacatttg

SEQ ID NO: 243516 - DNA, 592 bp, Homo Sapiens
gcacaaattccacaaagggggagaactgaggaactattcatattcttatttctgaatgattacttgttttcctagaaaactctgcattttgttgcaagtattctaacttattatcatacagttaacatgatatctgtttatctctaggtattccaaagaatttgtggaatttacttaatgctttttttaattgctcagacagaaaaggaaaatgagggcctaggggccatatccccttaaggatatgttttctttggcccataccaaaagtttttctaaatctgaataagctgtcacatttaagcatcaaaatctggatttgactctgttctgataggaagacatctgaggcacaaacttgcatttagttttggctacatcccttgtgttccatatacagtaatacataatagttggcttacacatcaagtgtttctaagaccctcacatgtaatccacaagaatcccaagtgcagcgtgcttctattaccatttcacaaaggagaaagctgaacgtgcagggaagtcactggctcaagagctcaaacttataaacacatggcctatccattttcctgtatttgtaattagc

SEQ ID NO: 243517 - DNA, 337 bp, Homo Sapiens
ttgggcctttattcgtagtgatcaacttactttacatcagagaaatcatattagtgaggaagtcctatgcataatgtaaagagaatacgatggcctttagaaaatgccctttagcagagaatttgtaatttaagaaattttctgtttgttacggaacatgtgggaatcccttttacttcatgctcacaatttatcagaaattatttcgtatgttggaaagagtcgaaagactatagcatcactcagtccctgttagactttagaagattgatactgatgcactgcatcccaaaccatcaagggccttttcccctacaaactgttgttgaacagtgct

SEQ ID NO: 243518 - DNA, 1402 bp, Homo Sapiens
gtaaagacactaaaaatggcactaaaacgataaagacactttaataatttattttctttataatgatcccactctattgttctctaatccatcattgtctatgattcggttactgaataggttggatgccaatatgactaaaactttttcatgctaaattaaccttagttatatctggtagatccagatcataatctcaaacttcctcatatttagagaaaatagtaaaatattttgcaaggttacctaaccttttccactctaccttctctcgtattctctagtgtttaggaaattggaacatctttgattttccaagagtttgacatatggagactcttcagtttatataaactttaattcattttaaatcctaaattatgatacaatctcactgctacaagacttccactgtatctgctatgctggcaacaatattaatatttcatggaaatcgaaggataatcaaagatccagctacaagtaaaaggacagcagagctgaggaacactagagtgggcagagtacaactgcagcgtgtagctgggggaattactgctaaagtgctggggaagagtgcccacagagacaacacggtacaccttgagggaactttgcatgttaaaagtagcttcctttttttctcagtttgctaaagagatcacctatggacacaagcaaatttagaattggagaatgtttttatcaacttgaaaagtaaacagcttataaataaatactggacaagggcaaccctgttacagactaacagtaagttccaaatgaaccttcaaaaccataatttgacaaaaatgcaaactaaacaacaatgaacacataatccaatttcaaaactatatacaaactcaaacattttaaattgaaaaggacataaggcaacaaaataagacatcccaaacaccaaagaaaaaaactgaagataaatggaaacctaatggcacaaatgcctccagaaaacaatgtgttgtcaacaatctataggagaaaaactttcaggagattgtggttcagattttcaaatgtttttgggtaaagtgacctgagactgattcttgagcctattataattttaagatatctggacatgcccttcaaatgacatcatgagatgagtaaatagaaaatcttgtctccttcctgcctttcagtgcaccaacagcaaagcacactcatggacacaggccgctttctagtaacactgaaggcaaaggagctgactggtgtaagaggaggtgcggtacttctgtttcctttacatatgttttggctcaagtcaaaaagccattaattaatgaaataaaggattcctcatgttacatgctggaggccacatactgtgaacactgaatctacgagcattactttcaaagcctatagccaa

SEQ ID NO: 243519 - DNA, 957 bp, Homo Sapiens
gtagctataatttattcatctttatacataaaacatgtacaattttaatagttgtatatgatacaaaatttgaacatttaaggatatgttacaccacattaagtttaacccacatttatgtcttggatgatagatgcaagaattccaactgaggcgattttatgaaccagctaaatgatttgtattcagaacagcattaaaaatccccatgacaaagtgtacttgaacaaaaataccctgcttgtgacacatcctttacaagtaatgtgttttcatttttcacatgttgcatctcatttattttattcaggcacacatacctaaatcggcaagatactgcaagcttccaatacctttgaaataataaatcacttcttgcagatgttttcacccgctgcaaggctgccgttcattaatcaaacattatcattttctatcagtgcccagtgttaaacagaaaaggcacttcattttgagttctgactttcattcactggttacaccctgaccccacaaaacttactgcttccattctggaaatgtgaaacctcctacagcgtaatagattttgcagcaaaaaatcctaaatggtattatattttctgaattcaatatgctttatcaggagctaaatcaaaccagattttaaaaatgccaaataaatgcagtcataataggcatttaaaattaggtacacaataataataaatttataacataagctctttttctatgaatatatttaatatctaacacatcaaattgctagaacaaagattcagagatatattttttaatttagcttaagctattaaaatcatttcagaagccaaagaaaggcaatttatctacctactataatttttaagcccacaaaaagaaaatggaacaaagtgagagacaactgtaaaatctttctcattttttttattctctaagtaaataaataatagccaa

SEQ ID NO: 243520 - DNA, 1711 bp, Homo Sapiens
ggaaactgtgacatatttcagaaaagttgctaaagggaataaggtgagtttaaatataggttaagaagtctattctgtgcaagtcatagcttacctaaggggagggggaaaaatctggaaatgggaggtttagtggtaagaaaacaagtatgtacacaaccaaatccattaatccccaaacacccaagaggccctagcaggcaggatgcacatacacaggaaactcttaaatcttcttttttctttttaaaggagtcctggctaaaagtgcctttatgagtatgtgtgtacacaaacacagccccagaggttttccaagtgtactaaaactcgagattttaagtctttcctcgcatgacagccataggtgaggaaccaggaaacatactaacactaagcaggagtcacgtggccaggccagaacagaaagcagagcatggaagaaacctaaatgcagttaagaagttttacccaaaagggtctattaagccacctgtcacatggccaccaaacaaagttcctactatactcagcacctgttccaatgctgcaatacccatctgcgggtggtggtatggtcagtctgagcatattaaacagaattaatagccaaagggaaaatgaggaattagaatttctcctaatgcccaaactggcaacacagcctacgcacaaatgtttaccttttatataactacttctgtaaagtggccttataaaacctagaggagacatctacgtcctccctgatccttgtacacaccgaaatgacactattttcagcttgggtcctcagaatctatatggcctaagccttcctggcctgtctaaacacctatgcaggctggtatttgtcccattttctctaagggaaaactgaagccctcagtgcactcaattacataccattagggcttctgaatctttgaattcgatccaaattgaagagaaagctcagttttcaatggataacgaggacaggaatgacgtgagaatgactatatttcaagtaggataatgtcctaaaataaatgagataactgacatagttgagaactacaaaaagttgaagacacaggttgcagaggataacttgtacaccaagagaagcaagccacagcactgaattcttaaatctccatggctacattttggtgccaatgttggaatgcaggcagaaatcagagattccttcaagtgggccaattagccttcaggccccagaactgggtcttacgccgagaaaagatggacaaagaaggctactgttctattgctgcctctggacaaaatgtacctttcactctcagggaacagctgtcatcatagaatataaatatgattcatttctaactaaaaggttgctataaatgaggaccatgtaccatcttcccaacatgaaacttcctaagccataacttggtcactacagatggaattaagagtccttagggtgagaatgtaagaaattgacattcttggggtgcctgattcagttctttcagactattattcagatgcaataaccactatatcaaacgggtgaccaggaaaagtgaggaagtagaaaacctgcctcagagttaatttttcccatcttgtcatgggcctacacaagtcaaatgactgttttctaggcaatattgttacagcattttcaaagttaccaaaagagagttatcctcataatgggagaaatagtctcatctta

SEQ ID NO: 243521 - DNA, 1293 bp, Homo Sapiens
ttggcactgggtccagagtgagcattctcttggactattagatgtatatacttttgaatacatcactgttggatagatgttttaacagttttttctggtttaaaaaccaaattgtaaatggagtgtgtacttgtagagagtgacaaggtattgtttgtttccctatgtgctgtttgagcagtattttaaccaacttgtattacagatgttacagttccatgttaggaagtcagaaaagacttgtgtttgtctttgttctgctgatgtggagtcatgttttgtggggtcttccatggcacatttacctgttgctccgtccagatgttgagggccagtctaggctgacacatcctacccgaggacaagcctgttctccatttcttcactctcccctccccatatagcaactctcccaggtttagattaccgttttcgacgacagattaaccaaaaatgccccacacaggttttattactgttatatactatacttttaacagtacagaccctaaattttattatttgttgctcccccaatctgataccaaatgtttaaagttgtttgaaatccaaacatggtagtgttcatgggtacatattttctaggctatgtaagagttagcagcccatagcatagaagtaatcaagtagcatctgagactgttggaggcactagggcctctctgggccctacagcctcacttccccagcctcaccttgctgtcctctgacactgccatcagggctgttagtggcacctgtatgaggccaagtgtgcgtccaggggaacagcacaggttaatgcgtctccctagaactcatgaagtcagtttaattcatgcatgaacatgagttcattttatgttttatatagctttcttagacataccaaaccatcatgcataaatcagataaattattcagtttttgtgtttagaaagctaagtatgtgtagctggaaacaaaaatgagcgtgttttctctcctgttaatctagagtgtgcagttacacatgtgtggataatttcatgttccaggggcgcttggcatctcccatggactgattcccaggaagaaaagcccaaagggaaacccacgattcctttcgagtagatgtgggaaagagcccattggaggatatgaggtcctgtgaattcagttgtgtgtgtggctccttgttagcagtcatgttgacatggtgttaggaggctccccatccaccctttacatgatgtagggaccagttgtcttgtgagattaacctgggacacagtgggttagcctggaaaaaat

SEQ ID NO: 243522 - DNA, 984 bp, Homo Sapiens
ttggcgtcggcgtcatggtttcgcgcgtgcagctcccgcctgagatccagctggctcagcgcctggcggggaatgagcaggtgacccgggaccgggcggtgaggaagctccggaaatacatcgtcgccagggctcagcgggccgcaggtggttttacgcacgacgagctgctgaaggtgtggaaaggactgttttattgcatgtggatgcaggacaagccactcctccaggaagaattaggaaggactatttcccagctcgttcatgcttttcagaccacggaggcgcagcacctgttccttcaggccttctggcagaccatgaatcgcgagtggacgggcattgacaggctgcgcctggataaattctacatgctcatgcggatggtcctgaacgagtccttgaaggttctgaagatgcaaggctgggaagaaagacagatcgaggagctgctagagctgctgatgactgagatcctgcaccccagcagccaggcccccaacggtgtgaagagccacttcatcgagatcttcctggaggagctgaccaaagtgggcgccgaggagcttacggcagaccagaacctgaagttcatcgaccccttctgcagaatcgctgcccggaccaaggattccttggttttgaacaacatcactcgaggcatctttgagacgattgtggagcaggccccgcttgccattgaagacctcctgaatgaactggacacacaggatgaggaggtggcgtcggacagtgatgagtcctctgagggtggtgagcgtggagacgcgctgtcccagaagaggtctgagaagccgcccgcaactccatctgcagggctgaacctgaggctggtgaggagcaggcagtgacgacagggacagtggcggccccgttctccagtttgactacgaggcagttgctaacagactgtttgaaatggccagccgccagagcaccccttctcagaacagaaagcgtctc

SEQ ID NO: 243523 - DNA, 599 bp, Homo Sapiens
aaacagatactaaccacttcactccttaaccaaataaagaaccttctatatgcaaggcacaatttgaacatgataatgaaattaaccaactctatactcatttcttttctctgatcatagttttaattcttcctaacaaaggaaaatgtttccttacaaggtaacatgcagctacctactggtatctccatttcaatgactgatggggcatctcaaacctactgtgtcacaaactgaacacagtacctgtcctttccccctaatctgtcaatccttttcctccaaattgcttctctgtggtggtagcaacatatccaccaagtctcccaaagcagaaacttattttctgcttcatccttagtggctactcagtcaccaaatgctgtgaattttatttcctaaaatgtctatttctaaatatctctaaaatcttcaaatccctgccattatcactaccactgccctaacaatatagtctcgtttctctgccagcctttactaatagacctcatcttttcccccatggacttacccttccctctctagtcattctctgtgctgtttaggacagtcattgccaacttttttgtacaaagttg

SEQ ID NO: 243524 - DNA, 1433 bp, Homo Sapiens
  misc_feature (612)..(621): n is a, c, g, or t
tctttttaatatgtgaagagcctataaaaataacagtttgatttaatttcatataaaagaatcaatggatacctcctttaactgaagaataagcaccaaaagcatgtgtgtgttttcttcagttgaattacatcactctataaacctagagtaagaaaatgcactttaactaagcaccaaagcctctcggacaaatgggatctagggaatggttctatgagttttccaggcagctaactgggagctaataagtcctgagggtcaaagagggtcctttaaaactctgaaggctcaaagaaaaggaagccaaataagaacatttgtattacatcaaatggctaggatgtaacaagctactccttattcagcaatttcaaagtccattaattcctcacagaagaagaaacacttcgttattatcacttgcaacgatttgcttatgtgaacatggcattctcttgttcaaaaggtcaaagactcgtgcttaagggaggaacaactggagtgaaataacaactctaccatgaattcagatatcactggctaaaaagtctagttacacaagaacatgggaaagaaaaagaatccaagacatcagtataataatgattnnnnnnnnnnccctgccatatttccatgttataataaaacaaaatcataaaaactgcaatatttacagatacatcaatcttacaacatataaaaactttaacaataagaaaaattaagagtagggaaagcagataattttaaggtaatcattaatacattaaaaaatctatttggagttaactgtttacactaacaccactttacacataatagaaatatgaatattttcattgtttttgttttcagtagcaagatgcagaagaaacaaataactgtctaacattaacttattgtaaggagttgtattactgcaaaattactaggtgtaaagttatggtataagcctactcaaaaaatgggttaatataattcaccatctacttaaaatattactaacaagatattggtgaatcatgtgctaaagatactgaaggcccttccaaaactgagatctatgtttgttcaatataccaggtcatataaaactagactagtttactttcttattccaactgttttatgagtgatcttatcataagaaaagtacacattacctctcttaattcccttgcatcatcagatatagatactatttgggacaaaaaataaatgttttattaggagtgtaaaattaagaatctttatagatcttttggaaacagtatattgaaaaggactcaataagtactaagccactgtataaccagaacaataaacaaattcattcaactaggaacagtgttactgttatctactgggtttttaaaacttgtaactttgctctacagctatgaaagtttccaacttttttgtacaaagtt

SEQ ID NO: 243525 - DNA, 809 bp, Homo Sapiens
tcagcaagtttttattatgcaccctgtgggtttgtgacgatgccaagggatcagaggaacaaagagagaggatgttgctcagatgggggtctcaacctccagagcaaggtggacacaaagctccagccagctgcccagcccctggggtgggagggaaggatcgaggggtagctgttgtcagataaggccaaaggtatcagtggccaaaagggagacaaagatctcctgggtgcagcctcctccaccactgtggtgaagggtgttgggctggagggttggccgacctctcctgagagcacgttccccctgctgctcctgctgcatggcatcaacctgggtttcagttacattacccaggaggatttccaaatccagaggcaatgtggccttccatttcctgaggtgccttggttggctctggatcagtggtggggactcaagagacagcctccctgtggcttccagcccctcacattccctttgtcgctttctccttcatgatgtggttttacacagaaaaacactctggtaagtagaacagtgttcttctcttgagtcagacgtctgaagcaggaaggtgaataaccttcccaagaccttagagctacagagagaatcctcagcacaggtaggagcacacaggtaggtggggtaaacgtgtacagagagcctggcttctacttggaattttcccctcccttggccttaaaaatcggatttctcccttttccagctatgttgatacaagagacaaactatttagaaagtaaaagcctcaaccgtttattttgccaacttttttgtacaaa

SEQ ID NO: 243526 - DNA, 1639 bp, Homo Sapiens
ttggcgacagagcaaattggccgcagcgaagaaaaagttgagagaatatcagcagaggaatagccctggtgttcctacaggagcgaaaaagaagaagaaaataaaaaatggcagtaaccctgagacaaccacttctggtggttgccactcacctgaggatattcaggacattctgaaggtgctggtgtccgaccttaaccgttccaatggggtagcgctccccccattggacaagtggaagacacccaaggacaatgctgctactctacaaccatctgatgacaccgtgttacctggcggtgtcccttcccctggtgccagtctcactagcatggcggcatctcagaatcatgatgctgacaatgtccctaatctcatggatgaaaccaagactctctctgctgtctccacgcagcagaagaaggcagacaggtacaacaaggagttaaccaaagagagagacgccctcaggctggagttatacaagaacacccaaagcaatgaggacctgaagcaagagaaatcagaattggaagagaagcttcgggtcctagtgactgagaaggctggcatgcagcttaacttggaagaattgcaaaagaagttagagatgacggaactcctgcttcaacagttttcaagccggtgtgaagcccctgatgctaaccagcagttacagcaggccatggaggagcgggcacagctggaagcacacctggggcacgtaatggagtcggttagacaactacaaatggagagagataaatatgcggagaatctcaaaggagagagcgccatgtggcggcagaggatgcagcagatgtcagagcaggtgcacacattgagagaggagaaggaatgtagcatgagtcgggtacaggagctggagacgagcttggctgaactgaggaaccagatggctgaacccccgcccccagagcccccagcagggccctccgaggtggagcagcagctacaagcggaggctgagcacctgcggaaggagctggagggtctggcaggacagcttcaagcccaggtgcaagacaatgagggcttgagtcgcctgaaccgggagcaggaggagaggctgctggagctggagcgggcggccgagctctggggggagcaggcggaggcgcgcaggcaaatcctggagaccatgcagaacgaccgcactaccatcagccgcgcactctcccagaaccgggagctcaaggagcagctggctgagctgcagagcggatttgtaaagctgactaatgagaacatggagatcaccagcgcactgcagtcggagcagcacgtcaagagggagctgggaaagaagctgggcgagctgcaggagaagctgagcgagctgaaggaaacggtggagctgaagagccaagaggctcaaagtctgcagcagcagcgagaccagtacctgggacacctgcagcagtatgtggccgcctatcagcagctgacctctgagaaggaggtgctgcataatcagctactgctgcagacccagctcgtggaccagctgcagcagcagaagctcagggcaaagcggtggccgagatggcccgccaagagttgcagaaacccaggagcgcctggaagctgccactcagcagaatcagcagctacgggc

SEQ ID NO: 243527 - DNA, 1615 bp, Homo Sapiens
ttggagatccccagccctgtgagcctgtaggagtagaatggctccccaaatgtatgagttccatctgccattatccccagaggagttgttgaaaagtggaggggtgaatcagtatgttgtgcaagaggtactgtccatcaaacatcttccaccacagcttagagcttttcaggctgcctttcgagctcaggggcccctggctatgctgcagcactttgatactatctacagcattttgcatcactttcgaagtatagatcctggcctcaaagaagatactctggaattcctgataaaagtggtatcccgccactcccaggagcttccagctatcctggatgatacaactttgagtggatcagatagaaacgcccatctaaatgccctcaaaatgaactgttatgctctgatacgtctcctggaatcctttgagaccatggccagccagacaaaccttgtggacctggaccttggtgggaagggtaagaaagctcggaccaaggcagcccatggctttgactgggaagaagagaggcaaccaattcttcagcttttaacacagctacttcagttggacatccgtcacctgtggaaccactcaataattgaagaagaatttgtcagtttggttactggctgttgctaccgccttctggagaatcccaccattaatcaccagaagaaccgccccactcgggaagccataacacacctgcttggtgtagccttgacccgttataaccatatgctcagtgctacagtgaagatcatccagatgctgcagcactttgaacacctggcacctgtactggttgcagccgtgagtctatgggcaactgactatggaatgaagagcatagtgggagagattgtaagagagattggacaaaagtgtccccaagagctgagtcgagacccttcagggacaaagggctttgcagcattcctgacagaactagcagaacgtgtcccagctatcctgatgtccagcatgtgcattttgctagatcacctggatggagaaaattacatgatgcgtaatgctgtgctggcagccatggcggagatggtgctgcaggttctcagtggcgatcaactggaagcagcagcccgagacaccagagaccagttcttggatactttacaagcccatggccatgatgtcaactcctttgtgcggagccgtgttttgcagctcttcacccgaattgtccagcagaaggctctccccctgacacgtttccaggcagtggtggctttagctgtgggacgtctggcagacaagtcagtgctagtatgtaaaaatgccatccagctgctggccagttttctagccaataatcctttctcctgcaagcttagtgatgctgaccttgccggaccactgcagaaggagacccagaaattacaagagatgagggcccagaggcgaactgcagcagcttctgcagtgctggacccagaggaggagtgggaagccatgctgccagagttgaagtctaccctgcagcagcttctacagcttccccagggagaggaggagattcctgagcaaattgccaatacagagacaactgaagatgtgaaaggacgcatctatcaactgcttgccaaa

SEQ ID NO: 243528 - DNA, 1451 bp, Homo Sapiens
  misc_feature (154)..(203): n is a, c, g, or t
  misc_feature (205)..(303): n is a, c, g, or t
  misc_feature (381)..(509): n is a, c, g, or t
ttggcagcctctttagatcaacttcgtctgcattttttattctttctgtaggataaattccccgagaaggaattatttactggattaaaaatacagtatttttcaaaggctttgttgtatattgccaaatttatttccagaaaagttatctagnnnnnnnnnnnnnnnnnnnnnnnnnnnnnnnnnnnnnnnnnnnnnnnnnnannnnnnnnnnnnnnnnnnnnnnnnnnnnnnnnnnnnnnnnnnnnnnnnnnnnnnnnnnnnnnnnnnnnnnnnnnnnnnnnnnnnnnnnnnnnnnnnnnntgagccactgctcccagcctactttatattttcattagctggaaatggaggttcccagaaacatcaagatttgtgacnnnnnnnnnnnnnnnnnnnnnnnnnnnnnnnnnnnnnnnnnnnnnnnnnnnnnnnnnnnnnnnnnnnnnnnnnnnnnnnnnnnnnnnnnnnnnnnnnnnnnnnnnnnnnnnnnnnnnnnnnnnnnnnnntgaaggctgggattaggtgtgagccaccgcacctggccgatattttctttaatgaaatttataaatatgcttcttgaataatacacattttgggaaagggaaaaatgtctgttcaaaaagtaaaggtctcttttatagcttttccaaacttaattgctaaatttttctttgaggttctcctgaattatgtcttacaaactaaaagcaaaaatttttagcagaaattttggaatacattctatctagcacaatttgaatttttaattatcaagatttttgttaaagtttctctcctttaaaaattttagtacatttgtaaatagtccatggttctcagtgttttattttgattaagtgactacccaacttttggtgatatgcagtgaaagaatcccaattttctatgttacatttaatcaaatactgacataatgaatttatctttcctgacacattttcattcattggctttttaatttcttattttattaacaaaatatatcagatatattaccaaaacacatggagttccatacataatatggaatttgatgtcttttcaagttgcacaaagaatttgagcatatataattttaccaaagcataatggaccttagattatagaatacagcattgttaggtctgcagtgggcagtttctttttgttttgctttgtcaaaaatgggaaattgttaactgtgatgaaatgtgagaattacatagattatgttattttttagttgttttccaaatgcagagtttaaggactttctaacatggctagtattacttccaaaaagtataacaagcagcagtcacacatgacctagagggttttttattgttttattttattatgcattccataacagttttaaaatgggattttgagaatggacttaactttcctggaatccaatgctcctggagatttatgacttt

SEQ ID NO: 243529 - DNA, 1300 bp, Homo Sapiens
  misc_feature (957)..(1047): n is a, c, g, or t
ttggagatgaaaaagaaattgctgcgttctgcgctcatgtgtcggaactagatctttctgacaacaaactcgaagactggcatgagtttggaggagctcttcctgtgccttaatgactatgaaacagtgtcttgtccttctatttgctgtcattctcttaagctactacatataacagacaataacctccaagactggactgaaatacgaaagttaggagttatgtttccttcactggataccctcgtcctggccaacaatcatttgaatgctattgaggagcctgatgattcattggccaggttgtttcctaatcttcgatccatcagcctccacaagtcaggtttgcagtcctgggaagacattgataaactaaattcatttcccaaactggaagaagtgagattgttaggaattcctcttctgcagccatataccaccgaggagcgaaggaaattggtaatagccagattgccatcagtttccaaacttaatggcagcgttgttactgatggtgaacgagaagattctgagagattttttattcgttactatgtggatgttccacaggaagaagtgccattcaggtatcatgaactgatcactaaatatgggaagttggagcctttggcagaagtggacctaagaccccagagcagtgcaaaagtagaagtccactttaacgatcaggtggaagaaatgagcattcgtctggaccaaacagtggcagaactaaagaaacagttaaaaactctagtacaattacccacaagcaacatgcttctctactattttgaccatgaagcaccctttggcccagaggaaatgaagtacagctctcgggcattgcattcctttggcattagggatggagataaaatttacgtggaatccaaaacaaaataacctctaccagccttgtgaaaaacatacacataaggacttgttgcagggcannnnnnnnnnnnnnnnnnnnnnnnnnnnnnnnnnnnnnnnnnnnnnnnnnnnnnnnnnnnnnnnnnnnnnnnnnnnnnnnnnnnnnnnnnnccccctggagtgagtaggggccatttttgggtgttttctaccacagattgatttggctcagccagcggaattggccacatttccagtgtatgtgccctctctaaggaaagatgacaaagaaatcaccgacttcttactgtgttcactgggatttgcctgccacttggttatcattactgttgggtgaacctgtgaagataacatgaacactgtagccccttagaaggtctcatagagaatttaaacagggtga

SEQ ID NO: 243530 - DNA, 958 bp, Homo Sapiens
ttggcgttttgtcaattgagagtgctgaagagatacgagaatatgttactgatctcctccagggaaatgaaggcaaaaaaggtcaattcatagaagaacttataaccaaatggcaaaagaatgatcaggagttgatttcggatcctttgcagcagtgcttcaaaaaagatgaaattttagatgggcagaaatcaggcgaccatctaaagcggggtaggaagaaagggagaaacagacaggaagttcctgcatttactgaacctgacacgactgcagaggttaaaacaccttttgatttggccaaggcacaagagaacagcaactccgtaaagaagaagacaaagtttgtcaatttatacacaagagagggacaggacaggcttgcagtcctgctccctggtcgtcacccttgtgattgcctgggccagaagcacaagctcatcaataactgtctgatctgtgggcgcattgtctgtgaacaagaaggctcaggcccttgcttattctgtggcactctggtgtgtactcatgaggaacaagatattttacagcgtgactcaaacaagagccagaaactgctaaagaaactcatgtcaggagtggagaattctggaaaggtggacatctctaccaaggaccttcttcctcatcaagaattgcgaattaagtctggtctggagaaggctatcaagcataaagacaaactgttagagtttgacagaactagtattcgaaggacccaagtcattgatgatgagtcagattactttgccagtgattctaaccaatggttgtccaaacttgagcgggaaaccttgcagaagcgagaggaggagctgagagaacttcgacacggcctctcgactttctaagaggtcaccattgactttgcacgaagaagatcctggaagaggaaaattcactagcagagtatcatagcagactagatgagacaata

SEQ ID NO: 243531 - DNA, 1132 bp, Homo Sapiens
ttggcagcattgcgggagcgcctgcaccgctggcaacagatcgagatcctctgtggcttccagattgtcaacaaccctggcatccactcactggtggctgccctcaacatagaccccagctggatgggcagtacacgccccaaccctgctcacttcatcatgactgacgacgtggatgacatggatgaggagattgtgtctcccttgtccatgcagtcccctagcctgcagagcagtgttcggcagcgcctgacggagccacagcatggcctgggatctcagagggatttgacccattccgattcggagtcctccctccacatgagtgaccgccagcgtgtggcccccaaacctcctcagatgagccgtgctgcagacgaggctctcaatgccatgacttccaatggcagccaccggctgatcgagggggtccacccagggtctctggtggagaaactgcctgacagccctgccctggccaagaaggcattactggcgctgaaccatgggctggacaaggcccacagcctgatggagctgagcccctcagccccacctggtggctctccacatttggattcttcccgttctcacagccccagctccccagacccagacacaccatctccagttggggacagccgagccctgcaagccagccgaaacacacgcattccccacctggctggcaagaaggctgtggctgaggaggataatggctctattggcgaggaaacagactccagcccaggccggaagaagtttcccctcaaaatctttaagaagcctcttaagaagtaggcaggatggggtggcagtaaagggacagcttgtccttccctgggtgttctgtctctccttccctcccttccttcaagataactggccccaagagtggggcatgggaaaggctggtccggggtctgggcactgtacatacctgccccctacatccttggggtccttcattattatttattaactgacaccatggcctgcctgccctgccttccgtcccaaccatgggctgctgctgtcactccctctcacttcagtgcatgccttaaggctggttcctcagctccacctccacttctggggttcaacttctagtctcaggccgtccctattt

SEQ ID NO: 243532 - DNA, 1295 bp, Homo Sapiens
tttccgtgcaagtggccttttatccatcatgtacactgaaggccagctttcccctgaagccatccctccccttcacctccgaaaggggacagggcagggtcatttctcagcctcgttctccacgttgcccccaaactccagctcctccaccatctctccatgcttctcctctctcaaagccatcttctttcaccactccctcctctcaccattcatgtcttctctgacatacgggactccacaaacagtggacacttttagaaccaggctaacaatcttattttcctcaccgccctctccttctgtcctcaggaatgtcaaaacaccatggcaatatgcttccaatgataaggcctcttgagatttccatcctgttgcctctaagaatgttcacaaactccactcacggcggctctcaaggggtgtagtgaggcacagattcagcattttccactagtgtcttctaccgtgcttcttggttatcagctgggcacatggcttcccagaaggaaatctgcatttcccagaccctcttggagctgtgaggctacaggcagtagtctggtcaatgagatgcaggtgaaagtgatgggtgtccttacaggaaagacttgtcttttccatctttctgctgcctgggaggtcgatgagatgccaatgtgggtgatggcatgctggaatgaaagccaagccggccagacagccagaaagaagaactcgggttcttgaccctatggaaagccatgcctggaccacctagctgtggacttttaagtggtagcttttaagcttctagtttgtttgcttctttccattttgctataatcctttgttattttggttgttcaacgttcattgccaaacttgatcatcacttgttccctttccagatcttagaaaactccttcaatgacccctcttttgatgtttacatgtacttactgttacagaaaacggttcattatcctcattttgaccttaatcttgtctacctctctctgttcccaagaccccagagccaccttggggctcagctatctgcttgcctattatggaccccatgtttggcctctcagcatgattccagctcctttgagggcttggcctgtggtctgtataccctcatgggcccttctgcttccgcagatacactcgccattggcctttcccacctttgctctgggggcgccagtctttggtggagtaaattgtacagccaggcaaatggtcccactgcaagtctacaccagtttcacctcaaccagtgcctctctctaatgagcaatgattcccaa

SEQ ID NO: 243533 - DNA, 918 bp, Homo Sapiens
tttctggagaggatctttcatatgcgataaggtgaggttacatgagataacatacatcaaaagcccagcatgtagtaagcacttaacagatattagttctctttctgtgtgccagatgaagacactctcatcttcttccccgcaaactctcttttcaaaaacaaagcttagtgcccagtgcagagaaatgcaaaatgaaacagaactcactgaaagcagaagagcacagctactgaaacaggactgttcaaacacttactctgcataaagaaagctggtaagatggcatttcattaaacacatcttcatttaggtaagctgacatgcatgccaaagctatttgattatagaaattataaaaatactttaaaaatgcatttgtagaataacaaaaatacttaaattttttctaaacttttcacttaatctaaaattatgaattgcccatttcttttgctgttggttaaaacctgggtcactcacctctccctcaaacattttggatgaaattctaacatctattgtcttcttcctacccttttataaagcgttctggatttaatttcttcttttaaaaaaactcagggtcaccattataggaagtagtctacgggccatactgttgtacacacattttctgggtcaactagagtatcctttggtaagtagacagtcccagatttgctatgtcttgaagttttattcttctcatctcactatctagttttcagttggcctttttcttctttcagtatgcctgccttcaatctagcagcctctttctttgccattcttttgtgagcttcaaagccagctaataaaacatgttggaagcgtatgcaaatttcagttcagagtctaagagtgatattcttgaagatctctcccataagtaagttgcaagaaactttgtgccaa

SEQ ID NO: 243534 - DNA, 906 bp, Homo Sapiens
ttcctgggggtcaagaacatcccacagtgactgagaatcccttgaggagaactcattgctgacatggcagacgtagatgccgctgtgctcagtggtcagtgggggaaagcccaaagtgtccccatccactcgtaccccactgggcagaggcccatccagcctggaagacagggaagctgaagggtgccagccgggaagggctgaagccaccaccacccaacgtgtccagacagctctccaccctccacccccatgacgtcacccagagccgcaggctgttcccacggtgcccctccctccaccaggcaggtctaggcagaggtcctttctccctgctgcccagcctgacctgggcaccccccacacacacccggggaagatccacacgtgtgccatcccacatgcttccacaggcatcacgtcatccaacactgggtaccaggtacacgttataaagtccacacaacaggacactccactcctagctgggtgtagaggtaattggaaaatgtgactgcctgctccaacacccgtgatgttgcatggcaggatacacaaacatagccccaggcacaaggccacatgcatcgctcatatgctcacatgtgagaacatgcccatgatgtgctcacacacatgtgtacccaacctctccctgactctctagatatttcagatcttggaaaaaggccaaggatgccttgagggaactggaggtagtgggtgtttttgaggtgctagcaatattgtggtggttataggagtgttggcttaacaacaattagaaaaagacacagctgtcttgtccattttatgcactcacataaatatataaaatattaatatcgaaatattgtgttatatttcacaatttaaaagttagacaaggccgggcatggtggctca

SEQ ID NO: 243535 - DNA, 1386 bp, Homo Sapiens
  misc_feature (261)..(273): n is a, c, g, or t
  misc_feature (455)..(594): n is a, c, g, or t
  misc_feature (837)..(849): n is a, c, g, or t
ttggataaattattatcttcaatgaaacaagctctaaaagcattccattcctaaattgtatttcaaacttcctattttgttgatatttcttaacttctggccagttttggaccataatcttttaatgtgaaccaaagatggtacgtatttgaccaaagcagttagttttaaatgtataaaattgaaccaaatggaaaaaataggttggggatgcagtatagattagtgactaagtgcataggctctggagtaaatctgagnnnnnnnnnnnnnaaaggaactaaaaaatgtactgcattttctttgtggaataaaagccttgcctgagttgtgctattttcataaggcttttgaagtggtcttgacccactgtgtgtaacagtatttcaggtggtcctccccatggctgaataatgccatccattattctttaatttttatttttagaaacagtnnnnnnnnnnnnnnnnnnnnnnnnnnnnnnnnnnnnnnnnnnnnnnnnnnnnnnnnnnnnnnnnnnnnnnnnnnnnnnnnnnnnnnnnnnnnnnnnnnnnnnnnnnnnnnnnnnnnnnnnnnnnnnnnnnnnnnnnnnnncaccatctattacttttgaaatcttcaaaagacttgcttactcaatgtcagctgatggttggtaaaaataatttggcctttagtgttaagtgagacatcataagggtattgaggtatacattatggagattgatgtcaggtcagaatattggagttatacatctatttctgagttgaatactcagctcccacgagaaagaaagtagttttaaggtccagcttcttagtctacttgaagcaaannnnnnnnnnnnnatatttctgaatataaatatactcttatatgggctaaaaagaccccatgaataaatagcaggttcagtagttgaggagtggagtttagtaggtttgttttcagtataaattagataacatgtggaggtcacagcattttggaaattgagtgtccccaagtgagctttgtttataaactttcaaaatgtcggaagtggacaggtttgttaaatcttgtctgccagcacccttttcttcctttgttccttttcctctctgtgttattgcctgcggcagccagtccttcatactagatagagttcagataaagcaaacgtttggcaaaaacatactgtttgacctcctccccctctgcttatgaaggggtagcatgattctgtgttttaaagcagtgatgtttcagctgtgaaatgcactcgctgtaagctctaggctgagtgcatggaaactgttacgcttctcattttatgtgatctcctaattggtatgtagcaaaaattttctaaaactgttttgtgggcttgttttgtaataaaa

SEQ ID NO: 243536 - DNA, 1459 bp, Homo Sapiens
  misc_feature (434)..(450): n is a, c, g, or t
gggaggttgtttaaaccttaaacatttagaaatactctgtaaattaaactaggaaagtgttgaaagacaactgtgtggccttatgctgcagcttttttgagatggcatttagttttactttttagattgcctgtggtcttggaggtgcaagagggaaattagacaaatttacagccctttcaaactcagtaaatgatggctaatgttattgaaataagttactagaatattgtaacatttgcaatcaaatataagtatcaaagaatttaatatcttaatcatttgctaccttgaatatcttggccactgtttcctctcagttatttatttgttccaatgtttatggtttactgaatattcatgtgttttacttgctattatacaattttatttcttgattgagttttgttatgtactcaagaatcagtctaggnnnnnnnnnnnnnnnnnattacatatagtattgatttttaatgtatatttctaagtttgtagtttttataaaacataaaataaatacttgtgaaatctattaacttttaatacacaactttcatagaaatgtgatttggatatttgagagacaaatatagtgaattagttaagagcactatattgagagccaaactacctgtgtttgaattctggctccaccattcactaagctctataactggacaaattacttaacctctgtgtgtctcagttttttggaaaattgggtaatagtaatagaacaaactcaaaaaatcctctattaagaggattaaatgagttaatacaggtaaaatacttaaaacaacgtctggcacatagctaagtctaatgtaatgcttaccacgatgatgatgataaaggtaaaggaatcacaggaaagataactggacgggttctagacctaccagttagcttcccagagactcagtttcattattcagcaaacaggatggtgatatttgctttgtccacttaacaaggttgtgagaatcaaatgagcactataaataatagcatcattattctacatgactgtttttaaattgtgttaatttcagtatctaagtttagttttataacttagcagagaacacagaaacccatttcgtctatttggtgaattgatgacatagttgtcagttttcctctcagtctgggctatgaagccacagtacttccttaaaacttggctttcattatttgtaagaactatatatatgtatttacatatatattcataataactaagtgaaaaatttttcttttcatgtagaaaagaaaatttatagcaatacctctgtcaggaagatactgatttttaaatctactttttgttctgtcattaaatagtaaatttaaattccttccatttagtttggtggaaagctactgccttattagatgtcaagtggaaaagttctagaaataatagtgtattcactaattaatgtactaaaagagc

SEQ ID NO: 243537 - DNA, 1383 bp, Homo Sapiens
ttttggtgtcagaccactcagcccttcttagatccaccagtgacattcggggcccgacaacctggctccactaaagggagaggccctggctccaccacacagacggccccagctcactgagtcccgctaaagggggtcccaccacacagacggccccggctcaccgagtcccactgaagtcagtatgtgagttcctcacattaaaagaaaccagatgaaatagcagccacaatatagcgccacacaccacactctttggctccccgagggaagaaggctactgctaaaaggaatacaagtcaggagtcaggtagagggcaactagaaagttctgaggaagggcgtctgacccccactgctgggaacataaccacactgcctcagcaggggagctacaggctgatgctggggttgggggcggggaacctttggaaacacagtcctggcggcggccgggtccggtttgccaatggggagagttcccttaagccgagctagccctacaggtgggtgggagctacacaaaagagcccagcttcaaaacagtacttgaagaggacccacgtggtacaggcaggtcagaggagaacgtattccaagaaatagaagcacaggatgccaaggtctagggaagacggaactggcttaaggcatgtgcatgaccaggacaaacctgagcttttgttcagttgctagaaaacttccagagtcaactccacttccagaaagtagggttcaagaaacacgtcatgggctaaatccctgacaaatgccactcacaccctcctaggttcccctactgccaccgtgacccaaaaaattagcttatttcagtttcagcccagggaacagaatcctaagcagggagtggaaagtggtaactcgggttgtgaatgcccgttagattccaaggctggatgtgagcttacacagcaaatcacagcctcccattgttctagcacataccaaacctcggggagtcctacagccaagctgacattaggggtccaaaaaccacagataacacaggatggggctccagacagaggcggggggaaggtgaatttcaccaaggaattatcccaaggcaggcgccttgctgtaaaacttcccggccagccgggtgggttcctcgaaggacactggcttgctctacactagggagaggaggctgacctgcaaaccacttcagaccacagcagatgtgcacgctgctgatctcctgtccaatccaagaaagagcacttcagaaacgcctgaggcccacagcacgtgtgtttcaacagaagagcaggatagaaagagccatctgggagtggcgtcttcagcccctattctttctcactctttgcttcctcattctctctcaaacaagagagccaa

SEQ ID NO: 243538 - DNA, 1749 bp, Homo Sapiens
aaaaaagacaagagtccacaaagatggtacccacagaacctcaaaagtggggtatggagggagagaaggagaatgagagaaggcacagaggcaggaagaacaagtccggtttggctggcaggagggcatctgtgagaagccatctgtgaagccaaattcttgatttctaaaaagaaaagattccttactctggtgggtaaagctggagggcagagggcagaaccaccaaaggctttgtgcagagaacaaaattgaagccgtgctagagaaaaaccatacagtgttgggcaggacagatgacaggacaaacggtctgaagctcaggaagcttgactcaccaagccagtgccacgtgcaagcatttcctatagaaacacgtcttgacccaacatgccaaaaaccatagttctgtctacagaaatcaaggctttcagaaaaaagttggggaggagagaaagagagagaggcttaaatagatatttttagttcaagttcctggaacctgccccagtttgagcaagttaagagcagtgaaacaattcctacatccagtaacaattcaagtctcctgatcatgaccttgtgaaaccttccctgagctgtcattaccaaggaattataaagcaattatcaatccactataaataagttcctacctgccattaaatccaccaaaatctcatgatgggctgagagcccagcacggggtcctagcgtagacctattacctacactagggtaggtggtgtgagcatgctgctgggcagtggctctctgggctcactatgatgatgaaacagttgactctatgaagtttaactctaatgaaagcccctatgacagaccacctatttcctttctaagtccagactgcttcccctccactagctggggagggagaggccatatgagtggagggacctgtggaggaaaaattattattactaccttgatgtccgctgaaccaaagtggatggaaatttctcaggacatattcatccaaactacaaaaacaggttactccatactgattacaggatgatttatcacacattcattaaatatagaacattgactagcaaccagtttcctccaacaacagatccatttggaaatggcacactgtagaaggcaatcttgtgacttccttctagttgtatataaaaaatacaaatcggtcagggagtcaggtacaaaacagtggtacaaaagcatgaatagatacgccttatcaaagaatgtgctcatttcatattgcagaacttctatctagattctgatttttagaaacttactgctggttcatttgttcggagaggtttcttcacacctctcttccactcctacctccccttgctaaaatccactgactgaagaatacttagtatggatccacatggaaccaaaatccccaactgaatggagtcacatgcatcagcacagtggctaccggtttcatctgctcacccagcctcatgtatttagggactgaattcaagctagaagcacccaacacttttgtcttttggaatctaatccaagtgccaatgtacatctaaaagtcccatgtataggaatctcttgattcctacaaatgagattcaagggagagaacagtgaggaaagcccagagagggggcaggagactggccacaagccaggtgtgtacttccctttcttagtctgtaaatgacaggttgagctggcaggactccatggtcctcaccaactgacactcaaggactccaa

SEQ ID NO: 243539 - DNA, 1063 bp, Homo Sapiens
  misc_feature (624)..(825): n is a, c, g, or t
taaaataaatcagtctctgtaaaaaaaattaagtatcaaaaggaaagactataatggaaactcttcagcttacatgcaatgactttacattacggagtacgcttccaccatagcgtcctagacattttgtcacaaccagctgagaagagacaggacacggaaaagctgcctgtgagaacaaaatcagagctgggagagcaaaaggaccttacccatcctccactccatcctgcaaattgctagcattgccatggcgaccagtgaaaaagaggggaagggatggtgacctggggaaaacctggggaggggaggcagggtaggtatcaggaagtactaagaccattttttaaatggagaaggaaattagaagtttagcagccaagaagagcacaaaagaatcagccattccaggatggtagtttagatataaatgccatcatgacaaatgtatgacagttggggtagaattaagtatatatctttatttttaaacacaattttattttagtgaatgatgccattttaggctctagggataaaaagaaactggtatcttggccctgaaacaagtagttacaatcctgctatgaaaacgagtaacaaataaagcatatacaacaactnnnnnnnnnnnnnnnnnnnnnnnnnnnnnnnnnnnnnnnnnnnnnnnnnnnnnnnnnnnnnnnnnnnnnnnnnnnnnnnnnnnnnnnnnnnnnnnnnnnnnnnnnnnnnnnnnnnnnnnnnnnnnnnnnnnnnnnnnnnnnnnnnnnnnnnnnnnnnnnnnnnnnnnnnnnnnnnnnnnnnnnnnnnnnnnnnnnnnnnnnnactcaggtagtctagctgtgggacctaaccatgacacttttaaaagcttgtattaagcataccacaagcaccctgactctggaaaacttacatctaggtttgaattgtgactccagtacatatgacctgagtgaatttgtacatatccttcaacttttctctatttcttctttttccttttcagggaactaccacttcaggatattgggtttatttcagccaacttttttgtacaaag

SEQ ID NO: 243540 - DNA, 1405 bp, Homo Sapiens
  misc_feature (81)..(133): n is a, c, g, or t
  misc_feature (775)..(788): n is a, c, g, or t
  misc_feature (1070)..(1080): n is a, c, g, or t
atgttttcttttcttcattttattaataatacagagtctcactttgctgttcacgctagtctcaaaatcctgggattaaannnnnnnnnnnnnnnnnnnnnnnnnnnnnnnnnnnnnnnnnnnnnnnnnnnnncaggtccaccttacaaataatagtgaatcctcgaaacaacacaatggagaatgtaaaaacctcctgggatactgataatgttctgtttttgtttttaatttaagtgcaagttacacaggtacactcggtttatgacatttcattttctcttacatgtgcagttttcctatgaggcaaagaaaatattatcttcaatttatagataaaaaaactaacaacagactgtttgcccaaggtcacatggcaggtaataggaggagccagattcagcttaggtagtctgacttcagagccaacccagtctctattatatcatgcaatccagatatttgtcttggctcaatacttttcctttgtctaaaatgaccttcccttgattttcagaatgaaagaacacgaagtctacctcaaactccatagtcaaaatcctccaatttcccattttagtatttcattaaaacttaattataatggcatagttatttgtagactcatctgtctccaccctcatgccccagaagtgtaaactccctgaaagcagggactatgcatattgtagatgctcataaaatattaaataagtgaattattccctacaaatgcactttaatataaagtgtatacaagactaatattcaaatnnnnnnnnnnnnnncccaaagtttatttcattcattttatctctgtatgaataaaagctgtactgtacatggctttcatgaaatactaagaaatgatatactcagaacaatcactctaatcctgtattctgacagagtggtgtcatggacaattaatagtcaagcaacctttaataagtagactaaagatccatccaaataatactaacatacttcatcaattacaacatttataagcctgaatggtcttctgattaacctgatgatctatgtctctgagtaaaaatgtagctgannnnnnnnnnnaacaaatacatctatttaaacagacatatattagatatatactctaatccaattgcttatataagcatgtctatctctgggatctctattttaactcaataatctgtctatccctgtaccaataccacatttttctattaataatattttggtatctgatattacaagtccttccttatcatttctgcaagactttcatgatatttttagctgaacactctcctcactatatacattaaaatccctttatcaagttataccaaaaatcctatgagatttttattggagtaatgctaaatatatataggagataataatttgccaa

SEQ ID NO: 243541 - DNA, 891 bp, Homo Sapiens
gcagcaatactgtataatcaaaaggattgtaaactatcaccttgtgagatttatccccaaaatgcaagggtggctcaacatataaaaaatcaatcagtgtaatatactctaacagtaaaatgaataagcacgtgattatttcaattgatgcagagaaaacattgatgaaatacaacacccttctataataaaaatactcaataaactaggcatagaagggattttctgcaacgtgacaataggatgtacaaaaacccaacagttaatatcatgatcaatgatgaaacactgaaagctgttttcctaacatctagaacaagacaagcatggtgcatttgccacttgtgttcaatgtaccactggcaattttagccagagcaattaggcaagacaaagaaataaaaggcatctaaattagaaataaaaaacagaagtaaaattatatctacacatgatcttatgtgtataaagctccaaataaaacacaaaaccgattataactaataaaagaggcaggatgcaaaacaaacataggcaaatgagctatatttctatatagttgtaaagaactatgaaaatattttaaaaattccatttataatagcatcaaagaataagttattcaggcataaatctaaccatggtggtatacacaaaactttgctgaaaaaaacgaaagagagtggaaataaccggaaagacattctgtgttcacgggttgtaagacaatactgttaagatgacaataccatctaaagtaatctacagattcaatgcaataccatcaaaatcccaaaggcatttctgcagaaagaaagaaactcattctacaattcatacaaaaattcaaaggatctgacagacaaaacagtcttgaaaaagaatatccaa

SEQ ID NO: 243542 - DNA, 1527 bp, Homo Sapiens
  misc_feature (472)..(530): n is a, c, g, or t
ttggctgagtcgtacctcctccatggaacagtctcagagtaatctctaacaaataattattcatataagtttgtgcttgattgtatatgtccacatactattttttgattgttttctttgccagtacatttattttctgtctgttaagcctttcaggatttgttatatttgtgtaagcccaaattttgaacacaacattagcacatgaaggggttacccaagaaatatttattgacaatttttcataatgatatataaacctagtctttattaatgactatgtagataggaattattgtttagggacttcaccataatgttcttgagtaagggttatataattttttttctcatgagaagaaattacctttgaatggatggagtaattttctctttttagttggtcacagtgatcattttagatgaagaaactaaagaaaaaatgttcagcatgtttacttggagttaagtnnnnnnnnnnnnnnnnnnnnnnnnnnnnnnnnnnnnnnnnnnnnnnnnnnnnnnnnnnngaagcagtagtaactgaacactttaaaggaatgaaaaatgtagaaaaacggcagagacagtgtcttacctagaatatctagtgatgttagtcaatacatattttttcaaacatttattctggtttagttgcttttttctactgtccattttgcttttctgaagggattagattaaacgtggttcattgatgcaacacagacttactgattgtttattgtgtgccaggtactgttatggtctggaggtacaaaaaaatgcacaaaatttacttgctgcctcagggaagtaatgttgattggataattagacttataagcagacagttcaggtgtacatgtggggctctggcataaagaagaggactcagaccaagctggggagttgcttaaggaaggcttccaggaattggagtctcttaagctgattttaaagggtgaataaaagtggaccatgcagataatctgttggaaaatgggttggaggttatctcagaggaagtcacttgcctacatagagaacatgatgaatgtaagatgaatttgaatgtacaggtcacatgtaggataggtaaagagtcagtccaaaaacagaatatgaggggcttgtgtcccgtgttgtggaacttgcattcctgactttcctcctccaccccactgagatgctagagagtaactggagaattttgagtagggaagtgacctgttgatcagctattcttgtttaaaagctcattctaggggtagcatgggatatagctgtgacttaagccaagagttctgttagggggatagaagagaatgaggtcctaaagttcagccgcgatagggagaatgactgtgagagttaacttaggctgaattagtaggactgttgatggaatatgcagtaggacgaagagagtgaattcttgaatgctgtccctagtatctgggtggagccctttaccaagatagatgatgcaggtaggacaggttttggggtgttgaattcagattt

SEQ ID NO: 243543 - DNA, 1000 bp, Homo Sapiens
ttggcccacgtggaccccagctccaccgtgtccgaggcggtggccgaagaagtatctcttttcagcatgacggacatgattctgttttcgctcatcgtgggtctcctaacctactggttcctcttcagaaagaaaaaagaagaagtccccgagttcaccaaaattcagacattgacctcctctgtcagagagagcagctttgtggaaaagatgaagaaaacggggaggaacatcatcgtgttctacggctcccagacggggactgcagaggagtttgccaaccgcctgtccaaggacgcccaccgctacgggatgcgaggcatgtcagcggaccctgaggagtatgacctggccgacctgagcagcctgccggagatcgacaacgccctggtggttttctgcatggccacctacggtgagggagaccccaccgacaatgcccaggacttctacgactggctgcaggagacagacgtggatctctctggggtcaagttcgcggtgtttggtcttgggaacaagacctacgagcacttcaatgccatgggcaagtacgtggacaagcggctggagcagctcggcgcccagcgcatctttgagctggggttgggcgacgacgatgggaacttggaggaggacttcatcacctggcgagagcagttctggccggccgtgtgtgaacactttggggtggaagccactggcgaggagtccagcattcgccagtacgagcttgtggtccacaccgacatagatgcggccaaggtgtacatgggggagatgggccggctgaagagctacgagaaccagaagcccccctttgatgccaagaatccgttcctggctgcagtcaccaccaaccggaagctgaaccagggaaccgagcgccacctcatgcacctggaattggacatctcggactccaaaatcagtatgaatctggggaccacgtgggctgtgtacccagcccaacgactctgctctcgtcaaaccagctggg

SEQ ID NO: 243544 - DNA, 741 bp, Homo Sapiens
  misc_feature (173)..(205): n is a, c, g, or t
ttggcatggagcatgggcataaagcactggtctgggtccaatttagggacccactgggaatgaatgtttgcttaaaaacacattagacaagcagcagcagggcagctgtgtaaacagaagtgtgctgttttgatgcagttttcctgactgttgtgtttataatcctttctctnnnnnnnnnnnnnnnnnnnnnnnnnnnnnnnnntaaattccaggtttatctctaactaatgataaacattaagctctttccctactgagacagggagaagagtattcctgtttctattcaaagttccccaaagcagctttctgtatttgaaatgtcctctcagaccattgttgaacctccctttactcccttctgactggctcccagcctcctagaattaatttatttattcaagctcttcatagtaggggaggaaggaactgtattcagtcatttattcttaaaacgtgtattgaacatttacatgatgacacatgatgactgaggcaaagaacacccattccttcaaaatgctcagagtctagttgaggaaataaaaaagttaaacaacaaattcgtaatacaaaatgttgaatatccagtagatttaaccataggctttttgaaagacacaggaaccttgaatggagctggagttcaagtgagatttcttggaagtctggaggacaaaactgagtcttcaaggttaagatgcaagtatctaggtaaactgagcctcaatcaaagct

SEQ ID NO: 243545 - DNA, 1046 bp, Homo Sapiens
ttggggcctggccgctacaataaggctggcgaactcgcagcgcttgaatacccgtggcctaaccgtccactcggaagaccggtcccgctcgggaggctctgcagtcgcgcctggggtcagggccgggggcgaatgtggctcgcgttctaggcctccctgggttggaaaaagactatgttagcaagtgtcacgccatgcttttgccaactttccaattaaaggttgacattcctgcataagcatttctctgtgaaaatgtccttgcctcttacagaggagcagaggaaaaagattgaagagaatcgacaaaaggctctggcccgcagagctgagaagttattggcagaacagcatcagaggactagctcgggcacctccattgctggcaacccattccaggccaagcaaggcccatcccaaaatttcccaagggagtcttgtaagccagtgagccatggtgtcattttcaagcaacagaatctcagtagctcatctaatgctgaccaaagacctcatgattcccacagttttcaggcaaagggaatatggaaaaagccagaagaaatgcccacagcctgcccaggccacagtccacgtagtcaaatggctctcactggaatctctcctcccttggcacaaagtcctccagaggtccctaaacaacagctcttgagttatgagttaggtcaaggtcatgctcaggcttcacctgagatcaggttcacaccctttgctaacccaactcataagcctctggccaaaccaaagagttcccaagagacaccagctcattcctctggacagcctcccagggatgctaagttagaggccaagacagcaaaagcctccccttcggggcagaacatttcttacatccattctagctcagagagtgtaacgcccaggacagaaggaagactccagcagaagtcagggtcctcagtccaaaaaggagtgaactctcagaaaggaaagtgcgtaaagaacggcgatcgtttccaggtgttgattggtacatgcggaactcattgcagtgtttaagaccc

SEQ ID NO: 243546 - DNA, 1612 bp, Homo Sapiens
aacacgctcccctgggcacatcgaagagtcccggacaggcaaacaagccacatgggacaagggtcacagcagcagctaggggccagtcctcgacctaaacttgttctttcattacagacaaaagcttaatcaagtgcaatcaatgccttgggatctttgcagcaatctggggggcatgtgtcacagaactctggatgtaaacagatacacaaacatcttcagactggatacatttttccaatacttgttgcgggtcggttttaaagcatgtaccctggagagtgaaggtgcagcagataggtatactgatttgagtcactccacaccaggcagcttccttctccaggtggggcagagccccctgggggaacaactctccaagagtatccgcaggaggtgggcggcaccccatcacaccaaggtcctggccgggtcttcgctctgcccaaaccctcctccagcctgtgcaggcctcctcccacctcttagtgctttcagcgagaaaaggtgagtctcattacgcagaacttttgtttgctcttcggttctttccttcttcaagtggtatgctctactatttggtagaaattcacattggcttgtcacagcacacttcagttctgctggctacatgaaacgcatacccagttttctattcttaacagtgagtctgagcctctgtggtctcagagatccttttatccccatgaccattttatacatcctcccctcaacaactgctagagttttatctttcccaacaaatataccagaaactatgtgtgctgttgcaaatggggacggcccaagagtctggagttttgttccctgctgccctgcttttacccagtaatgtgcggcatggtgggtgaatttttctaattgtcctgggtcgtaacagttcaccttctcagaacagtttggactgtttccccaaccatgtcacataagctttggctcacaaagtagctcacctctcgcctctccactcttcaagcttagtaagaagattccgcagcttagtcccaaaggtcaggcagttttctctcctgaaaaactctgtggacacacctagagaggtcactgtctgcccacctgccttagtaatgctggtcctaaaactcatctccaaggacatctttcacaacttctccatctaagaaatgaccttgaccttcctacctttgggtttgttttttttctattcatgaccacgtgtttcttccaatcccataataacaatttttatagactgtatagcagagccttgtcaacggctttttgaaaatccatcaaagttctatcagatgcagatctgtgtgtttattcacctgcagggactccggagctcatttgctctgcgtcttcctatccccctccccgctaaaactgtagtgcacctttttaaaggaattccatgctgcacagcagcagacttcgggctcctcggggcctgtgctgactctggttagtgtcaggtggggatccgagtaggttatgcacattggccaaacagctgagacaggtatgctcacccatagtgatttctggatggaggccatccaatcccaatatttatgaataccaagctgcttaattggtttcaagccaa

SEQ ID NO: 243547 - DNA, 1580 bp, Homo Sapiens
ttgggcctgtaccagtacctcaaggacagtgccggggagcccctgtacaagctcttcaaggccatcaaacatcaggtggaaaagggcccggtggatgcggtacagaagaaggccaagtacactctcaacgacacggggctgctgggggatgatgtggagtacgcacccctgacggtgagcgtgatcgtgcaggacgagggagtggacgccatcccggtgaaggtcctcaactgtgacaccatctcccaggtcaaggagaagatcattgaccaggtgtaccgtgggcagccctgctcctgctggcccaggccagacagcgtggtcctggagtggcgtccgggctccacagcgcagatcctgtcggacctggacctgacgtcacagcgggagggccggtggaagcgcgtcaacacccttatgcactacaatgtccgggatggagccaccctcatcctgtccaaggtgggggtctcccagcagccggaggacagccagcaggacctgcctggggagcgccatgccctcctggaggaggagaaccgggtgtggcacctggtgcggccgaccgacgaggtggacgagggcaagtccaagagaggcagcgtgaaagagaaggagcggacgaaggccatcaccgagatctacctgacgcggctgctctcagtcaagggcacactgcagcagtttgtggacaacttcttccagagcgtgctggcgcctgggcacgcggtgccacctgcagtcaagtacttcttcgacttcctggacgagcaggcagagaagcacaacatccaggatgaagacaccatccacatctggaagacgaacagcttaccgctccggttctgggtgaacatcctcaagaacccccacttcatctttgacgtgcatgtccacgaggtggtggacgcctcgctgtcagtcatcgcgcagaccttcatggatgcctgcacgcgcacggagcataagctgagccgcgattctcccagcaacaagctgctgtacgccaaggagatctccacctacaagaagatggtggaggattactacaaggggatccggcagatggtgcaggtcagcgaccaggacatgaacacacacctggcagagatttcccgggcgcacacggactccttgaacaccctcgtggcactccaccagctctaccaatacacgcagaagtactatgacgagatcatcaatgccttggaggaggatcctgccgcccagaagatgcagctggccttccgcctgcagcagattgccgctgcactggagaacaaggtcactgacctctgacctacaatctccagtgctgccttgggacataggtacctgaggtacctgagagcccctcaggggaggaggccgagtggctgtggctgaggcccccaccctcccctggaacgcgccccaagccggagtgggtgcagccggaacccgcccagcgtctagactgtagcatcttcctctgagcaataccgccgggcaccgcaccagcaccagccccagccctagctccctccgggcggcaaaacaacatcgggtgttcactgtcgagtctcgagtgatttgaaatg

SEQ ID NO: 243548 - DNA, 747 bp, Homo Sapiens
accatgagggaaggacttatggactgttctatcatgagctgcgggcagggcagaaggagctggagaggatgttttgagtgccttacaagttgttgccctgaccctgccagcttagagggaccccaccccgcccctgcacccacgcacttccagccccaccaacggagggccactccacaagcatggaaccacaacctatctgatctttgttcaaattccctctccttccacaccacacttactgtaggtaaataaaaatacagatctatatatctctaactttacggctgtattacagaaatctgatttgcttacaaaaaagctataagcagtgaacaattaagaaactaagagccaaaggtgggtgcaacctgtaacaaggtgccaactaggctaataggcaaggagcactttggggccaacggggaagatataaaaacaggaacagatatttaatgaaacgtcttttttaacccacagaattccaagaatgaagaattattcccagtcatgcaagggtgaagagagtcttctctgctggtgggaggatcaactgtttccgtattttttggaaagcagtttgacacaatgtatgaaaagtaaaaatctgtctcattaatcccttcccagaacgtatcctaaatttaagaactggaaacatgcgtgcacactgattgtagtggtgaaaaatgggaaaacacctaaacgttcatggggtgcagaagagccaacttttttgtacaaagt

SEQ ID NO: 243549 - DNA, 691 bp, Homo Sapiens
cgtggtatgattccattaaacaaaatatccagagtaggtaaacccacagagacaaaaagtggttggtggtaccccggagctgggataggcaaaatcacacacgcagggccacaacccacacccactcggagatgttccaggaacaatctcaggaacctgcatttgtaaaaatcctccccaataccccatcagaacacagagccactggtctatgggccaggagcccaagacctgagaacaatcctagttttttcaacaactagcaacatgactgggcaactcacacccacctctgctcatcttctaaactgtaaatcagagtccatatggcttgtattattcacaaggtttttgtgaaggcaaacgggggaacatggccaccactggaaaaagtggaagatggaaagttagtgatctgaatctgaacctttcattagacatctctgctctgagggaccatctgtggggtgagaagaaattgggctcagtgcttaccatgtggaaagggaggaagggctctccacatgggacacaagggacagccatgaaggacagaggctgacgagacctcccagggtgagctccttccagcactggctggtacctgttgcttctgcaaatgttccccagaccctctgcactctcgcaggtcagagtaaaaaaaggttggattctttcattttaaaaaaag

SEQ ID NO: 243550 - DNA, 1386 bp, Homo Sapiens
gtcagtttctaggcttccaaggacacctttcagctactgcaatgcagcttcttaccctactcctccatggacagatgacatccatttctgaaatccaggggccacacttcaatctatctcatgaggtatctctgcttggtggacaccgatgttctcccttcctgaagactctgcttctctgacttctgtgagcatagcctcttctggtcactcgttctctggcatagacttcttctctgtgggctggcagcgaacagtggggccttcagcatcattattgctcaggtcagtacaaaggaccacataagggagtatgatagtgaggagccaagatcactccacatctcgagaagagatgatagcagcctggaatggtttggtggccatgggaataaagagaaagggactgatttgacagatgtttaatgggtaaacatcacaggatttggcaattggctatggaagataaatgggaggaaggagtctaggatgactgttgtgtttcatcttgttggggggtgacttgactaggctgatgactttgctcaatccaataggggatacaaaaacagcaaagacatgaaagagaagatgatgatagtggtatcccagaaaatgagagggtaaccaacagcaccaaaagtcaggcaatcagataaaccagtttctaagctgaggaaggggagtgacaattctttcaagaagattgtccacagagagaaacaatagggtaataaccaggagtgcagggttgaaggggcgttttttggctgagggcaacggaccagtagaggctgagcagctgaaagtacaggtgccaagggggtggctgaaggagtaagatcccattgatgggatgaagtgggatcataacagatgacaggttgaacagaaaggctatctccatgcatgaggcagcaggacgcagatgtacacactcccttggaggctcacagtgggaagtgaaagttcctgcattttgaactttcctccctctgtgaattaggaggtgaggttatctattaggcacgtgggtgagtaagcagttggaaccaagtggtgaatgtttatagaagagggttctgaccaaagacaaagattgctcaatggcactgaggtccaaccgcagttgaatgccctagattcataacagccacaatctgtacacttctatcatttttagttgttatattctacaccccaagcagatacacacagggataaactgagtcaggcaattcaggcttggaagcttgcaaagctggtagagtttgaggataaggggtttaaggagctgagggcatgaatgagaagtctgagttgaccacagggcaccagttgcataaggtagagaatggggttaaaaagggggaacacaaaagccaa

SEQ ID NO: 243551 - DNA, 836 bp, Homo Sapiens
caagttgaaattacccaacaatttcataatgatcctgaccactataatactttattgctttgatgaccaggcaaacatctaaaagcagcatctaaaagcatcattatatgcagagacaatttctagaagtatatacaagaaatagcagatggtggctacgctcgtataagggactgggagcctggaatgagagggagatgtatattttttcattggacatccttttacaccatttgatttttttataccatgtgcatatattagtttcctaattaaagaaaaagagttaatgaaaaagttatttaagttaagaacgatcactactcattgtcatttccatgcctgtgatatgggaaagggagagtcatcaatggggaggtggtcaacctcctaccagcagggtgaaacccacatcagctggcaaagtgaaagcatcactccagaaaagacagatggtttcaccgggtcttcaacataggtcactgaagttccaaatgggaggggaggatattatcaatgtttcattaggtccctgcatagccctggtgctggctggaggaactggccctaacctcctaagtttagtcatttcatataaagataaacatacactcacatacaaacccaataattccactcctaggtatttccccaagagaaatgaaatcatatgttgatactaaaacctttgaatgtttatagcagctttaatcgtaatcaccaaaaagtagacacaatccaaatatccttttaacaggtgaagggataagtaaactgtggtcctgcacattcataccatggaataaatgcagtatggggaaatctcaaatgtattc

SEQ ID NO: 243552 - DNA, 940 bp, Homo Sapiens
aaaattaattcccaaatggatcaaagacttaaatgtaagagctaaaaatataaaactttttgaaggaaataggaacagactttgaccttgagttatgcttagccttcttagatggaaaaccaaaagcacaattatttttaaaaagcataaataaattggacttcatcaaaattaaaaactcttgtgctttgaaggccatcatcaagaaagtaaagggacaaccgaaccatggaatgagagtatttgcaaataatatatctgatgaaggattagtatcaagaatatacagggaatgcttgcaactcaaaaataaaaagacaaataacctcaacgaaaattgggcaaaatatatgaatgaatattttgtcaaagaaaatatgcaaatagccaataagcacatgggaagatgctcatcatcattagcagttaggaaaatacaaatcataaccacaatgagagtctacttcacacccattaggatgactataataaaaaagatagtaacaagcatttgcatggatgtggagaagttggaacctttatgctgttgtaatacaaaatggtgcaaccactatggaatacagtttggcagttcctcaaaaagttaaacagttaccatgtgactcggcaattccacttctaggtatatgctcaagataaatgaaaactaatattcacacaagaacttgcataccagtgtttataacagcattattcttaatagctaaaaagagaaaacactcaaatgtccatcaactgataagtgaacaaataaaaactggtgttaccaagccttctggtctgtctctggaggcaggaaatgccagggtgcaaccagtcaagctactgcccaacgctcatcaagagaatagttatcttgtagggcagctctggttctagtgtctggcagtggaattaaacagccaccatgttgacccaa

SEQ ID NO: 243553 - DNA, 469 bp, Homo Sapiens
tacaaaaaagttggattcagatttcactaattttttgtcagtgttgtttttctgtcccgatactccctccaggataccacattacatttagtgatcatatgtcatgttaaaaatattggctattggatggtgacgtgctatttagtagtcctttatgattgataagaaataaaacattgtcaacatatttagttaaatattagaatagtggcaaagcctatatgtagatagtcaggattcatcagagcttccttgcccttacgataatggtatacccagtggaagttttgtgagactgagtgcagcttcaattataatggaggtcatccatatataaaaatttgtcttattgtattcaaattataggtttatacattttaagagcatatgccttcctaaacaatgaatgtttggattcttcattcctggttttaccaataaactatataaacctttcttaattctcaaa

SEQ ID NO: 243554 - DNA, 959 bp, Homo Sapiens
gagggaaactgtgagctggggagggctgagtcaaatgcacgccacgtacagcatctgcgaccccgctctgtgccgcaagagccacatccactgttcatcagccagaagctgactcccagagccagcctgtctctgcaggggcagctgggggtgtgggctgagcctgtctctgaaggggtagctaagggcgcaggccgagcccacttgatgatggacgcagaggccagagctcggggctgctcgggggatgggcgctgactcgcagcacccgtgagggattcacccactgactgcacaatgctgaaacactgaactaaaacgaggtctctgcaggcccagagagctctgttccaaaacacacatttcataaaggaggcccaatgtgaaaaaaaatcttaatgtctgggagttatgtccccatacaattagctctaatacaggcagcctgcagctgacattaactcagaagtcgcaaacacccatttatggctttgaggtcaacatcagacaggaagacacttatgtctgtcttgcaagcagctaaattcttccaacagatgacgagaagtaaggggctggcctggaatcacccactgaggctccaaaggccgggggaaagaacagccccgtggaccagggcctggcctcagagggcttctcaagctcggggagaagttccagggcccagaggcaggtgcagccatcggcactgtggtcagaaaaaaagcaacaggcattccctgtacaggtgccgtggccaggccctgcagatccataaactagacagggaagggcccgggagcccccatattcagcacgtcagggactgtcctgcaggttagctggggacggaggctggacaggtcttcctggtcagtggctgcagcacgtgctgtgactcgcaaactggctctgagcccactgtgaggtattaggagttctgagatgtttgaagccaa

SEQ ID NO: 243555 - DNA, 860 bp, Homo Sapiens
ttggttactatttaatttaaaacttccccattccgattccatcctcaccaagcacgttccttcgcctgcagcttcggtctagagcctgagcgagccgagctgcggatgccaggggctgggtggactccgcagctaagctactgtaaaacacgcacctgcttctaccgcgggtgtacacatggtttgccagggtgtgcgcgtcttcccaaggggtctggggaccaaattccagctcccgccatcgggaggcacggtaagagaccgtaggggacacaatcccgagcaccgcagatgccgaggtctccgctgcgctccagtctgtcaacagaggcttcaggaccgcggggtcccttcaaatgccccgccagtcccaggccaatcaccgcgcagcttcttccgggatcgtcgccaatcatcggccgttgcgtattgcgggtacagaggggtaagtgaagcttcgggcccttacatctttcttgaaggcaagaagcctctcctctacttcccagacaccccgcctcccccactagaaaaagcagccgaagcggctttatttaagggcaagtgggacgatgaggccagagaagtcagaaaggctccatatttgatatggtcaaataatggcgcccttaagagcagcctgtgacaattgaagggtggtcgccatattttcagaaggcaccttccgggtcccttaacccgggtgtctatgtccaagcggccatgaagtgaataaacactgaggaattatatttgtccctatcagaatcctcgaatccctagcagccagtccctgctacttcggttgcctcggctgcgttcggacgccacggctgggcggggccgcccttcctgtggga

SEQ ID NO: 243556 - DNA, 908 bp, Homo Sapiens
ttggctgagtttgtatttctaggtaaggaaactgcccacaatgaaaataagttttataatgtacacttcagcaataaggtaggttgtatttattttgatttctataaaatgcaaagaaataacttcgttaaaaaagaacatgagagccttctatcctgtctatgcttttagacattctaacagatatgaacaaaataggttaggtgtgcctttgtgtgcaaaatctatgagcatttatttaaggaaattatttggaaaaaaaacaaagagggaactcaaaggaaaaagccactgaggccaaagtgtggctaaattcaacatgtacagaccaaaaaaatcttagaggaattatcaatacatgtgttttaacaatagaaatatgataagtctactgtgtttgaatcacaatgtatacagtccttaaactctaggacattagtagggaaagtatagccccaaaatattattgatttaaatatgcattacttcacatcatagagttaactgaaaataaattgctaacgagaagctaatgataacactaagcaaagacaacagcaatggaaaaccaagaccaatccaagacaacactgataatgtcctgactacaatttttcttcataaaaataatgttattccaactatctgcatatataatgtaacacacttgcgctgctaccaagagtcatgtagcagctggatttcttgctaaaatcctgaattagagtctttgctaacttcttataatgaacgaattttaattttccaaagtttaataaccctttaagttccttgtatatttcaaataagtcataagtaatcataaaaatcattcacccttaaaaacgaattgaagcagttgcattttttattcttctgtagcccaccaccaagctgtgtgtatgtgc

SEQ ID NO: 243557 - DNA, 949 bp, Homo Sapiens
gcatggtacctctctttggtgatacagctgcatttggaagtttcccagatcacaacatttagctttcacaaatgcttttttggtagaatttcccctcccagttaaaaactggttttcatcacacaactggataattatttttctgcaactaactgtaattacttgttttgtgcatctctactagagtgattcagtgtttgctgttctacctcataaaatgtatctgtattagaggcatgtgaaaaggagtattgaccttatataatatattgctatattggtaggggcacacagctctaattctttgtaaagggcacaaaagtctatattgctttgagttttcctttttgaatgctatgtgagttttctgactaaagcataaaattggaggtatctgaagaccagaaacctcacaacatggaaattacttagtacacaaaaagactttctctcatatagagatacaatgcataactgaataaaaaaggctgttggagggatttgttgatagtggcatcatagaaaactctggaatcattgattgtgagatttgtcaagccagaaaatcagacacagattttaaatcattcaagaatatctaatcattttatgtcattcacaaagctctccacaaataaaaatgaaaattaagcccctcctgccacagtcttcttttatctacaacagtcgttctctttctgtcttttccttccaactcctatttgtctatcgttcttttttctttcaagttctctttaatccttgctttcccatgtccctccttagtcttactcaccagtgatgctgataaaaataaacagtctatttaaaacagatgagtcaaagccaaaaataaatgactggtgtgtgctttattattatttttaaagtaaaactacacctgtgacattgtcttaaatttttttacaattttaaaaacaaactacaa

SEQ ID NO: 243558 - DNA, 933 bp, Homo Sapiens
  misc_feature (745)..(757): n is a, c, g, or t
ttggctcacatcaacttctaccagctgaggaacttcctgaagtgctccgaagacaacccgctctttgccggcatcgactgtgaggtgttcgagtcacgcttccccaccaccatggccttgtccgtgctcgtgaccattgaaatgtgcaatgccctcaacagcgtctcggagaaccagtcgctgctgcggatgccgccctggatgaacccctggctgctggtggctgtggccatgtccatggccctgcacttcctcatcctgctcgtgccgcccctgcctctcattttccaggtgaccccactgagcgggcgccagtgggtggtggtgctccagatatctctgcctgtcatcctgctggatgaggccctcaagtacctgtcccggaaccacatgcacgaagaaatgagccagaagtgagcgctgggaacagagtggagtctccggtgtgtacctcagactgatggtgcccatgtgttcgcctccgccccccacccttgccaccacactcgcccacttgcccaccgggtcccgccggataaatgacaggcccgaggtcagaatggccatccccgggccccgtcctggggtctctgtccccacttccttctggcctgggaggtctgtaattcctgtctcctggactctcctgggaagttccctgctctgcagctctggcccaggagctgcaggctgggagggggcagccaagaagccggagctggcagcatacccagagatccggggnnnnnnnnnnnnnaaatcacgagtgcagctggagcttgctcccccttgttcggaagctggacgttcacttggtgactggtgcctctgcactgacggaaggactctgggggtccttcttaccggctctgacctctctcttcatgcctggtctgggactgggtcagccctgggggatcagaaggggccatc

SEQ ID NO: 243559 - DNA, 1070 bp, Homo Sapiens
catttttgtcagattaactataacagtgtagtgtagtttttaaaattgcagttgaaaagtttagctgtcttggaagtcaaatttatccaattgttcagacttctgttactacttaatatgaagccaccatgctggcttggacagaattaatttcattcatgttatggagaattctatattacaaatctggtcccctataatatgaacagtgagcagtcagaaatatacaaagggttaaatagggtaaagactttggccaagaaaggaaaggccttagttctaccatagagtatcttctctaattaaaatgactgggaaatatatggaagcagaaaccagcacaaagcactacccatctagaaataatctttcagttaaaaaacaactctcaaaaccagcactcatttctctaagataggttataagtattttacgatttcttgttatattaaattgagttaaaggtactgacaagtcaatatgcaaatgggtttaaacaccaatttgatttctcttctgactagctctggagagctgtgacatctggatgttggtgtcactcacacaggtaggtggtagagaactttcataacaaaactacacactccacaccaactgggcaccagcttccaaacccaactccacttcaggtcaaacaaccttaaggaactacctatagtctagttaaacattaaatagtattttcaagaaaatacctttttttgctttgcaacttaatatttttcaatttcctagattaaaagttactgattttgaactttaaatgctgtaattcatataggggtgcgaatatgctcatgaaaaacaaaaggctattattccattttagaagtcttaaatgtgaatgaatttctagaaatctaccacagtatctgttttttacaatgctaatctttgtcaaatgggatttgccagtggttgattaactcaagtgattaaaatacaaaagacataaaatcgattccagtaatcatcaatgatacagcctaattaaaatcagcccaattaaaatatttcctggaatatatctatagggaatttttagccaa

SEQ ID NO: 243560 - DNA, 1246 bp, Homo Sapiens
ttggctcgtctcccattcccaggattttctgaatggtgtctgtaccaatatcattcacatgcacaacaagaaactgaagtattatacgggtaattatgatcagtatgtgaagacgcggctagagctggaggagaaccagatgaagaggtttcactgggagcaagatcagattgcacacatgaagaactacattgcgaggtttggtcatggcagtgccaagctggcccggcaggcccagagcaaggagaagacgctacagaaaatgatggcatcaggactgacagagagggtcgtgagcgataagacactgtcattttatttcccaccatgtggcaagatccctccacctgtcattatggtgcaaaatgtgagcttcaagtatacaaaagatgggccttgcatctacaataatctagaatttggaattgaccttgacacacgagtggctctggtagggcccaatgaagcagggaagtcaactcttctgaagctgctaactggagagctactacccacagatggcatgatccgaaaacactctcatgtcaagatagggcgttaccatcagcatttacaagagcagctggacttagatctctcacctttggagtacatgatgaagtgctacccagagataaaggagaaggaagaaatgaggaagatcattgggcgatacggtctcactgggaaacaacaggtgagcccaatccggaacttgtcagacgggcagaagtgccgagtgtgtctggcctggctggcctggcagaacccccacatgctcttcctggatgaacccaccaatcacctggatatcgagaccatcgacgccctggcagatgccatcaatgagtttgagggtggtatgatgctggtcagccatgacttcagactcattcagcaggttgcacaggaaatttgggtctgtgagaagcagacaatcaccaagtggcctggagacatcctggcttacaaggagcacctcaagtccaagctggtggatgaggagccccagctcaccaagaggacccacaacgtgtgagccctctacctgggttcgggtcaggagctccatctgggaactaacagctgctaacctgaccagccgctcaggacaggaccctggggctacactcctgcattgctgcaatactgctcccccagcctctcccctgcccctcaacctgccttagctgcactctcttacctacagctggacagtacctgtctgtttcctgtcctccttcca

SEQ ID NO: 243561 - DNA, 1112 bp, Homo Sapiens
  misc_feature (467)..(484): n is a, c, g, or t
  misc_feature (487)..(511): n is a, c, g, or t
tgcaaaaaacacacaattaggtgttattggatgaatgaataacatgatgaaaaaataatataactctgctattaagtcttatgaattagaacaaaagttattggggttttattttttatttaaaagaaaataataataatatttgtattaccaattctatatcggaacacttttggtatctatccacttctccctagtcccttcttgggccttactcagtccaatcactttcatctctgaacaatattattgtaatggactctcttgccttcccccagtcctttccccacaatacagcaagagggatcttttgaaatacaaatcagactgtgtacccatagcaattattctttgcctatatcctccatatttcagcttaaatattactttcctcagtgatgccgggaaaagttacttagccccataaattaaaacatgccacatccccaccaaacacacatacatannnnnnnnnnnnnnnnnngtnnnnnnnnnnnnnnnnnnnnnnnnnctttaatgactttcattgcattttctctttttaacatttagctgactttgtaatttataaatttaataacttaataaagtttgtctccctcactagagcaaaaactttaagttaggaattatgtctacttggcttgctattctatcactagtatacctagcagatagtaggtgtcaaaaaacattttgtcaaattaatgtgcatagcagtattaggtaaacacacggcatagaaattttaaaaaactcaaaaatgtacatatcctgatgtcaaaatattattctctctaccctcttcaatataatggtttatgttggttatactgattcatggtacttcatattgcatgaatgaaactgcaactattttaggtatttctgaagatttctaaaaattattaggtagtgtctttgtttagattgtatgtctcagtttttccctgaagacgctattgagcagatgagaatttaagggaactaatgccaaaggtaccaaacaaaactttatgaagagtaaatactactttcctcatatatacattaacacaaattaaaaagttttataactatgcaactgggatccataaaaatattttccccaa

SEQ ID NO: 243562 - DNA, 985 bp, Homo Sapiens
aatttatttcatctactatcttacaatggttttcctaaaacaatacagttttacctaatctctataatattataaatgaagacttttttcattctatttacatgaccgctataatgtacctatgcttctttaaacacctttctcagtcctgctatttgccacagctcagatggactatctgggcataattcagttttacatgtaatagtctttacagcatttgtttgatgaagcatattctagatagaatgtggaaaaattcacctttggatattctaatttattaaatgaaacaaagtaacaacagtgcgataaatagggattctttctttttcctgtgctccttgtctaatttccttgctgccgcaacatccattcttcagcatcttttcctaggacacggcatccttccatgaaggcctcgtttccctgtaattagcaggacaatcagtgccatctattattgttagttagaagcttctctacataatggggacttagcatttggtcccaccggcgatgtttctgtgtaaaaacttaaagtacactaatatgtaaatattgttccaacttaatggtgtactttctatggagactcagagacatttgttaagccatcaaagtgcatggttcttacaaatgtattctcagtgggtagataataaattaagtgtcaccgtcgtccgagtgatccttttcaagaatttttcatttactgttagtctaaaaagcttcttatggcaatgagaaaatcacacattatggctaggcttctaattttctcagtaggattgtgtatgtatttggggatcagaataaattaaaaagtgggaaaagaaggtgagctcaaagaaaagaagaagaaacattgcctttgtggggaagaatcatagagaaatacatcattgtaggcaaggaaaatcacagaattattcagatggtgataaaaacctaagctttagtaatctatcgcacaaaatgccaa

SEQ ID NO: 243563 - DNA, 1287 bp, Homo Sapiens
ttgggtgctggccctggagtacttacacaactatggcatcgtgcaccgtgacctcaagcctgacaacctcctaattacatccatggggcacatcaagctcacggactttggactgtccaaaattggcctcatgagtctgacaacgaacttgtatgagggtcatattgaaaaggatgcccgggaattcctggacaagcaggtatgcgggaccccagaatacattgcgcctgaggtgatcctgcgccagggctatgggaagccagtggactggtgggccatgggcattatcctgtatgagttcctggtgggctgcgtccctttttttggagatactccggaggagctctttgggcaggtgatcagtgatgagattgtgtggcctgagggtgatgaggcactgcccccagacgcccaggacctcacctccaaactgctccaccagaaccctctggagagacttggcacaggcagtgcctatgaggtgaagcagcacccattctttactggtctggactggacaggacttctccgccagaaggctgaatttattcctcagttggagtcagaggatgatactagctattttgacacccgctcagagcgataccaccacatggactcggaggatgaggaagaagtgagtgaggatggctgccttgagatccgccagttctcttcctgctctccaaggttcaacaaggtgtacagcagcatggagcggctctcactgctcgaggagcgccggacaccacccccgaccaagcgcagcctgagtgaggagaaggaggaccattcagatggcctggcagggctcaaaggccgagaccggagctgggtgattggctcccctgagatattacggaagcggctgtcggtgtctgagtcatcccacacagagagtgactcaagccctccaatgacagtgcgacgccgctgctcaggcctcctggatgcgcctcggttcccggagggccctgaggaggccagcagcaccctcaggaggcaaccacaggagggtatatgggtcctgacacccccatctggagagggggtatctgggcctgtcactgaacactcaggggagcagcggccaaagctggatgaggaagctgttggccggagcagtggttccagtccagctatggagacccgaggccgtgggacctcacagctggctgagggagccacagccaagccatcagtgacctggctgtgcgtagggcccgccaccggctgctctctggggactcaacagagaagcgcactgctcgccctgtcaacaaagtg

SEQ ID NO: 243564 - DNA, 663 bp, Homo Sapiens
aactgtcaacttgtaatacaaaaataccttcaagctgataatcaagaacatttagtgactttaaaaagctgacagaatatttccatgctacacaaaacagttctatacacagctttacagttttaaagttctttgctggcacttgactttatagttaacacaatgactactgatatcaacgaaatactgtttttagcttatatatattttcaaaatcagtattacctcacaaaacagtaaagaaatatcacttctgctgaagaatcctctaagatgaacaccaaaactgtacagctaaaacatattgagaatcatgtaaatgtttaaggcaatagataaaaatttatacaatccagtgaaatttatacatgtccagcagaaaaaaaaggattattcctgattaaatgaagcatgtatcaggtttagatcaacaatacaaacctacaaagcaagttacttcttttttaaggttttttgatgatttggtgacacaactagaatataaccttttagatgaaaattggtgactttgcaaatacacattctaaattccaaaattaaaacgaaacttcttttcaaacagtagaatcctggtttgttgtttttactgtcaatgagcttatagctattctctgtattattataaatgaagtcaccacccaa

SEQ ID NO: 243565 - DNA, 1644 bp, Homo Sapiens
  misc_feature (259)..(298): n is a, c, g, or t
gaaatgcaattttaaaatttaacaattttgttctaaattagttatttctcaatggcagagccaggtcagttgattccagattgaacagcaaagtagtgtcagtgatcaaaagaccaggtacatttacacatggttggacagctctgatgcttacagtaagacattcattcaatacattgaacaactcgatttgtcgtacattcatacaaaacaaaacaatcttattaatttttataacattatcacaaacactagtaannnnnnnnnnnnnnnnnnnnnnnnnnnnnnnnnnnnnnnnctcatttagtagacttagtagacttcaggtatctcttctcagcgagaggagcaagctatcctgagtgaagcaggccttgtgtctacataacaattgctcaatgatgcacagaccacactttaacagtcttccatgtatgaccagcagactgttggcagtatgaatgctgacatcactgttaatgccaagcctttgaagcagtaacatttttgtgaaaccaaagactaactgtaatgactagtatggagttgtagcacctaggaagataatggtcaatatttgttcaatggaatatcctggggccatttttggtacagacccctcttgtaattttcccccacctgttctgcttcatgcagggtgaaactttgctgaggctcatcactaaaagttcaaacattcgatagaagacagattatttttctcaatcaaaattcagatcactttaagtcatttcaaagcttggccctagtacttaagcaggacaaccgacaattcatttagcaaattggttagtatatatatgtgttaatgaaattactgctatgagagagttcttaagtgataatttagtaagataattcacataacaatgtctttaaaaattaaacatagtttccaaaaattcacaagcaatttagtcaaatattaaaggttagtttcaataccactagtgcataaagtctaaaaacgacctttaaagtaaaatgtaaagtaaaagtgaccttaaagtaagactattcattttaaatttcaatattatggcttttcagaagtataagtgaataactgctctgcattaaatcatgctacacaggaaaagatctacttcaactaacaaaataatacttcagtattttaaatgcaaaggtattagtttcaaaacacagagtcatttactctcaattgaacacttccaaatcaataaatactaattttgtctataaaatgtacaagcccaaaggactgaaaatagtgtgttttgttaaattaattaacatgacccttaggctttgtttacccattcatttttttggctctcaaagttagtatcaaggtcaatttcatttcattctgaatgtaatgatcccaaaatttaaattaatagactcagaaccaatgtcatttcaacgtcatatatattatagtatcataaaaagtttacctaattttaaattgatttaaaatttgctgcaagaagagtggccaatgaatgcacaatgaacccaagccaccagaagaatgtgttttaaagagacagaaaacagtatgagacttcagatttgcgaactgataaaataaagcttatactataaattcaatattatatatccaatataagccaa

SEQ ID NO: 243566 - DNA, 1213 bp, Homo Sapiens
ttgggtcagagcctgctcagaacttctgtgggccatattcagaacttttcaaaggattcatacaggcatgtagaaaacaggccccaaagacagatatagttgctggttccactattgatcaagctgtgaacgccacctttgctgctctggtgtatcgcactccagatttatatgagaagctgcaaaaatatgtcaacagtgggggcaaaatagccctgagtgaagagtttgcccaggtttattccttggcagatgggattcgaatatggatgttagagatgaagcagaagtccctgatgagcctggggaatgaagcagaagaaaaacatagttcagaagctactgaggtgaaccctgagagcctggcaaaagagtgcattgagaagagtcttctattactaaaatttctgcccacgggcataagttcaaaagaaagctgcgaaaagttggagactgctgatgaaaccagtcatctccagccactcaacaagcgtcagaggacaagctctgtggtggaagagcatttccaagcctcagtatctcccactgaagccgcaccccctgccacaggagaccagagtcctggcctgggcacccagccaaagctgccatccagcagtggccttcctgctgcagacgtgtcccctgccacagctgaagagcccttgtcaccttccacacccacccgccggcctcccttcacccgagggcgactccggctgctctcctttcgatccatggaggaggccagactggtgcccacagtgaaagagaaataccctgtgctgaaggacgtcatggacttcattaaggatcagtcgctctcgcacaggagtgttgtgaaggttctttccctgaggaaagcccaggcccagaagcatcctggaagtcctgaagataactcagcactgtgcagaatcccttgggcagccccactgcttccatccacctttcatacttttcctgttggaacttctgacctgtcagaaagattttaccaattattttggacacctggaaactgtggtgctgatctacacaaagaaattcgagacacttactatcaacttgttctgtttttggtcaaagcagttaaaggatttagtagcctaaatgacagtccttgctccctgccttatcctgtgttcagacagccctgcttcatcttttgggatatgggctgggaacccaatgatctcgccttctttgttga

SEQ ID NO: 243567 - DNA, 597 bp, Homo Sapiens
ttggcaataaattaattctactgttgcagtgggaaagcagccatctgaaaaatgcatcaacgaccgggctatgctatgttctgatagattttattgacaaatactggtagtgggccagatccggctcataggctgtagtctgccaattcctggactgtatcataggattcaaaatcttatgcttttggactggcaatacaatctccctgttataaacccagtttacttatcttaccttttcagacccagatctgttgttgtattcgtagtatgctggtttaattagctgagtatccttggataagtcatgtaacccccaaacctcaatttcctcatctctttaaagtgtgaataataccacacctaataacattgttgctataaaaattaaagaaaatactatatgtgattactgatcaagcatcttttccttcacctcactccacgtgttccatgacccacccaaacgacttacattctttgtacatggctttttctcacctttgcatcttgcttttactgttccctcaatgacggtctgagtcatttccatgcattcaaattcttcccattcttctatttacagcttaagtccaa

SEQ ID NO: 243568 - DNA, 911 bp, Homo Sapiens
  misc_feature (33)..(48): n is a, c, g, or t
  misc_feature (617)..(677): n is a, c, g, or t
gtgtgagccaccacacctagtttctaatcaggnnnnnnnnnnnnnnnncctaccagttagaaacaatagcttctctcttggggtgatgactttcaattgaaacacattttcatagaataagatttttttcccccaaaagtcagtatttcttaaactcctgttattagaccatgaatatttttctcattgtgaacaaaactccactttgcaacattgcctctgcgtacagtggggagcaagactttataaaactgttgctagctttacgacgtctgcagaattagcagaattcaccatggaggtctgtttgatgttgcagttaaaaatattatccacgaagaagttgaaaaatatgaaaagcagtatcgaggcaaggagcttctgggatttgtcaactacaagacatttgagatcatcgtgcatcagtacatccagcagctggtggagcccgcccttagcatgctccagaaagccatgggtgaggactttcaagcaggactcccaaaccatcactctcataccttccatagaccccagtgccttggagggagagattggaatggagttaccaaaccagcctgcagacacgctcactggtgtgctagattgctactctnnnnnnnnnnnnnnnnnnnnnnnnnnnnnnnnnnnnnnnnnnnnnnnnnnnnnnnnnnnnngcccttctgcctgagaactcgtactgaggtttccaggagatggggaagcacactgagtgccataggcgttccatcgctgtccttcaaacacgtggaggaggcggggaagatggtttctcttgtctttggggggcaggcagaggtgcacatgcacttcatctgtatcacacgcagccaccaacacagccgcgtaaggcagcggtccccagtctttatggcacagagactgctttc

SEQ ID NO: 243569 - DNA, 898 bp, Homo Sapiens
gcagagtctgaacccggtctggacgaggagctgtagtcttctccagggctgtagaatgtccagtctctgtagtgggttctggaatgatggcaagtcccaggtctggaggctgagttgaggtctcctccgtggttggagatggtttaacctctgtagtaggttttgtagttatggtaagctccaggtccagaggttgaacggtggcttgagtcaggtgtgaatgctgagcctgacccttgtctgaaggtggaagtgtcacctcagggtgtcctggaggaggagctgtagtcatcagggctgtagaaggttcaacctctgtcatggattttggagtgatggtaaaccccaggtccaaaggttgaactgtggctcgagtcaggtgtgaatgctgagtctgaacctggtctggatgtggaagtgtcacctcaggatgctttggagaaactatagtcctcttcgggggtgtagaatgtccaacctccgtagtaggttctggagtgatggtaagtcccaggtccaaaagttgaactgtaacgctgggtgacactggatgctgagcttgatcctgacctggtgttggatttgttaccccttgatatactcgaagttggggtacaactttcttaggaggctgagttggggtctccttcatggttggagaaagttcaacctctgtcatggattctggagtgatggtaaaccccagatccaaaggttgaactgtggcttgagtcaggtgtgaatgctctggaggttgagctacaactacattagggaactctggagtctgagctggggcctcctgatgggttagggaagactcaccctcctcagcggtctgtggatgctcagctgcagcctcctgctgggttggagaggggttctcattattaaccaa

SEQ ID NO: 243570 - DNA, 1070 bp, Homo Sapiens
ttgggtttcctgtacttgtttttatttcctggttttaaaacctaatattataaaattgtttgaggaccagttcagctgtcatcaggttgactttgagacctgtctgtagcctctgagaatcctatttctttctttctgagaagtcagctttagaagccccctttcacttctgggacagccgaagatatcctacaagtactattgctgacagtcaggactaaatagttcactcagcagttataaagtaatggtcactggaagtttactatcttctgaagcggcagcctttgctgctacggttcctcaattatctgccctattggaaatgggaaggaagagagaggttattagcttttcatagaaactacgttggaattggcctattcctgttttgaccagatacctgtttgttacacattctggtgtatgcggtactccacgagattagaagtgcatattcaactgcagaaaccggaaccagcatggggagtctaaatgttaccagataaggtttttagggcattttggttatagtgctaagcatttttgggaaaccgtaaagagggttaggataggtggtgggaatagaggctgacagcagttttcagatgtccgtgtgttcatgcacgcagtatggcccaggtaagttcaaaaccttattcttaggctatttcgatcaaccctgccaggcaattttaaattcttggtgatgtagggcagggacactgtggatggctgaggaaactctgggctctgctggctaaccagcttcgctccactctgcagaggctgtctcatcttttgtgatctgcaaattcttgctttggtcttcatgtgaactctcagggaatttgagcagttcagtctgttaccagtgttgtgagcctacctggtcattttagctgttgcttttgtaacgtaggcttttggttgttcctcagttagaattgtgggactttcctgaaccttctgttcttgtttcttccctgaaagtaaactgaatcctgggtactacacaagatttgccatagcggatcaagccattggtctatcaagtatgctgtcttgtc

SEQ ID NO: 243571 - DNA, 999 bp, Homo Sapiens
gaaaaatattttgtttgtgtatttcttatcaaacagatatgctaaagttctgtttagagagtaatagcattttattctaacttttaaaataaggtagtccatttgcagcagcttgatatagaagtaaacaaaaatttttaatattaataaaacactagcacatacactgaaagcatctaagaaattcaaaatataaaacacttaccaagtaatgaccatatgagtggtaacatattgaataaaggccctttgaagaagttggagagttatgattactgagcaggctagataattaaataattacacattttgattgaaaaatatatgtagttcattaaaatagggactctaactccacttctctagctaagcttctattcagatgccacgtttgtactttaattagaacaaaagaccgacattaacttcaatgcaacataataattcataataatgattgtatattaatctcttgagcttgcaggaatatagcacatgacatatggcatgatacaggcacctgtgtgatcctttggggacttaggtggtgcatattaattagcccctggaaaataaaatctgtttccttctgagaaaagctacctcagtgcttattggcttaagccatcaaagaaattagatgaaatactgttaggctgggtctgcactcattaaagctttgtctagatgtaagcactgaatcaactgcctctgagttaagtcttgactgaatggtgcataagaaatcagagtaatcatgcatttctttggccttgatgattggattttggcatttaaaaaatccatcaaaattaccattttggttacagaaaattatgtaattgtataattcaaacaaaataatgtaaccagaaacactaaaattggaagccacttcattttcctaaatgctgcttgaaactgcctcaatttaacccttttatttgtaaattctcgtttttcaatagcccgaatatgagccaacttttttgtacaaag

SEQ ID NO: 243572 - DNA, 257 bp, Homo Sapiens
ccgcctggcgcgggcgctggggtggagttctggcttcaggatctgctcgccgccgacgacgacctcgacccttccattcagacccgcgaggacgcgcgccccgccccggcgcccgccccgtccacgcccgagccgggagcgccaggtccacggggcttcccgcgctcttggggggctcctgccgcggcgtcgggggcctgggcagcgaggtgggcagcgcgcgactcccagctggcgagaggctgggcttgggccaa

SEQ ID NO: 243573 - DNA, 1291 bp, Homo Sapiens
acaaaaaagttggatttggagtccatttgaatgagactaagcatttatctgtaggaaaagatattattcaaaacactggttctcagtgggaggtaatggaaagtagcaagttatgtggccttgaaggttccattttcagaaatgactggcaaagcaaaagcaagattgacgtacaaggacctgaagtgggatatttcagtcaaatgaaaatcatctctgaaaatgtgcccagttacaaaactcatgaatctcttactttacctcggagaactcatgacagtgagaagccctatgaatacaaggaatatgagaaggtcttcagttgtgacttagagtttgatgaatatcagaaaatacatactggtggaaaaaactatgaatgtaatcaatgttggaaaacctttgggatagataactccagtatgttacaactgaatattcatactggtgtgaaaccttgtaaatatatggaatatgggaatacatgtagtttttataaagactttaatgtataccagaaaattcataatgagaagttctataaatgtaaggaatacagaaggacctttgaaagagttggaaaagttactccacttcaaagagttcatgatggtgagaaacactttgaatgctcattctgtgggaaatcctttagagtgcatgcacaacttactcgacatcagaaaatccatactgatgagaaaacttacaaatgtatggaatgtggcaaggacttcagatttcattcacagcttaccgaacatcagagaattcatactggtgagaaaccctacaaatgtatgcactgtgagaaggtttttagaattagttcacagctcattgaacatcagagaattcacactggtgagaaaccttatgcatgtaaggaatgtgggaaggcttttggagtatgtagagaacttgctcgtcatcagagaattcatactggtaagaaaccctatgaatgcaaagcatgtggaaaggtctttagaaatagttcatccctgactagacatcagaggattcatactggtgaaaaaccctataaatgtaaagaatgtgagaaagcatttggagtaggtagtgaacttactcgacatgaaagaattcacagtggtcaaaaaccttatgaatgtaaggagtgtggaaagttctttagacttacgtcagcccttattcaacatcaaagaattcatagtggtgagaaaccttatgaatgtaagtatgtgggaaggcctttagacatagttcagcccttacagaacatcagagaattcatactggagaaaaa

SEQ ID NO: 243574 - DNA, 1558 bp, Homo Sapiens
  misc_feature (1215)..(1316): n is a, c, g, or t
tgacagatttacctcagatgttatagaaaagatgatcccatacaatgattagagagtacttgaggaaaagggtttactttcactgctctactatccttttttcttggaaaactatgacaaaccttttggagttttgtagagcctaaaagaacttaccaacacaaacctgctctcactttgctcctttggcaaacactgagggggggcctgagagttaccttatttgcaggctaacaaattaaccctaacctcccacggtttcacagatactggtcaaagacacgagtctcctgggtcagacacaaaggccagtttcttacagcagtagcagtagccagtgcatttgcatttgtgcttatcccctgagtatctgttcctatgggataatgcagagaagaccagggaaagcctgtgcatgcagtgagttgtattagaggagaagaaccttggacttagggatccttattggacagtaagcagtctaccattttctcttgaaggaggcactctgtctcccaaagctgtttgttatacagatatccttgaaaagatgttgcaaaacaaaggcagtcattgcctctgctcacagataggtagaaagaaatctatggagaattgtcttcagcatcttataaagggaggaatggtaataaatgtccacattcattcagtcaacccatactgagcactaaccatgtccctggccctgttctaggcatgaggatatggtggtgaacagtgccctcgtggagctaacattttagttggggaaatggacaataaagagatctgttacatagtggtaagtcctataagaatggaaagcaggatgagagagtggcaggggagttcttttacattatgagagcaatactgtactggagcataaactgcagtaggaatagaaaagaaaaaagaaagattgattagctttaagtaataaatctttgttcacatgattaatttgaagttgtttcttggttggctgccagttgtagctattttgtctctactaaaaagggggaaaaattagtacctgccagagattaaataagaatgtattcagctcatgatttatctattaggaggtgaaatttccaggtggttagtcaggtgactttgcagtcattcctggtttgagtcctagttttgtcatttaccagctttgtgaccctgggtggactaaccactccaagtcttgtccacactgagggnnnnnnnnnnnnnnnnnnnnnnnnnnnnnnnnnnnnnnnnnnnnnnnnnnnnnnnnnnnnnnnnnnnnnnnnnnnnnnnnnnnnnnnnnnnnnnnnnnnnnnttagcttttttaaaatgcaagttattcttctgatagaataatcttgcagggagctcaaggccatttattattaagatccttcattcctatttagcttaaagtctgtttcttcctgatatgtagtgaagtggtaagtatttatgataacagatgaaatattaaaaaaattatcaaattatcagctctaatagcctcattttgcagatgacatatgaaagtccataaagttaactaatttaccc

SEQ ID NO: 243575 - DNA, 915 bp, Homo Sapiens
ttggctcagtgtttttctcggacagatcgattactcagacacaaacggatgtgccaagggtgccagtccaagacttccgacgggcagttttctctataggcgcaaggggccccgggtggtgggagtgatcagaagaacctgccgaagagcacaccccctctggtctgatggtcccaccaccgccccatgtgaacctgtcccactcctggaggagtggacccaggagaccagaagagtgcatcaggggacagtggccccagaacctcagctctgtaaataatctgagactatgagtatctcggggaagttcttacagcattcctgggtaggggagctagtccctggacccttggctgaggtcataggtggggactcaaggtacaggaccaagactgaagtgtggctcccacaaccttggactccagctggcagctgaaatggaaaagattggggaaggggatttgtttgttctgttcttgtttttgtttatccaaaagcaacttcagcgggtaaactgtggatacaggtaatccagaggcataagagtcctggtccaaagtagggactatagctggtccagctctccccaaaaattgggtttttagttgcagtagctcctcagtgtttcacaatcctgcacttcgcctcctttttgaggaagaataaggtcaggaatggcagctgagcttactttggcttccttatacactgtagggacaaaaggaaaaacggggtggagcagacaaagggctggatccaaaaagtggatggcacctcttccttcctcaagggaaaaggaagagttgtgccagtgggtgttgtcatggcccatgtcacattggcacctgatggcatcagctcaaatgccttttagaggaaacttgggtgagagtggcccatgaagcccttttcttc

SEQ ID NO: 243576 - DNA, 1422 bp, Homo Sapiens
ttggcttctctgtagcatcccattattcaaagggggacaaaactccctggctgggccccaggagtgctggctgctgacagccagccgtctgcagacagtgactgcccaggtgaagatgtgtctgaacccccattgtctggccctgcacagcttcatagacatctacacaggtctctttaatgtggggaacaagctgctggtaagcctggacttgctttttgcaatcagaaatcagatcaagctcggagaggaccccagagtgtccatcaatgttgttctgaagtcggtgcaggagcagacagagaagactctgacctcggaggagctgagccagctgcaggagctgctgtgcaatggctattgggcctttgagtgcctcactgtccgagactacaatgacatgatctgtggcatctgtggtgtggcccccaaagtggaaatggctcagaggagtgaagagaatgtgctagcactgaagagcgtggagttcacctggcctgaattcctgggctctaatgaggtaaatgtggaggacttttgggccacgatggagacagaggtgattgagcaggtggcatttcctgccagcatccctatcaccaaatttgatgcgtctgttattgcccccttcttcccaccactcatgagaggagctgtggtcgtcaacactgagaaagacaaaaacctggatgtgcagccagtacctggcagtggcagtgccttggtgaggctgctccaggagggcacctgcaagcttgatgagattggctcctacagtgaagagaagctgcagcacctgctaaggcagtgtggaatcccctttggggcagaagactccaaggaccagctctgcttctccttgttggccctctacgaatctgtacagaatggagctagagctatacggcccccacgtcacttcacaggtggtaaaatctacaaggtgtgcccccatcaggtggtctgcggctccaagtatcttgtgcgaggtgagagtgcccgtgaccatgtggacctgcttgcctcttcccgccactggccgcctgtctatgtggtagatatggccacgtcagtggccctgtgtgctgacctctgctacccagagctgactaaccagatgtgggggaggaaccagggctgtttctctagccccacagagccacctgtgagtgtgtcctgcccagagctcttggaccagcattatactgtggacatgacagaaactgagcactctatccagcacccagtcaccaagactgccacgcggcgcatcgtccatgcagggcctacagcccaatcctggtgaccccagtgctgggcaccactccttggccctgtgccctgaattggcaccttacgcaaccatcctggcctcccatcgtggacagcaaaccaaaacggtgtccgccagcggcccattgc

SEQ ID NO: 243577 - DNA, 1187 bp, Homo Sapiens
acatttctctaaaagttaagtcatattttaggagggaaggaaggaaccatattgcctttctttggaatggaaaacccatctcggatgattgactttagacaggccttcccctctgcgaagaccacgaggcatttttcagtaaggtataaagaactaaactctggcagacactgtggaagcccacgccttatctttagaaagtccattgtatgctcctcacacacggcagacggcttctgtggcgtgcaaagcactacatgctcacaaagaaattctaaatggctttcagaacacagtactatggctctaggggacgggtgcgggtggggactgaaaggtgaaatgatttagaggaagccatgttgtcactttttccatgagccacgtagtacagagaacgcggcactccataaggaccatttgtcctgcagtgtgggatgcattttaataaaatgattacactattttgtttcaattatatctttcccagtgctgaatctcttgcgtgacatggtcccaaggttcactaataaagcgttttctgtgaggaaggtagttttgctttagatgagaggcagccctgctgccctgactactggcacggaggcttagtaggtgtctttagcctgacagcagggaccctcatctgtaacttgggctgctggcttgggctgtcggagctggcgggcacctgggctgggttgggagcgcctggagtctggagcggggccgacgccgtggtcaccacctgctgctgaatgagtttctgctgaaccacctgggcagtcgcggtcactgcagggatcatctgcacctgctgcccggccgccgtcgcctgcgtgagcgccacagtctgtggagaagcctgagccgagagagtcagaaaacacacattgcccaggaaactcagtccagggacaggaaaatggacgttctttgggatggggaggactcgagaaacttcactgactatgcttttatgacacggaagaatgaccagtcacacaacagtatgacctctggtttccaattaaacacaagtggaaaattaaaagatggttgcttttagactaacaccagatgcctcttgggaaaagggtgagagctgggtcagggactgattttgttgttgtagtaaagcttttaatagagtttggtttcttgaaatctatatgccagtgtgccaa

SEQ ID NO: 243578 - DNA, 1607 bp, Homo Sapiens
  misc_feature (44)..(66): n is a, c, g, or t
  misc_feature (511)..(566): n is a, c, g, or t
  misc_feature (1073)..(1084): n is a, c, g, or t
aaaagtggaactgacagatcaaagagcatgagtattttcaaatnnnnnnnnnnnnnnnnnnnnnnnctccaaattactttgcctctattattgccatatgaaatgcccatcccactgcagtctcgctagtatagcaggctgataaaatggaactaggttagtctcaattttggtggaggtcccccgagtgaggtgtgagactagataactggttttgtgacctttgctaactacccatctctagccaataaaggggattggagagactgagaggagttatacattagaagagcattttggagagaggttttggtatattatgagtttcatttaccctcaagaaggatgggtggggtgtgctccctctgacctaggtcctagggaaagggcttcaacagtaccacttggaaagctcgctatgtgaaaactgtagtttgggagacatatttgaccagtcttttaatttatacttggaaatctaaaggtcttggctagctactctaagactatnnnnnnnnnnnnnnnnnnnnnnnnnnnnnnnnnnnnnnnnnnnnnnnnnnnnnnnntctgcaaatacatgacggagctagaattgaaacccagacttgattaagggcttgcatatttacccattctgtaatacttcctctcatttatctgtgaaatctctcttattttcattgatatttatcatactttggcctgaattcttcatcttccaactttgaattctttggcaggagactccaccaatacaatttcaacctcccgccagcatccttaaaaccacttatgagatcagctatttatgtataggactgatctaacgtctaaaaattttgagtttattaaataaactctaagtgactttaggttcctttcagggaattctttttcggatttacagggtgtaacaagttgaattgtgtctccgaaaattcatatgttgaagtcctgaaccccagaacctcagaattaccccttccttggaaataaggttgttgggagatgtacttagttaaaatgaggtcattagagtgggccctaatccaatgtaattggtgtccttattnnnnnnnnnnnngaattttggacacagagacagacaggcatagagggaagacgatgtgaagagacagagaaaagacagccatctatgagttaagaaaagagactgggttgtccacagtagaaatggatccttccctctctcctctcaaaagcagccaaccctgccaacaccttgattttggactttcagcctccagaactatgggaataaatttcagttgtttaggccacccagcttgttaaaatagactttgttaaaatagaccttgaaaacgaatacataactgcttgctgagtagttgaaacttggttatgaaatcttgaagttcaatacagaaagtgcaatcatcctagagaaaatgggaaaatccagttcttacaatttttgcaattccattacagaacaatagttctcctatttttagcatacatttcatggtttgaatttgcctcccactattatgcttcaaagaagtttaaataatgactttcctctattttcaagctctaactccgtggtttgactttcaagccaa

SEQ ID NO: 243579 - DNA, 1370 bp, Homo Sapiens
  misc_feature (1009)..(1027): n is a, c, g, or t
ttggattatttttacctgttttatattcacagttggtgtcctgtcactttgttttaaaataagctagaaccaggatgcttccttattggaaaggctttgccagtccttaaggtacaatgagtgatgctgcaacttgcaaatgtaccagcatttaaaatttcttttcctgggaatcaaggtaactcacacgactacttgcagtacaaattttttgcttctctttcgacatgaaatgtacttggtgggttttccttccttttattaaactaaaactgtgtggaaaaggttgatttttcttaatagattctggattccactcacagggagatgggattcctttcttgtccaaacaaagggagttgctctaaagcgagcatcagttaaaatgtaggggaaaatgtattctgtatgtagtgtagataatactttgtgaatggacaacagttacatagtgtcttggtagcaccagccagtgtttcccagcccagagtttactgacttgtaattctctatccaggacatcaggagtgagggatggaaaaggggataaaaggcctggagccacactctatatggctgaggaaggagctagggaaagagatagacacaatggggtgaaaacaattttgccgcccctgcctggaaactgctggtggggaaatgatggtgaagggtgtttgcttgaactcatgagacggtccaaatctcataaactagccttctcaaaatcccagcaatataaagcactgtttttcttcagtcgtttaaataaacttgtaaatacattgaagtttacatttccatgtgctgttgatcaacggcgccacctgtgtttgctgagactggtctctgagagagttttatgtcgatcgaggcctgttgctcattaagctgagtgcagacgtccttaatccctgcagatagtgggatgaaagcaagttctgtaaaatgaagcacaacatagccaggagtgaagagatggcagatgttaatttcttaaaattttccnnnnnnnnnnnnnnnnnnngcaaatacctcacttggataatacaaatcaggacatgttggtgaggggctggctgcttggctgctgcttttattcacacttgttcagggagagcacagagaatacccttcagcatggccactctggacccaagaggagaaaaaaacggaagcttttttaggagaaggaggacttgctggaatccaagatgtgaagaactcttggtgactggctggctggccagcgggcaccacacctgcacttgagtgcctcgggcttgcttattaataacgcacagaagaagcatcacttctcaccatctcctggcacgtatggagcagggagcaaggctatgttcccgaaa

SEQ ID NO: 243580 - DNA, 1486 bp, Homo Sapiens
ttgggattcatgctgcctgcaccctcaaaagcacctgcagaaaaagttggaggcgttttatgtacagaagaaaaaaggaactttgcgaagcctagtccttctgctccaccaccagctagctctctgcagtcacccctcaattttctggcagaacaggctctggcactggggcagtcctctcaggagaaaaaaccagagagttctggctacaaagagctgtcctgccaggctcccctcaataagggcctgccagaagtacatcagtccaaagctaagcaccacagcttgccacggacgtctcacgggccccaagtggcagttcctgtgcctggcccccaggtcaaagtctttcatgccggcactcagcagcagaaaaacttcacgcccccatctccatttgccaataagctccaaggcccaaaggcttctcccacacagtgtcatcgttccctcctgcagttagtgaagacagcggccaaaggccagggcttccatccctctgcaccagccacctcaggaggcctgtcagcctccagcagcagctctcacaagaccccagcctcgtcctcttctgccctgagccatccagcaaagccacattcagtcagctctgcaggctcatcttacaagaataatccctttgccagctcaatctccaaacatggggtttcttctggcagctcttcctcgggaggaacaccagtccagagttctgtttctgggagcctggtccctggcatacagcctccctccgtgggacaggccaccagccgacccgtcccaagttcagcagggaaaaaaatgcctgtttcccagaagttgactctggtagcccctccaggcggtccaaacggagattccagtggtgggacccagggagtggcaaagttgctgacctcgccgtccctaaagccctctgcagttagtagtgtgacatcgtctacctccttgtcaaaaggagcgagtgggactgtgctgctggccggctcctctttgatggcttcaccctacaaatccagcagcccaaagctgtctggggccatgagctcgaactccttgggaattataacccctgtccctattcctgtccatgtgctctccttcagcgctgactcctctgccaaagcaggggtctccaaggatgccatcgtcacaggccctgcccccgggtccttccaccatggccttggccacagtcttctggctggcttgcactccagcccgccccatgcagcgcctctcccacacgctgcggtgcccacccatatcccgcagagtctgccagggaaaatccaggtagcagccagaggccacagtgcaagactttgagaggagcagctttaaatctgtccaagtgtgaaaactccatcagaacagatttgtgggagcacagcaagcatgtggtgcttctcagcttcacgggaaagggcctgctgtaccacggaaattgtgaccgcttcagaggcaaggctttgccacttgggtc

SEQ ID NO: 243581 - DNA, 931 bp, Homo Sapiens
ttggcacgcagccaacatggctccagtggagcacgttgtggcggatgctggggctttcctgcggcatgcggctctgcaggacatcgggaagaacatttacaccatccgggaggtggtcactgagattcgggacaaggccacacgcaggcggctcgctgtcctgccctacgagctgcggttcaaggagcccttaccggaatacgtgcggctggtgactgagttttcaaagaaaacaggagactaccccagcctctctgccacggacatccaagtgcttgcactcacataccagttggaagcagagtttgttggggtgtctcacctaaaacaagaaccacagaaggttaaggtgagctcatcgattcagcacccagaaacacctctgcacatttctggtttccatctgccctacaagcctaaacccccacaagaaacagaaaaaggacactcagcttgtgagcctgagagcctggaatttagttccttcatgttctggagaaaccctttgcccaacatcgatcatgaactgcaggagctgctgattgacagaggtgaggacgttccaagtgaggaggaggaggaggaagaaaacgggtttgaagacagaaaagatgacagcgatgacgacgggggtggctggataacccccagtaacatcaagcagatccagcaggagctggagcagtgtgacgtccccgaggacgtgcgggttggctgcctgaccacagacttcgccatgcagaatgttctgctgcagatggggctgcacgtgctggcggtgaacggcatgctgattcgtgaggcccggagctacatcttgcgctgccatggctgtttcagacaacgtctgacatgagccgagtgttctgctcacactgtgggaacaagaccctgaagaaagtgtccgtgaccgtcagcgacgacggcaccc

SEQ ID NO: 243582 - DNA, 1340 bp, Homo Sapiens
ttggcccagctccctgaagcggctgtttcgagccacgcgcccatcgggtaccgaggcacgcgccgggcgtcacgtgcgtttcgcggcgagcggaaatgacgcgagttgtgtgagccgccagtatggccgggctatggcggcgagcactggctacgtgcgactgtggggagcggcgcggtgctgggtgctgcggcggccgatgctggccgccgccggggggcgggttcccactgcagcaggagcgtggttgctccgaggccagcggacctgcgacgcctctcctccttgggcactgtggggccgaggcccggcaattgggggccaatggcgggggttttgggaagcgagcagccgcggcggaggcgcattctcggggggcgaggacgcctccgagggcggcgcggaggaaggagccggcggcgcggggggcagcgcgggcgccggggaaggcccggtcataacggcgctcacgcccatgacgatccccgatgtgtttccgcacctgccgctcatcgccatcacccgcaacccggtgttcccgcgctttatcaagattatcgaggttaaaaataagaagttggttgagctgctgagaaggaaagttcgtctcgcccagccttatgtcggcgtctttctaaagagagatgacagcaatgagtcggatgtggtcgagagcctggatgaaatctaccacacggggacgtttgcccagatccatgagatgcaggaccttggggacaagctgcgcatgatcgtcatgggacacagaagagtccatatcagcagacagctggaggtggagcccgaggagccggaggcggagaacaagcacaagccccgcaggaagtcaaagcggggcaagaaggaggcggaggacgagctgagcgccaggcacccggcggagctggcgatggagcccacccctgagctcccggctgaggtgctcatggtggaggtagagaacgttgtccacgaggacttccaggtcacggaggaggtgaaagccctgactgcagagatcgtgaagaccatccgggacatcattgccttgaaccctctctacagggagtcagtgctgcagatgatgcaggctggccagcgggtggtggacaaccccatctacctgagcgacatgggcgccgcgctcaccggggccgagtcccatgagctgcaggacgtcctggaagagaccaatattcctaagcggctgtacaaggccctctcctctgctgaagaaggaatttgaactgagcaagctgcagcagcgcctggggcgggaggtggaggagaagatcaagcagacccaccgtaagtacctgctgcacgagcagctaaagatc

SEQ ID NO: 243583 - DNA, 1122 bp, Homo Sapiens
ccgacagcagtgcctgatttgagatggggtcccaggtctcggtggaatcgggagctctgcacgtggtgattgtgggtgggggctttggcgggatcgcagcagccagccagctgcaggccctgaacgtccccttcatgctggtggacatgaaggactccttccaccacaatgtggctgctctccgagcctccgtggagacagggttcgccaaaaagacattcatttcttactcggtgactttcaaggacaacttccggcaggggctagtagtggggatagacctgaagaaccagatggtgctgctgcagggtggcgaggccctgcccttctctcatcttatcctggccacgggcagcactgggcccttcccgggcaagtttaatgaggtttccagccagcaggccgctatccaggcctatgaggacatggtgaggcaggtccagcgctcacggttcatcgtggtggtgggaggaggctcggctggagtggagatggcagcagagattaaaacagaatatcctgagaaagaggtcactctcattcactcccaagtggccctggctgacaaggagctcctgccctccgtccggcaggaagtgaaggagatcctcctccggaagggcgtgcagctgctgctgagtgagcgggtgagcaatctggaggagctgcctctcaatgagtatcgagagtacatcaaagtgcagacggacaaaggcacagaggtggccaccaacctggtgattctctgcaccggcatcaagatcaacagctccgcctaccgcaaagcgtttgagagcagactagccagcagtggtgctctgagagtgaacgagcacctccaggtggagggccacagcaacgtctacgccattggtgactgtgccgacgtgaggacgcccaagatggcctatcttgccggcctccacgccaacatcgccgtggccaacatcgtcaactctgtgaagcagcggcctctccaggcctacaagccgggtgcactgacgttcctcctgtccatggggagaaatgacggtgtgggccaaatcagtggcttctatgtgggccggctcatggttcggctgaccaagagccgggacctgttcgtctctacgagctggaaaa

SEQ ID NO: 243584 - DNA, 864 bp, Homo Sapiens
tggattcaagcgattctcctgtttcagcctcccaggtacactgatgctgaagtactatgagccttcggaacttgtggagagactacaaagttttggttgttatggtccctttagttgggctcatacatttggggtggtacagaatcaaaagcagccctgttttccaaatacctaaaaacgacgacattcctgagcaagatagtctgggactttcaaatcttcagaagagccaaatccaggggaagtagcaggcttgcaatcttcaggtaaagaagcagctttgaatctgagcttcatatcgaaagaagagatgaaaaataccagttggattagaaagaactggcttcttgtagctgggatatctttcataggtgtccatcttggaacatactttttgcagaggtctgcaaagcagtctgtaaaatttcagtctcaaagcaaacaaaagagtattgaagagtgaagtaaaataaatatttggaattactaatttgtcattaaatcattctatgctgattagcttcataaacattgaactttttgattttatagccacaatgctgcatattcatactttaattcctaaagaataatttttaatgttaaaacgtgataatgcaataaatagaaaaatgtggtttacaaaataaaaacggtcttcactagttaccacctgaagtaagatgtctcgtttggaagctaagaagccatcattgtgtaagagtgaaccactgacaactgagagagtcaggaccacactttctgtcttgaaaagaattgtaacatcatgctatggcccctcaggtaggctgaagcagctgcacaatggctttggaggttacgtgtgtacaacctcacagtcct

SEQ ID NO: 243585 - DNA, 838 bp, Homo Sapiens
aataatagcattcaaaataattttgtcttgattactatgatttctagcaaaactcccttacctcccccgcttaaatctcacaccaagggctactgcctcactcatgtcaccctagccttgctcacattgccatttactgcgtgctctcaacaattaaaagatggggtcactccttgaaggagcttggtccagggagggggcagagtcgtgggcaggcagtcttgattgctgtgtgttgagtaccacgatggaggtacagaaacgggaatgtccaaatgagactgaagatgcaggagtttgccaggtggagaaggactgacaggtttatccagtagggcactgccactacaaaggtgcagatgccagcaagagtcccaagcctgggggtgctgggggtatacaggaggtcctccatttgccccacacacccaccaggtccatcgtctgtccttctctgacacgtattggtccctgttgtcccagttccccaggccttctggcttccagtgggattgagccaatgggaggcactcagagaagatggcagagagggaagaggaggaagacggggcattgcttcccagctcccttgccaccccagtgcctctgccatagagtgtctgctgctgctgctggcctctgcgtcccccacttccttgttgggtcccctcaccctactctctagaagtcattcctccattaaagtctctttattggaatcatctgggctgaattctgcttcctgccaagaccctggctgcatgggggagaggaggtaagggggtcaccagggccagcgtctggatgccttgggtgtcaggcccagaagcatatcctg

SEQ ID NO: 243586 - DNA, 1657 bp, Homo Sapiens
ggtaaataaaacaagcaaactgaagagagacaaaatagaccaatattatcgtgaaatccatcttatccatcatctcatcggttcaacaggctcctcgtcctgggtgagcttatggttagaagtttttttagcaaagatttattacatacatagatgtgtgtgtgtacatatacttacacatacatacatacatatatgtgtgtttatttaacggtgctaatcaatcttgagcaggtcacgtgactggtcatgcggactctaaaatcatatcagattttttaaaatccttgatatatgcagatgttatacagattttcttagcagtgtaataacgttaaactgaagaaataaccatcctgcaggcttcaaaggacgaggtcagcaatatttcccaacatggcttgggggaaaaggatagttttgtctccttttgtattcaagtaatgcaaagtgcatttttgtctctaagtagcttttgactaaaagactttgtagtgtaaagggtgttatacaaactgtaatggtgtgcttcaaacaaatgctagaccctttcacctttgtcgtatatacaaagctgttaattatgtggtatgaattaactttgaacatgttgaaatatgtagcatgtctttaactcagacgaagattctgattgcacaggttgtgttctagccagttgtgatttatttgttcagaaacacaaatgtgaattgcactcttatcatcagaatattggatgagttcagtgatctttaaacagctcagaagtaatacttgaacttcatttgagtagcacaaagtttacatagccccttttaaatgttaattcgttccatttaagttttccattttcagatgcaactgggtatttttcctcttggaaatagtacgtactttgctttggtatgtagcaaaaggcttccatttctggaagggttttcttgttcttaaacaaggtcagccaggtaccagattctaaaagaacaaattgtcccccacccctcaagtggccttctgactgcacgagaatgtgctactaccctctgtagtctcccctaacacgagaggtcagtgaaattgatggaggaagtgcaaggcttgcttcccctcacccttaaagcttaaagcagttgtaagattttcagtccagcacatacagtcccagtgcccagcacaccggaagtttgtatactggcctcttatcttgtcttcaaatgtgcaggaaatttgaaactgtcatctggaataggttccatctcttatgtgtgttagatcaaaccaaagaagcccccagccatgcccaaatgctgcttcaaaagcctgccttccagtccttacaaaaaccttgcaggattaaatgtgttaacttttttatttttgtacagtttctaagtgatttttgctagtgatgttaaaatgaattaagtttatttgaggggtgtgagcacctcctccatttaaataaactggtgactttccttttattttttaaaagtggaaacccgttgtgtgcctctcgatttaagggtttctgatgacattattcttaagaccagcattgatcctttatatacaaatataatgttttccttgtttttattgctatttcagaggaaaatgaaccttttatttttgctctacccagtaactgcgctgg

SEQ ID NO: 243587 - DNA, 1392 bp, Homo Sapiens
ttggcgttgccttactcccagatcagtggcctgaatgcccttcagctccgcctcatggtgcctgtcactgtcgtgtttacgcgggagtcagtgcccctggacgaccaggagaagctgcccttcaccgttgtgcatgaaagagagattcctctgaaatacaaaatgaaaatcaaatgccgtttccagaaggcctatcggagggctttggaccatgaggaggaggccctgtcatcgggcagtgtgcaaggcagaagccatgttagatgagcctcaggaacaagcggagggctccctgactgtgtacgtgatatctgaacactcctcacttcttccccaggacatgatgagctacattgggcccaagaggacagcagtggtgcgggggataatgcaccgggaggcctttaacatcattggccgccgcatagtccaggtggcccaggccatgtctttgactgaggatgtgcttgctgctgctctggctgaccaccttccagaggacaagtggagcgctgagaagaggcggcctctcaagtccagcttgggctatgagatcaccttcagtttactcaacccagaccccaagtcccatgatgtctactgggacattgagggggctgtccggcgctatgtgcaacctttcctgaatgccctcggtgccgctggcaacttctctgtggactctcagattctttactatgcaatgttgggggtgaatccccgctttgactcagcttcctccagctactatttggacatgcacagcctcccccatgtcatcaacccagtggagtcccggctgggatccagtgctgcctccttgtaccctgtgctcaactttctactctacgtgcctgagcttgcacactcaccgctgtacattcaggacaaggatggcgctccagtggccaccaatgccttccatagtccccgctggggtggcattatggtatataatgttgactccaaaacctataatgcctcagtgctgccagtgagagtcgaggtggacatggtgcgagtgatggaggtgttcctggcacagttgcggttgctctttgggattgctcagccccagctgcctccaaaatgcctgctttcagggcctacgagtgaagggctaatgacctgggagctagaccggctgctctgggctcggtcagtggagaacctggccacagccaccaccacccttacctccctggcgcagcttctgggcaagatcagcaacattgtcattaaggacgacgtggcatctgaggtgtacaggctgtagctgccgtccagaagtcggcagatgagttggcgtctgggcacctggcatctgcctttgtcgccagcccggaagctgtgacatcctctgagcttgccttctttgacccgtcactcctc

SEQ ID NO: 243588 - DNA, 1035 bp, Homo Sapiens
  misc_feature (268)..(276): n is a, c, g, or t
  misc_feature (546)..(611): n is a, c, g, or t
  misc_feature (630)..(657): n is a, c, g, or t
ttgggtgaaaccaagaaacactctgtactgtgtgcggacccgcagtgacggccagtaaagtggacttaactcccaagtgtgtcgcgccggacaccgggccctggacatgctgcttccatgttcagtcccttccctgcttctcgctgtctttcttttcccacctcccaccccccagttttcagattttctctcatccaataatgtaaaactatcgtgtacgggttcctccctccttttctcttctcccaaatcttttcccttcaaaggnnnnnnnnntgttcagaggtccctgtcttctgtccccatcttcctgccgatagctatcccctgtatgatgttggatgctcctcacatgctgagtttccagccttttctgaaactcagtagctggggagagggcagggaggcttcctgggccttccagcctccttccccacctccttcccaaaccctcttgggaactcctcagggacaactactgctgagtttgggtgcaccctaagatggaggccaggtagcaatggggctggcctcagagagagcgcnnnnnnnnnnnnnnnnnnnnnnnnnnnnnnnnnnnnnnnnnnnnnnnnnnnnnnnnnnnnnnnnnncagcctcagagcgcgcgcnnnnnnnnnnnnnnnnnnnnnnnnnnnncgtgcttgtgaccctgtattgtttgataagatccattcagtttccccaagtacctgttttcattcccatttttcccattgtttaaaaccatcacttttttgtctttgggaaaccacaagaacaatttctctggagacaaggctgtgtctctctcctggtcatttttgttccagcctcttcagactgtgcaatctttcaacgagaactccctctcttctcggtagctttgaatcttaagcttctacgagagagtggtagaactggatcatctcctaatcccatatagttgtgcttttctttatttacttcataccccaagaccctttcccagcaacaaaaaaccttggagcacggatagtagggaagaggggttctggg

SEQ ID NO: 243589 - DNA, 1336 bp, Homo Sapiens
ttgggtggccattattgatctctttcttctgttttggagagtttattattaaaaacatttctttgataaaatggccatcatctagtaatacctgtgtttgtttagatcttggaaatgaataagctttgataatatttgtaaatgaaccaaattattactgctaccactaacaggttgtaaatagaagactaatacttaattaaagtcaccttcctaccattagagcagaagacagctcctatagttttgtattttggcagctatgagatattttcatggtaatgtcaacatggtcaagcactttgtaccaagttattaagtaacataatttttaaaatttaaagaatgtgtcttcaactaaaaactttattctttagcatttatttatatttctctgtagggtgttatccctgtgacattgtctctttagtttgctctttcaagagatacttacagatgttgagatggctgccctgcatttccagctaatctcttctgctctaaatatttaaaaacagttcttctcaaacattttcattcagatagctttctgaaagttccctatccctctttaccataattttttaaatgtagccacattgtaatagtaaacttcatatataatgagtgcttcatatttttgttatgggaaagcaatatattatgcagccagtctgtagaaacattcagatccctcttcctttactcaaatacagtttcaaaaggaagactcatgagaaatttcataaaatacaagtttttagatgtttatgctttgcctttctttttaaaggtgttttcctgctttgtagtctctaactctgaaatttaaaatatgtaaactaaagtggttttatttgtgcttaacccaatttaaactcaatgtaaaatgttatatatgcatcagtacagcattttcaacatattggcaacatattttaaatgaaaacactaaaacaattcttagtatgagacaaaactgtaaggaaaaagagtgttaataccatgatgcattaacataaaatatcaaacacacaaagtcataaaatgaaaatttacagttttacctgttcatatctagtgccccacagtgtgtgtcaaccaaaggtggcagtggctacatctgcctgttggactggtacaggttacaatatgtcctcttccattgcaaattaaagtccaaatagagaaatacttaggtttagaacacatcagaggtatttctgctgtatttttcaccttaaaaattgacacagagtttactaatagacgagtagagatggttgaccatttttaaaaacgataggcactctttttcttttatgtttaaactgaa

SEQ ID NO: 243590 - DNA, 2110 bp, Homo Sapiens
ttgggccagcataggaatttcccgattattggaaccttctgatatgcatcgattgttatctagacaagaagaacttaaggaaagagcaagagttctgcttgagcaagcaagaagagatgcagccttaaaggcggggaataagcacaataccaacacagccaccccattctgcaacaggcagctaagtgatcagcaagatgaagagcgacgtcggcagctgagagagagagctcgtcagctaatagcagaagctcgatctggagtgaagatgtcagaacttcccagctatggtgaaatggctgcagaaaagttgaaagaaaggtcaaaggcatctggagatgaaaatgataatattgagatagatactaacgaggagatccctgaaggctttgttgtaggaggtggagatgaacttactaacttagaaaatgaccttgatactcccgaacaaaacagtaagttggtggacttgaagctgaagaagctcctagaagttcagccacaggtggcaaattcaccctccagtgctgcccagaaagctgtaactgagagctcagagcaggacatgaaaagtggcacagaagatctccggactgaacgattacaaaaaacaacagaacgttttagaaatcctgttgtgttcagcaaagattctacagtcagaaaaactcaacttcagtctttcagccaatatattgagaatagaccagagatgaaaaggcagagatcaatacaggaagatacaaagaaaggaaatgaggagaaggcagcgataactgaaactcagaggaagccatcagaagatgaagtgcttaataaagggttcaaagacaccagtcagtatgtagtaggagaattggcagcactagagaatgagcaaaagcaaattgacacccgtgccgcgctggtggagaagcgccttcgctatctcatggacacaggaaggaacacagaagaagaagaagctatgatgcaggaatggtttatgttagttaataagaaaaatgccttaataaggagaatgaatcacctctctcttctggaaaaagaacatgatttagaacgacggtatgagctgctgaaccgggaattgagggcaatgctagccattgaagactggcagaagaccgaggcccagaagcgacgcgaacagcttctgctagatgagctggtggccctggtgaacaagcgcgatgcgctcgtcagggacctggacgcgcaggagaagcaggccgaagaagaagatgagcatttggagcgaactctggagcaaaacaaaggcaagatggccaagaaagaggagaaatgtgttcttcagtagccatcagatcagaaagaatctctcccaacattttagagtcttgcttcccaaaccagaaaaagtcagactcattgttgatttaaaacttttaacattttgtttggctggattgtactactttacctctactttaccaccaccacccttttcctccctcctttccaaataatatacagaactccaaaatagcttcatttaaggatttttttgtgagttaacaatttccttgaaatcctgtgaaatagatttgcacagacaccttgtgagtgattggtattggaggtgttcaagaaactgttcgaaaaagaacaaaaacacttccctcgttattttctctcattttttgatgagaggaaaatttgaaacattattcttgttgttgttggtaatagcataatgacagtgggaggggtacaaggggataagaaaaaatgtcatgatttttttccggtcctgccacatgtaaacacttactctgttacctaaattttatagttagatcatatccaatctacttattaaactgtgttctatttaccagtggagtttttctgcagtggttgcgtttcactgtaaggataatggagtttcctcttctctgctttcctcagaggatggtccttttaacatagccagaaacaagccctgtggtttgaaggtgagctgtgaggatgggactaattgatatgcaccagttttacaaagacagtcttatcatccgagaaatcaccatctttttctctggataataattcttacatcatgcttgattcctacaatttggttggg

SEQ ID NO: 243591 - DNA, 925 bp, Homo Sapiens
aaaagccaactttgtacaaaaaagttggcctgctgcacggcaacatgaccagcagtgacatcctcctgtgctacaccacggtcggctggatgatgtggaactggatggtgtcccttctggccacaggagcggccatggtcttgtacgatggctcccccctggtgcccacgcccaatgtgctctgggacctggttgacaggataggcatcactgtcctggtaactggggccaagtggctgtcagtgctggaagagaaggccatgaagccggtggaaacccacagtctccagatgctccacacgatcctgtccactggctccccactgaaagcccagagctacgagtatgtctacaggtgcatcaagagcagcatcctcctgggctccatctcaggaggcaccgacatcatctcctgcttcatgggccacaatttttctcttcctgtgtataaaggggagattcaggcccggaacctgggcatggccgtggaagcgtggaacgaggaaggaaaggcggtctggggagagagcggcgagctggtgtgtactaagccgatcccttgccagcccacacacttctggaacgatgagaacggcaacaagtacaggaaggcgtatttctccaaattcccaggtatctgggctcatggcgactactgcagaatcaaccccaagaccgggggcatcgtcatgcttggccggagtgacggcaccctcaaccccaacggggtgcggttcggcagctcggaaatctataacattgtggaatccttcgaggaggtggaggacagcctgtgtgtcccccagtataacaagtacagggaggagagggtgatcctcttcctgagatggcctcccgggcacgccttccagcctgacttggttaagaggatccgtgacgccatccggcatgggcttgtctgcgc

SEQ ID NO: 243592 - DNA, 974 bp, Homo Sapiens
ttggtgaagaggaaatggacaatctaaagcacagcagagtgactgtagcaatacctttaaaatatgaggttaagctgactgttcatgggtttgtaaacccaacttcatttgtgtatggatcaaatgatgaaaatgagcctgaaacgtgcatggtggagaaaatgaacttaactttccatgttatcaacactggcaatagtatggctcccaatgttagtgtggaaataatggtaccaaattcttttagcccccaaactgataagctgttcaacattttggatgtccagactactactggagaatgccactttgaaaattatcaaagagtgtgtgcattagagcagcaaaagagtgcaatgcagaccttgaaaggcatagtccggttcttgtccaagactgataagaggctattgtactgcataaaagctgatccacattgtttaaatttcttgtgtaattttgggaaaatggaaagtggaaaagaagccagtgttcatatccaactggaaggccggccatccattttagaaatggatgagacttcagcactcaagtttgaaataagagcaacaggttttccagagccaaatccaagagtaattgaactaaacaaggatgagaatgttgcgcatgttctactggaaggactacatcatcaaagacccaaacgttatttcaccatagtgattatttcaagtagcttgctacttggacttattgtacttctgttgatctcatatgttatgtggaaggctggcttctttaaaagacaatacaaatctatcctacaagaagaaaacagaagagacagttggagttatatcaacagtaaaagcaatgatgattaagacttctttcaaattgagagaatggaaaacagactcaggttgtagtaaagaaatttaaaagacactgttacaagaaaaaatgaattttgtttggacttcttttactcatgatcttgtgacatatta

SEQ ID NO: 243593 - DNA, 559 bp, Homo Sapiens
ataagtggttttctaaacaaatgagaccacaccatacatactgtccctatatttcatacttgggcaaggggaggggagttgacttttttcttagtgagaataaaaatgaggataaaagtatggttgtttaccaacttatagtagtatcatgaatttcgaatggtcttctggccgttcagaaaactacttaactggtaggaacgaaattctggacactgacattgatatagacactcatatcaaatataatactatgaaatactatgatatggaaataatatgcaatcactagagataaaatattttctacccaagtagagtggattcataagaaaattctaaattatagcatatgttgaactctgagaagcctctggaatgaagtcatttttccctaacccctgtttcctctttatattggcagtggataaatggaaagtaagttaactctactgtaccaaagctagttcaatatagaaaacaggttctacaaggattaaggaacatctcttggcccacagaagattcgatgtggatcctgtgcccaacttttttgtac

SEQ ID NO: 243594 - DNA, 1303 bp, Homo Sapiens
ttggggcaggagagggaaaggcagcagcggcggcagctggaggatgaagaaggagcatgtgcttcactgccagttctccgcgtggtacccgttcttccgaggcgttaccatcaagagtgtcattcttccacttcctcagaatgtgaaggattatttactcgatgatggaactctggtggtttcaggaagggatgatccaccaacacattctcagccagacagtgatgatgaagcagaagaaatacagtggtctgatgatgagaacacagccacgcttacggcaccagaatttcctgagtttgccactaaagtccaggaagctatcaattccctcgggggcagtgtctttcctaagcttaattggagtgccccaagggatgcgtattggatagcaatgaatagttctctgaaatgtaaaaccctcagcgacatctttctgcttttcaagagttccgatttcatcactcgtgacttcactcagccgtttattcattgtactgatgattctccagatccatgtatagaatatgagctcgttctccgaaaatggtgtgaattgattcctggggctgagtttcgatgttttgtcaaggaaaacaagcttattggtatttctcaaagagactacacacaatactatgatcatatttctaaacaaaaggaagaaattcgcagatgcatacaagactttttcaagaaacacatacagtacaaattcttagatgaagactttgtgttcgatatatacagagacagtagggggaaggtgtggctcattgactttaatccatttggtgaagtcacagattcactgctgttcacctgggaagaactgatatctgagaacaacttaaacggcgattttagtgaagttgacgctcaagagcaggattccccagctttccgttgcacaaacagtgaagtgacagtccagcccagcccctatttgagttaccggctacccaaggactttgtagacctctctactggggaggacgctcacaagctaatagacttccttaagctgaagagaaatcagcaggaggacgactgatgagcgtactggaactggagaagaggaggccccgccccaccgctccgggagctgctcatcagccgcaacttcctgccgaccctgatgcgggtgggccgagcagtgtggacatcagccactttttatattcatgtacattcacctggggaaaaaaacggagggactttgctacttgtaaaaataacataataaaatagatcttaaacataagaaaaccatactgtttctgataataaaatgctttctatg

SEQ ID NO: 243595 - DNA, 1212 bp, Homo Sapiens
  misc_feature (238)..(473): n is a, c, g, or t
ttggctcaggcctccccagctgcctgcgctggaccctggcggggctgtttcactttttcctgggcagtgtcaagtatgcacctgtgggctgactgtgtggccacatccagtcaggacccagcctccagaactgacccagggaggctcccgctggccccaggaaggagaagtagaaactgatgatcaggcggggcgagagaaccacaccagcggccctgttgagaaatcaggccgagannnnnnnnnnnnnnnnnnnnnnnnnnnnnnnnnnnnnnnnnnnnnnnnnnnnnnnnnnnnnnnnnnnnnnnnnnnnnnnnnnnnnnnnnnnnnnnnnnnnnnnnnnnnnnnnnnnnnnnnnnnnnnnnnnnnnnnnnnnnnnnnnnnnnnnnnnnnnnnnnnnnnnnnnnnnnnnnnnnnnnnnnnnnnnnnnnnnnnnnnnnnnnnnnnnnnnnnnnnnnnnnnnnnnnnnnnnnctgggaggtggaggttgcagtgagtggagattgcctgggaggtggagattgcatgaagctccatctcgaggggaaaaaaataagaaagaaaaatcaggcagagaggcaacgccaggtcccagctggagctcagcggggagccaggggatacagtggctgaccgggcctcctaaccccccttctagcactcccccaggatcctgggtcccaattgttgccctggacaaatacgcccattcctgccctacccaccgagtgaggctcagccccaggccccccaccctcatcacaaggtcagggctgtgtcccaccatcctcatcactaggtacttccggccctttgctcagccccatgatgcttggcctgcagagatgggggctgaagggcttggggcatcaaggggacctgacatcttgctgagaagccatcactagacagggctggaggctggagactcagggcctgccctcaccgtggccagtgaggcgtggggttgggcagggaaggggcattcattcattagaccctgccagaagcacctgggtccccttctggggctacaggtggtgaggccactgcccccaagaacacagcctggtgactttagtgtacaaagcaagggagtctccaggggcacagaacagaggctaaagccagggtggaggtggccagcagcctacgaggaggagagggtctggccacacccaagggaggtgcatgtcagccaggggccaccct

SEQ ID NO: 243596 - DNA, 596 bp, Homo Sapiens
caagctccatcacaatctacatgaaactgggctttatgagtggttgtctggttgctttccaagacttgggttgtcagacaaaacctatattatgggaaataataaacctcaaattcatttttaacatttggccaaggcaactgtaccagggaatactgactttcaagagaagttctacagtcgacttttcttaatatgtctactattcttattctttattctaagtgagtaaatagaagatgtaaagccaactgttttttgattggaagcaaagtcaaggattaaggtactatgagaaagaagatacagggattccaggaccaaactatgggagaagaaatgtaagaaaacaagtgaaagatgctttcagaaaccttctgagcccaaactctttttggtaaccttccgaaaattagaatgagattcattttttagacaagataaacatgaggtatatatcaatgcttattgaatcatttattcagaggcaaaatggaaatacgatagtttttcagtaagaaaatataactagaatgaaggcattagttatatctcagagaaataagtagctttacaatcatattaacactattgtc

SEQ ID NO: 243597 - DNA, 905 bp, Homo Sapiens
ttgccccccacaactaactggtgaatgctgtcaatctcagcttccttgttgcaaaaccttttccgtgaatatctcttggagtctggaaatctcaacccactctcccttcgatttgccttcataaaaagaacagattacatattaactattagcacttggtaatctaacaggactgttacacacttctaaagaaatcctatcttctacgtgaaggtgggagagacagagggggcacactgtgtcggctgggggaagaggagatgggagaggaaggcgaactctccttactgggtcaccttccctgtcttctggcatagcctagcacactggtctttttggaagtccactctaccatgccaactgaccctcagtcccaagaggtgggtgtgtgcagtgccctttgcattctgtgtcactgctcggggaatggggagggcctggttgtgccccagttacagaaagcagtctccagtaagttctctgcctagcctcatcaccatggtaacacatggtggggattcagaaggtcagaatatgctgatgatccagctttgttaatgctcagcaggttaaagaaaaaagtgtatttaccttcaaaccaactccctgttccaagaaaaaagctcctctgattcatttagaaaatgccatgtcttggtttggcaacggagtgttctgtcggatctgaaacacttgggctagccatcttcctggtgtcaggggcagcatgggctaccctggggggcgggtgggggcacatctatttagaaacagaagctggcccaagctgaagtcaactgctgttccagcacaaagcagcgacaggaagtgacaggaggcaaaaagtggtgggagctgagctcctggccaggtggaagcagtgatgaatcccaacagtatcccaa

SEQ ID NO: 243598 - DNA, 891 bp, Homo Sapiens
ttggattcggagtttggatttggaagtggtggaagagatggagatggtgagacaagtagtaagcacgtcagccttccaggtgcgctcctttccgatgagcactgtcttatcccacgtaactttgagaagtttgggcctttcccactgtggcagaggtttcctgaggctcttgcatacatggccctatggttgctcatcagatctttctcccagtagctgctcagcatggtggtggcataagcccattttccggagccagggattcagttgcagcaagacatggcccggtctgggaggtcaaccatgaagaaggcagtagctgtcattgcccaaccccagaaatcccaatcctgttttctccctctcagtcctgatcatggattcagcagcagcgaactcgccaatgtagtgggtggcacagccagggtcttgactctggctctgcagtagcacagtctggaaaagctctgaggggagagagacccccactggtccgagggtctggcacagagccagaaatgggggggaaggtatgaggctgggtcgcctctgacctctcaggtaccatccaggaggccctggcctctcactgaacccggccactcctctttggcatggcctcttcccaaatccccaaactgcctccttacccacaaaagtggtctctgagtgtcagtccagtgggacccccaccccttatggcttcagttccccaaatagggctggacccttgatcctgatccagctgtggctatccagccccttcctggggactttggactttgaggggggcatgcccagttgtgctggggaatccatactttccctggctggagtagaacctgtggactgtagtcctgagggcagtcatgttctgcctgtgcctggaaa

SEQ ID NO: 243599 - DNA, 1600 bp, Homo Sapiens
  misc_feature (1511)..(1522): n is a, c, g, or t
gggataatgttgtatcacaaaatatcccaaaactgaaggaagaatagtgaagcttcagatacagtgctggtatgaggtgaagggaggtaatgggtgagcagacattggtctaagatgttgagcagcatgtgatgggccatcagatactgtgaagaagtgaggaagcagagctaatgatggctcagtagacattgatctaaggtgaggtaatgggatgtgtcaccaagcactgcccaactagggcttgggaattaaaggggcattgtggccctgcttctttgactatgttctatcctttgggccccatcttcacctccccatactgcccttcttaaaggtgaaaccatctttgcagagcccaaatagttcccactcccagaactgccaatagactggccccagacaccacccagcaactgtgcatctaatcagatcatctgtcagcatctgtaaggccactgctgcctatctagggcaagatacctaatatccaatgaagatccacccaagtctgctctagttccctgctattggcttcaggcactcctctcggggcaggatgagcaggtgtgtggattgggttctggagtaaatgcggctctgtcgagttgcaactgagacaggacagcgctgtgcatgctgaggaaaaatgagcagggagtcttttgcaatcatgttggagctgtgggattctggaatcatggcaggaaatcctggaagcaagcatccacatgggatttcctgtacctgttttcccttctttagcatcagaccaaaaggttcacaatgactttttagctttagggttgagaagggatacagcccaggtacagactagaggtgaaaaagcctggtgtgttttagccaaggttggttctccctattagcgcttcttatgctgcaacacagaaaaaaatcagacagaagtcacgcaacaagcatgggtcaactctccacaggtgcatttatggaatgcctgctgtatggcagtcatgggtctagactcatagtggtgaacaaaagggaaatattttctagtgtagaagccacagagaaatgaggaaaatacaccaggcagcatggtggaaattgctagggagaagaataaaggaggaagggtaaggggctggaattttaaaccaggcaggcagggaaggcctgtgtggaggtgtcatggaaaaaaagacatgacggacaagccacagataaaataaagaattgtgctctttgcaacgggcactgcaaatacaaaggccctgagtcaggaactgatgtttgaggcacatggcggggaaggtccttgtggggtgcgtgggacgaagatggacacaagtagacagtgaacatatggtggggttggttttcatatgagttatcaatttcatatgatttatgatttatctcatatctcatataatgtaagataatgatttcatgacttatcaacttatgaaagtcagatcattaaggaaagtaaaatgctgggcttcaactcagtcacaagtaaattnnnnnnnnnnnngaggcaggcaactgagtgagaagaattgtaatagcagaaggaagaatttaagttctcccagaggacctgaaaatccaa

SEQ ID NO: 243600 - DNA, 853 bp, Homo Sapiens
tttcagcaggactcttcaggggaccgccaagagacttatatacttagatcttttctgccttgttccacactgcggggcatgagagctggaaaagccactccccgaggcctccacactttgttctcctgggccctgcctccaagagacagcacagaactcagagagggcacatccaggaagaggccccagggcgggcctgctcacaggtggaccctgctgcaacgcagggtcaggggccacctgcagggggccacccagagcactgagctggattcaagtgagcctcctttcagggctctccactgacttggaaagggctcacaggccagtgtttgaggtataaatatctcgcatggggcaagagtcacatcagcttgctggccttgacatgactgcaaggctggacagacacacaggagtgttacgaggtacaagctaagggactctgggctagcccagaggccagtgaggagggccaaaggggaagactccacatccagggtcccttccgtgcccagaacagtctgggaattaggaaaacaggatgcaatcagagtcaactgagcaacaggcaaaacagctgatctggatgtctttcctcctctcattttcatggttccctttatccacatgtttcctaaaccacactagaacacttccttctccggtgagaacgagagccagtgctaacccccataccacctttttgccccacagagagccccaccaaccctcatcattagcccttattcacaggtcctggaagtgggcggctcctctccagcatgagtcccacagtatctgaaggagagactgctgcttcccaaacaggctgctggagcgcattttccaa

SEQ ID NO: 243601 - DNA, 170 bp, Homo Sapiens
ttggctcctcctggatgtccgtgctcctgccgtccccgaagaagtcgcacgcgggacgaggtgggaaccaaagctccgctctacctgggagtccctggagcccctgggaaattctctctctgcagcggcggaagtccccggggcccatcgcggagacgccccaacttttt

SEQ ID NO: 243602 - DNA, 937 bp, Homo Sapiens
  misc_feature (530)..(550): n is a, c, g, or t
  misc_feature (672)..(695): n is a, c, g, or t
aagaacaacacaaataagtcaaaggaaaaataaaagcttttttcattttgagaagttgagtataaaaacagcaggaaaaatggcccaatacattggacactatttgtccttgaaaccactgcagagatacaaaagttcacattgtatgacctggtgggtgtcttccaccatgaaggtgctctggttagattagaggtagcacttccactgtatgctcttgtggttcagacacatttgggaaagtttatttttctgaatcaaataggcgaatgcatctacatgtaaaactcaggataccaggcacacagatgaggtcccacccccacacactgtctccctgttctcacgaccagcagtgggtggtcccccttatctttctaagcatccgctatctgctccccacataccatccccctaatctgggaaaggtaactctttggggaataaaaggcagatgggtgctggtttagggaaaaaaatgagatgaaatttatttaatttgggaagcaagtaatttcaaatttagaccnnnnnnnnnnnnnnnnnnnnntcccgtgttaatagcaaacttctttttcttatgaatcgggcccaaagtttgtacagagttttatttttgaagaaaatattgcaactgtgcatgaaactaaatagccatgtgatttcttacannnnnnnnnnnnnnnnnnnnnnnnatatgaggaggtctggtgtgaagacagatcaagcatgggtacctggcttgaacattgtccattaagaaaatgtatcagtctccgcatagcatcagtcaagggtcaaggaaaatgcccctgacttgcaaatgttctcagagtgtcttcgcagcacagttcttgaaattcaaatagtcgttttgagacaaaaatctcgccaggtactgatttctgaaatcaaacacccatgcttgtcccctagg

SEQ ID NO: 243603 - DNA, 877 bp, Homo Sapiens
aaaaccacattgatatactaggcatgcacattttggaaactgtaagaaaagacaaagtattaacaggggtgctggaattatgagtgatttttcttctagatacttgtttgtattttcccaatttttccccataagcatatattattttcataaccagaaaaagaaacctcccaggaaatgcttctttaaaaagtaaacacatacaatgcaaaactgtatcataaaacagttgcaataaaagtcagcctgggcaatagcattgaaagctaggaggcaggtcattcacaaatgcttcacaacagcaatttataaaataattcattaaatatgcagtacaataaaaatctctgtatcataaaaacattttcaacttcttccacactctagaactatttgctacaatgacaacatcaaaatctagttagccctgaaagctctaaatagcatgtttaattttgttcttctttccaagcacacttggatacgctgcagcggaaaaacttggagcttgtaattcaacgtgtcctgggattcgaccacatgggtattttattgcttaggaaggattatgaaggctaacaagcataacgatactactgctgcaccagttcaacttcaggatgttaaaagtgataaacgacttgtgtcccaaattttgtgaacaaaatcgaaatgcaaatttgtgtttttcatgtggctgaatatgatacaaaacataccttatagaatgtttgctaaaactaaagataaacacaagataaaaggagactgtagtccttccctcaaccctcccacaagccccgtaaggataggtgcctttatttacacccaacttttttgtacaaagttgcgctatatagggggaaaagcattgctc

SEQ ID NO: 243604 - DNA, 718 bp, Homo Sapiens
  misc_feature (166)..(216): n is a, c, g, or t
ttatcttgatattcatcagggattatgcactttatcgtctttttgaaattgctttcttgaatgacatcaacatgacacattttctctttttggttagctcctctgcaaatgaattattggctgatacataattaccagcaaaggtgcacatatgtgtgaagcatcnnnnnnnnnnnnnnnnnnnnnnnnnnnnnnnnnnnnnnnnnnnnnnnnnnnctaagtattgtacttacctagaatgaccttgcttatattgggattagaaattggagattcatatgcttgtttattccctcattagacagtagattactaatggataagaattgtgtcttaattttcattgtatccatggctcttaattagtttggtgcctgccatatattattgtttaagatgaactcatctcaaaaatgatgccttgctgctactcttcctgtattgcggatcctctaatagtggagagttacttgcaagcagtgagcctggaaaaaggtggcaatatacaggaagagcaaaataaggctcggaaaaaagggcaaaagacaattcttttggcaaccgtctcggagcttggatgtaagctggaggaagttcagagcaggtggaaaccaactcaacttgaaaaagctacactgcagaagagacacttgagctaggtcttcaagcacactaatcctcacatgtccttatattttgtacaaagttggcaatttat

SEQ ID NO: 243605 - DNA, 947 bp, Homo Sapiens
aaacttaacatatcattactttattgtgactcaagattattttcatctgtattaagtatttgcaaaatgcaacataggaatacttaataacactgtaataactctatcatctctccataatttatgcaaaaattttaagtttttcccccatcgtcacctaagacatttctaatcttttataattagttgactcactttcatatagtaccaattaacattagcctaatgaaactaagtcaaatatggtcaaaaataatcatcatgcatttacaaaacaatattatttgccagtcagagtcaacttttattgagcacctcctatattccagaaccaaaaacatgtttgttccttacaaaattctcaaagccaccctttaaggtaagtaatagtacgttctacttaacagatgaaaaaactaagaatcagactgatacaacttcctcaacatcataggcagaaacataattatactgactgccaattttaagaaaacatctatttgttacatttgtgtcattactacaaaatctttgcttttacagttttcttaaaatcatgtgaatataaacagtatttttatttacattaccattacttctcttttctaagagaaattctttgtctccctaagatcatgaccacttatgtataatttcttgcttataaattttaataaaatatacgtaagtgggaatgtacagtattaagtattactctattattctggaatttaacaatgaataagcacatattttaaaggccacacctactaagaaacagatacaaactgtaatttctaaaatatatttaaaattaacctcattaaaatttttggtttataagttaaactgtataaatacagaaagtttagcttagatgactatgtatttgatggttagccacatataagttaccgaaatactatattctttcaagtttgaagtcc

SEQ ID NO: 243606 - DNA, 476 bp, Homo Sapiens
ttggacattatttaactttattcggggagaggatatgtttacagtttttacactgaatattctgtaatttaccatgcaattgaattactaatgaaatgttaaaagagcatatcatacctctgcctcagttctcttctaagtaagctttttatgtagtcacgcaattaagactgtcaagacatatttgaatttcattttgaatggtgccagtggccctgtgctcctggttgatacagcatttatacccagtttgtcttactagctaatttaaactctgagcacatccctgtcaccttcacaactataaatgaaatatcttgccatatatgtagaaagtaaaaggtatgtgtttcttaacttctccctaaacttcagcttggcagtagtttataatttcatgcttttgatgctttttttctctgggttttggtttctatatttttccaaatgccattttgaaaagttgcattatagat

SEQ ID NO: 243607 - DNA, 1042 bp, Homo Sapiens
  misc_feature (216)..(472): n is a, c, g, or t
gaggaccttcagatcattggccgccacagatccgcctgaaggagagagaggacatcatcaagcagctcacggtgaggctgtcagggggcgcctcacccacgcacctggccgggcactgcgggctcccccgggaggggcgttcacttgcacccagcatttctctaggtgccttaatatcttacaaagaatcctttcttgccgggcgcggtggctcannnnnnnnnnnnnnnnnnnnnnnnnnnnnnnnnnnnnnnnnnnnnnnnnnnnnnnnnnnnnnnnnnnnnnnnnnnnnnnnnnnnnnnnnnnnnnnnnnnnnnnnnnnnnnnnnnnnnnnnnnnnnnnnnnnnnnnnnnnnnnnnnnnnnnnnnnnnnnnnnnnnnnnnnnnnnnnnnnnnnnnnnnnnnnnnnnnnnnnnnnnnnnnnnnnnnnnnnnnnnnnnnnnnnnnnnnnnnnnnnnnnnnnnnnnnnnnnntcacaaaaaataaaaacaaagtctcttgatctgtaggtttggttaatcctgcattattagagctacaaccactaagtctcaaaggaacaatggagaaccaaacaatggtgaaccttctgttttccaaatgaggattaggtactccctccccagccccatcctttacaatttgtttcccactactaatgttggccagtcccatttgggtgtttttgaagagtaaacaagcagttatctttccctgaaaagatggtgggtattaagctgcttcttgcatagttttcaaaaccatataaaaaaacctttttttgcttttaggaccccagatggtgaaacggcccaagccaaagaagcccagcagaaacagggctctccgcaccaggaatggttcaccaagtacttttctttctaagctaacctttgggatacatcacagaggatacttgaaaaacatttattttaaatcatccgattgaaggaatgaactaacaccaaccaaccaaataatatgcttatgatttatatatgatagctaaaacaaattttggcgttaacacttcatactgttct

SEQ ID NO: 243608 - DNA, 499 bp, Homo Sapiens
ttggagaatttgtttttcttctgtgctggttcactgaatgttgaccaaaatctttacacaacttctagttttttaggggtcttccaagacgacagtgaatggggaatgtggtggtccaggatggtgacagacggtagtaggttacggcctgtgaagaatgggtgtcccccaggacagtggaaaagcaggggcaggcgggcatggggggctcatccaaagttgtggggagcccccagcatcctcctgtttgccccaaaagccctaattgccaggaacactgagccacttgtgtgacatgaggttttagccgcggttttgcttggatgtgattatggtcctccagaaagacacacctggactaatttgaccctagaaactgcacggttctgagacatgctctggaccagcctgagctagagcagatgtggtgagggcggcgccaggggcataaagtgcagcctgggaaaggcagtaggtggagccgccagccgcctgtgtg

SEQ ID NO: 243609 - DNA, 1292 bp, Homo Sapiens
  misc_feature (554)..(860): n is a, c, g, or t
ttctcttgcttgagatgtatagcctttcttgaatctacaatgtcttttgttaatttttaaaaattgtcatccattatctgttcaaatattgatttatcttcattctcttttaatatctttctgaaactccatttatatttataagatcttttccctgtatcttatgacatatcttaatctctatgtcccattttggtaaatctgaactttattctgtatatttttttctcatctattctcaagctcacaaatccttcagctgtgtccagtttgctgttaaatcatccagtgagtttttatcagttactgtactttttagttctagggttttctttttttagcttctagttctctgctaaatttctccatcttataattccttgaacatattaaatagttttaatgtcagatctcctgtgggtctatttctattgtttgctgattttcttggtttttcagacaacgaatctctttgtactagtgctcgtcactgtatacaaaaattatagggataatttaaagcactggatgatatattatatttttaaaaaaannnnnnnnnnnnnnnnnnnnnnnnnnnnnnnnnnnnnnnnnnnnnnnnnnnnnnnnnnnnnnnnnnnnnnnnnnnnnnnnnnnnnnnnnnnnnnnnnnnnnnnnnnnnnnnnnnnnnnnnnnnnnnnnnnnnnnnnnnnnnnnnnnnnnnnnnnnnnnnnnnnnnnnnnnnnnnnnnnnnnnnnnnnnnnnnnnnnnnnnnnnnnnnnnnnnnnnnnnnnnnnnnnnnnnnnnnnnnnnnnnnnnnnnnnnnnnnnnnnnnnnnnnnnnnnnnnnnnnnnnnnnnnnnnnnnnnnnnnnnnnnnnnnccatagaagattcatctttaattatggcaagtaagctagagtagaggtgccggcaatctgaggtcttcttaatctacgtagggaatgagattatttgaagctggcctttagtccccatgagtactgtcgattctggattcacctttagtcctagggtatactgggtgaggggaggggagtttcaatcccaaacctaaattgcggatcctaaattgcaattcttgtaatctcatctatcccacccatgagtccattagaaataccattcagaggccaggcgcagtggctcaagcctgtaatccctctttttattctgaatattatctgtgcattttcttagtaccatggatgtttttcatttttataagtgttttcaaagacaaaactttgtccctattcagtatttctgatggtttttaaaatttcacccaa

SEQ ID NO: 243610 - DNA, 640 bp, Homo Sapiens
gcactgtggctagctggaaagaaaacagaagggttaataagctgggctgagttaccctgctgatggccctaccatggtcaggagaagctgtgttggtgatgcagctattcatttaggaactaagggatctgctgtcccaaggatatcctttccaggcagcaggtccctaaaatagctctctggctccaaaataaaaatgcttattgaccaaattttctattttaaggttaactcaccacatcatacttaaccaaatgcctggcatcattgtcacttcttgaagtcacttcaacagggatcacaaaagcagcagcaaagtacatggagtcagtacttttttctgttaaagactcctttagaaatatatttgaagtatatttaaatacttaaaagttgagcttgtgtgtgtgacttgaggttacttggccactctgtgcctctatttcttcatctgtacaatgaggacaataagaatagctaattcatagagtagttgtgaggattaaatgttaatatatataaagtgcttagaccattattgcctacaacaaataatcattaactattgtcaggtattttctctaaaattgtttatgtggcaaaacttaactatatatataagggggtttttgtttgccaa

SEQ ID NO: 243611 - DNA, 747 bp, Homo Sapiens
tgtgatattcacttcatttaaacagacagataagcacccagacagatgtttgtgagtgtttttctggagcttccatttatgctcgtgtttcattgagaattcatgatctattacacatttgtatcttttaggacatttttctaaagcccattcaccagtttaatttgatcttcccaataatctcagaggtaggcagggaaattagcaaggggcatgatgagtggggaaaaacaatttcagctgactttagagacagaaaaacagagttcaaatcctagcttcaattttttctagcaatgtagctttaggtaagtgacttaccctttctgaacttcagtttcctcccctgtcaaaaggagataagagcacctaccttgtggggtgcaataaaggatgaggggaaagctatgaccttcatggcagctagtactattcatcgtccacttccatcttacagtaagaaaagtgagattcaaagatgtgaaatcaagttcaagttcacacattatggatgccaaggtagagcctacgtcttctgtcttcaaacctagatcatgtgctcttcccagtaagccccataacctcagggacaactcctcatcttttacagggcctcacgcaacatgctgtcataagactggaaccagccatgctccagattcaagggtatttttataaggacaacaaaagtttaagaagctgaagtcatttcaaattcaaatcatctataaatatcacatgaagaaa

SEQ ID NO: 243612 - DNA, 873 bp, Homo Sapiens
atgagccaaagcacaattcctctgaagagtaccaaaacaaattctctctctattgcttaagtcagaaggaaacaatgaaacccctgaggggtcaccacaaaagacagaggccccgctgaacccccgacccatgcttgagaaagccagggcccactctccctctctcaaacagttttagggtagagaagtcaatgcttagggctcctcactgggagacacaagggcattttaaaagtctgtccccaaaacaatggcatttccaaccagagtaaagcaatggttccagtgcaaatctgcttcatgaagacaaatgtctctcaaatatgaaattcaatgaagaagaacataacttgcaggtaacaaaaaataaagactcatgaaactaaaattaaaatgtttacagaataatagcataagatattaaaatgagaatatagaaaaagatttgtgcttaggaaaatacttaattcttggcccaaagtcataaaatagaaacttactataaggtaatttggcagtttaaaatgcagacagataacctctgatttacaatttctatttttcgaatgtaggacaaattttaaagtatttagtaaaacttggttttatgtaacaaatatacaaagtcttagaggagtctttgggccttcactaaacagaacaggacttgttagatttaaaagaggttgtgaacaaaatcaacaattcaaaaaccaaaagggtaacaagcaaacctcatagcaagatgcactgagagaaaaataaactatgggaaaacccccttaaccaaaagtcatgagacaaggtgagtttgattatgtgaaaaatagccaacttttttgtacaaagttggctattataggaaaagcattg

SEQ ID NO: 243613 - DNA, 1101 bp, Homo Sapiens
ggctaaattgattcagtttattttcaaaagaagggttgatccatgttttcagtttattgccatacagaaaacattttataaattaatatggtagacttctacttcaacatattcacgtaaaaacatcacagtgcaagaaagtgatcacaattaagcatgaagacatcaaaagccagccagtattttaactacagagcagaatattcttgctgtcccttcctagaaaatgttggcacattcattaactgctcaggttacaaaaatcactttggtgtccacttcctgtccttcaatatattttcataatacactgtgttacattaatgctggtggacaaattagctcctataaaatctaaaaacctttcaggtggcacaatgatttaaaaccaactaggaaaaagctctcccagaatatttttgtatgtaatattctgtccattaccacaataacagagtaaaaagctgttttaccttaaaaataagctaaaggaagataatttcatttttcctttaaaacatttcttagcttttaaatagagagaaaaagtttaaattttcttgggggaggagaatatttcataagtaaaaacatcaaatgttgtacaaatgtttcatttaggaaacaaatacttagattcaaaggattctaaaacatttcaacattataagaaaactgtaatttaaagctaaaaaattgtaatacatcgaactaatataaattactcattaacatgttctattgtttttcacaaaatccataattaaggaatagtgggttaggtgagacatttttcccaacatttggtcagattagctaagcagctctgggcaaaggatgcctcctctgaatcaggatcttggcctcttaaatgagggcactggactaactgcccattcacatccctctaatctacacatttatcacaactgttcatcttatataatccttccaaggatgaagtgtttcaactcagtgtattttccagacaaagctcccctgtttaagtggcaaaactcttctttaaactttaaaatttttactttaaaatgttatttccaatattatttcctgcctaccataaggaagatgttgagccaa

SEQ ID NO: 243614 - DNA, 1330 bp, Homo Sapiens
  misc_feature (310)..(319): n is a, c, g, or t
  misc_feature (997)..(1005): n is a, c, g, or t
aagaatattttggtgtataagtttcactggaatttggtcaggcagtcaacactacagttagtaaacatatttgaaaacaagtatcaagagtatcacaagccatttacagtctgaaataatgcctgtacatatcaccatagcttttcgggttctgttttttcagacatcacaaattgtcaaagaacaaggatctgcactttttaagtataatttctgcccttaattattattgtagcttctaatttaccagcaacagtcaaagttctcagtaggctgctgcaataagggaggagggggaagagggagtgannnnnnnnnnaaaggctttctgtccaaagatgaacttttatcgattctttcaattattgccacaattgaaaaggtgtatgtccaatcatttttcatggttctgtttttgcttactgtcataggatttcatcccatctcatttgagttgcaatttcaaaaagcaaagccttgctcttttctgactgaattcaacatgcataaagaattttatggcttggatcctatggctcaaaaaggtttgaaaacatagcaagcagcatctatttaaaaaaatcctagggttgcaaaatattacaaattgactttgcacactcagactgaagacattataaaagacaaacaaaaaaggtgatacaactcaactgcaactgcatgatcatctattataccagtatgcactgaaatatatttttataaagctctgcagatattaaaccctttcaccagctaaagtcatggaaatgctctctttaaggcaggaaatatttaagaaaggtaaagttacctttatttttattcttttaacctgtaaatcatttatgtagattttgttacaatttcaaaaacatagtgtcctgttaacatgtttcctaaattaagccactaagttttctttactgtggaagacattcatcaaaaggccatcaaatatttttacaatcaaaaaatgtagcccaagtataggagnnnnnnnnntagacctttttttctttttaaaactgttgaggaaaaaaatataaggaaggtagacagcagaaacagtagaaagaagtaaaactgaaaatcttaccaatttgctgtaaagagattagacagagagtgggccacagcaacaccctcttcccctggatatccctatctccctcaccttgccgaccacagtatgtattttttatcctgactctcttctgttgttcttcagccatgggctgaagacatttggtgtcttgaaccaaatactggtgtaagaacaggtggcgatttttttccagtgcaatgcaggcccgggacaatgatccaa

SEQ ID NO: 243615 - DNA, 1079 bp, Homo Sapiens
aacaaatccttggtaaaaaaattaatttgtaggtagtttcatttttcatctaaaaatatgtgcacacagacaatttggtgaaaatggattttgcttatttatctagctaattgcctctattcccatgctttgctttgagcatataaaattatttagggtagacagtgttgaacgttataaatcaattaatcagtatttgattaattatttcccctcaactttagtttgccctttaaactaagactaggttttatgctcatctataaaaagtgaaaattttaaacatacacagactgtctgcaatgtcactctggcggtgtatcatggggagatatgtttgaattagatagagaaaatttatatgaaatactctgaggctatgtttcctaaggggaattgctttatccagtataggaaaaccatttttcacataaatttctaaagataaattagaactttaacctgacacctaataggtagaattttagggtttgggggaataataatagttgctagagctattcaatggcaatgtcaatataaaaagcttagttttccacatgagagaagaactgaagtgtagacgagacactctcttacagtaacactgcagaaacttagaagcaagaatattttctagatttccatcttagtcacaattaaggataaagaagaaaaaatatgaaaagtttcttcataatattaaggggcttttattgataaaacaactatttctttcatagtaagttctttttgtcagaggcagaaatagaaatttgattctttagaagacattttgggtttcaaagagaaactctgctactttactgttgaaaatatatagtactctgagaaagctgccttacagcaaggagtttcagaaaagatacaagaaagaaaaccaatgtgagatgctttcattttagagtccctgcttcagtgtttccaacagaaacaagagaaaaagtaataagaaatatttttttctccctcttaagacatacatcactcctgaaattcttagaaaatcaactgaggcaaattaggggtttcaaagctagtcaccttgtaagttccaa

SEQ ID NO: 243616 - DNA, 383 bp, Homo Sapiens
aacactgtcacaaatttcatataccatataatgttattttggatagtaaaaggaaaaataattcacttattttgaactgacttatttgttgccctttgattgatttcctttggccttttgttctttttcaaactcattaacatctattccagaggctgaacagctttaagtgtgttcattcattttcctatgcgtttattatggaaaaggtttaagggctggaaagggcaattatagagataaaagtaggatattgggattatctacaggtttgctttactcactccattcttctacattaccaaaaataaaagagaggtggtagcaaggaggtaatagttacctgtgtcatgtgacatgagtgagttgtgacatgagcttat

SEQ ID NO: 243617 - DNA, 1272 bp, Homo Sapiens
ggagcggttgaagcaggggtgccatgagtgagcagcggttcagggcacagaggcagtgccaaggagtgggcaggcagcagccccaggcccagggcagccacccacacgcccacaatgagcatgaccacgcggccacggggcaggcggctgtgcagctgcacggccatcacactgcggtgccgctccacggcgatggccagcagtgtggccaccgacgcagtgaggcttgtgtccagcaagccctgccgcaggaaccagccctcaagtgaaagtcgggctgtgcggggaccagtgtggaacatgaggaagaggtaggccacgcccgcgaagaggtcagccgcggccagattgccgagcaggtagtagatgggctggtggaagcggcggttggaggcgatggctgctatgaccagcagattggtcagcagcaccagcacgctgacggtcagccccagtgccaccacgaccacatccttgggccgccagtgggagctgagctctttgccactgttgttatagaagaagccgatggtctcgttgtagtagcactggcccatgatgaccatctggggacacaagagatcagtgcatgtggcacttcttggaaggacacagggaggggcggcagctgcagaggagggtcagcgcaggaaggacaagggtctcaaattcagatacctcgaagcaaagtggcagtggtgaggactacggtggcctggaaaaagcaagctccatggggctggggtggaggtggaggagcagctgtttcttacctactaataagacctgtgtgcaagacatcacccaagtcaataggtttttgaaccagaagtgaaacaaaacccatctatggtcgaatcccagcccacctgccgccaatgtgtgacccggtttgggttgtggggagaggagggttagggaaagacaaaggggtgtgagctgcgggaagagatgagggaggatcactttggtgccggagtcagtgtagggagcagagacccgggagcgtgtgcacacaagggtgagatcacttgctagaaccctgcgagggggcggtgccgaggcgtggaggtgatcggagtggacagagaggcggccccagaagttagtcggcgggatttgggcgcgagtgcttcccaagcgggcggggcaataggctgttccgggtgggacggaggacactggcggtctccgggacaaagacagcggttggggaagggatggatggccgggcctccaggcgtctccagactgggcctccagtcacgccaa

SEQ ID NO: 243618 - DNA, 1329 bp, Homo Sapiens
  misc_feature (982)..(994): n is a, c, g, or t
ttgcacattttaaaatactttagtattataaacatccgtgactacataatagcaataatgctttaactgtataaatgagactgtggaaattctattattggctctatttttaagggttacaatgaaattatgtacagtatataaagcttgtcaaactgaacatggtcttaggccattactactatttcattccaatttggattttaatacaattaacttacagatctgaaataaaagcactgcttaatggtttcagatgcattttggtactgaataagtttcaaggaatctttacagataataaattataatgaagagaacctacgactaaagctgcttacatggataacaggaggaatgacgattgcaaatgttatgttattgacaattctatgaattaaaactcataaccacttctagatttctttaaaacaagcaaaactaaatagcacacacaagagtactttaatataaccttaatggtctaacaaaccttccaaatggaaggaaatacaaaataaagttgacacatcaaatttaacttatactaatatacttcagcattacaaatttaccaagtcattttgccaactatgtgtagaaccacctaatatcaaaatatactatggtgggtaagctctgattccagagggctaaagccaaggttttcaaagatcacacgtaccagcagccacacacacaaagggttgcgcgatcctacggctttattgacacctttcatcatgctcttaacactgatgttttcatgggttccttccctgtaatgaaactgagtgtagataatcaatttccataaagaaatgtacagttaaattaagaatattaaatcttccacacatgggctcaaataggaagtattttgtttagtaaaatgaaaattacttttaaaaaatatctgcagtgtttttgaaatgcaaggcaccaatagagagcagacattccagctgagtgattgtctggnnnnnnnnnnnnntggaaccggtcagtcctctgtccttgttaattagaatacttccttcttcgtgtctatgcaacatcttccagataatccgcaacatcactgagctgggatacagtcagatcttgtgtgaggtcatcaagctttgttgttcaaaagaaagaaaataattaagtgtcagaatgtgagtagtcttaagttattttaaaaaatcaaagccacaatgagataccaccttactcctgcaagaatggccataatcaaaaaatcaaaaaataatataaatgtcggtgaagatgtggtgaaaagggaacacttttacactgttggtgggaatgtaaactagccaa

SEQ ID NO: 243619 - DNA, 965 bp, Homo Sapiens
ttggatgactgtctgtttatactgtaaggggcttaatcagcagctccatcttttagttttagttctaaaggaaaagtagcctaaagtcagtataactaaagggtggaacgaggtgggacaaggtccggaattgctgctcagtgatgtgtgtgtgcctgccgctggtggagctgagactgctcatctcagaaggatggggatgcttgatttcctggccaggttgtcccagcacagtggggattggccctgttgtatgacgaagacagcacatggtggcagagatagatactaacccatggactttccaagggagggaataggtctttggagggtatgcaagacaaaggtagacactggataaagaacccggtagtgcccaggtattaccccatctgggccattactcccacactcaggaaccagacgttgtgggtgaggacatgctgtccctcctgccaagtaataacttccttcccagccaggatcctgccccaagtaggaatatagctctgcatttacagcagctcctgctcagaccttgtcaaaaccaccctgcagcttaggattaaggagcatggtcacaggaaggtggggtttcagggcatcccctcaggaactgcccatctccccagaattccaaaatgaaggtccatatgcttgtaggtgtgctggtcatggtgggcttcacagtagaaagggtaagtggggcccaggggcacggagggaggaagggtaactgagtccaggaagggggtggagcgtggccatggataatcgggcttcctactggcccagggtatttgagagtgacccagtgcctccatccctccttctgcctccccagttcctgttcccgacatccggacgtgccacttctgcctcgtagaagacccttctgtagatgcatttcacgctcagagaagtgtaccatcagcagctcatccctgtgcatggtgatcaccatc

SEQ ID NO: 243620 - DNA, 878 bp, Homo Sapiens
ttgggattgctcccccgcggccgcagatctcccgtttgcgccgcgttcagctgctcccgaacaacttttctgccggcccagaggccccagggcgtcgcagcgccgcgtgcggcccactcacgggccggcgatggactccaacactgctccgctgggcccctcctgcccacagcccccgccagcaccgcagccccaggcgcgttcccgactcaatgccacagcctcgttggagcaggagaggagcgaaaggccccgagcacccggaccccaggctggccctggccctggtgttagagacgcagcggcccccgctgaaccccaggcccagcataccaggagccgggaaagagcagacggcaccgggcctacaaagggagacatggaaatcccctttgaagaagtcctggagagggccaaggccggggaccccaaggcacagactgaggtggggaagcactacctgcagttggccggcgacacggatgaagaactcaacagctgcaccgctgtggactggctggtcctcgccgcgaagcagggccgtcgcgaggctgtgaagctgcttcgccggtgcttggtggacagaagaggcatcacgtccgagaacgaacgggaggtgaggcagctctcctccgagaccgacctggagagggccgtgcgcaaggcagccctggtcatgtactggaagctcaaccccaagaagaagaagcagtggccgtggcggagctgctggagaatgtcggccaggtacatggaggggcgcagccaggccccgtgcccaagtccctgcagaagcagaggcggatgctggagcgcctggtcagcagcgagtccaagaactacatcgcgctggatgactttgtggagatcactaagaa

SEQ ID NO: 243621 - DNA, 713 bp, Homo Sapiens
aaagagggtggaaagaaggcagggagagggagaaagaaaaataatgaagtcttctgggcaggatggagttaaagggtctgacttaccttcccacctgaaacaatgacaaaaaaatttaaaaattaagcagatacaggaaacaaacaagatgagtcttgcttactgccttgagagagtctccaggctccagtacgggaaaagggaactgctcttgagtctagaacactccctgagttagggagatcaagatgagagtcgataaagatcaagacagggttcacaggacaaagtaccagagggaatagaacctggtgctcacacaggtccaggaataatgcctgttcttcccaccagactggaaagaaaatcataactcatggggcattgggtagagcatttagtagtgggaaacaatcagtcttaggctgagcaccactctataattgcctaacaaattataaaagcaagagatgaaaggcttaaactatttccaagtaacttaactgcatccttgagcaaagctcaagatttacaggaatacaaaaatatccagcacccaacaaagtaaaattcacaatgttgtaacccacccaacagttcaccttgcccactgcctagaaagagccaacttatcaagacgggaattgcagtagagaaagagaaattcacgcagagctggctatgcaggagaccagttttattattacttaaat

SEQ ID NO: 243622 - DNA, 1358 bp, Homo Sapiens
  misc_feature (669)..(684): n is a, c, g, or t
ttggcttctagccaattaaatatgaatggaaatgatgtgctcatttttagggttaatgaagtcctcctattctcccttactctttcttcgtcaacttgatgcctttgagcatggtgaccttcaaaactatgtattggagatgccaaagccagaaaagagaagaatgagtggctgaaacagtacttggaagacagccaccccaattagaaacacccctttttgcacttactgtaagagaaaaaattgagatttgagaatttatatgtataggagctagaatgaccatagctagtccagaaattggtacaagaagtggagtactgctaaaacaataacctaaaatatgttacatcagcttatttatgatgcagcaggtggtagagaatgtgatttggaggctagaaaaaggaggcccatgtttgcagtggcaaagtaattagtaaaactgtcacctgaaataattcaaaatcagatcacctatctgtttagattagctccagaggaaatgattgaaaagagcaaaagtaatactgtgttgaattttacattttacttttagtaaggttttactaaagagagaaactcaggaaatacttcacagaagtgagagtgtacaggaatatttctcaggaagggttggaaaagttgacttttataagacttctaatnnnnnnnnnnnnnnnnctagaagaggtcttgagtatagttacccttgagattaagtcctgcaacaaagatcaggaaaagggtttggtctttccattcaaagtcattattttagatggcttcaagatagctacgataaaggtctaaaggaactggcataggagcaaggcagcaaagcagtaaattaggcttgataattatgtaagaaagaactttgggtgtagttaccagaagcaaatcaatcagaagactacatttttagaggaattttattaatcatactaaatctggctcaaatatcattgttcgggtgttaaaacagagggtaactgtccaaccccaagcttgcataagtagaaaaatagagcataaaaccttaacagctccccagtacccacacaggatgtggccatggagaatgatggacaaaaaaagaacatttcagaagctcgtataaggagctgtactaaagactggacagggagtttctcctgaagactagaattggagtttcatcagaactttcttcagtttcaaggagatgggccgcaaaatgtttatgcagtatttcatcattattatacatgaatagtattgctcagtatcacattttttttctgaatgagagaatgtattatagttatctgtccctgagttaccactatatatagggtttgcagggatgggggtga

SEQ ID NO: 243623 - DNA, 616 bp, Homo Sapiens
gggtgatctttaaacagcttaatagttcgccagcttggactctctagattggtattgcaaccagcttcatttctgtacagaccatgaattaacaaatgtcttcaaacccaagaatcacctttaaaacaaatccttatttgacaataaacacacatatttaattacatggttaaagactattatttcgcacactctgaaatgatctttttccattccgagatcatgtcataaattaacagactaatagagaattttattatcgctgttatattgcactaatgcccagtagtagcccatggtctattctttatcattcaagtttataaaaagtaaagctggaacttcagtcatggtcagctggctaactgtgagtcctctttcccactccacaattaaataagagagtcattttggaactgcttgtccaagtcatttggggttcctctgctcagccgctggataaggatgcctgaactttaatcatctttagcagaactttagctaataggtatcaagtgatcatcacttcttttcctgtaacagaaagggaaagaagaaaagaggaaagatacaatactttaacatctttgaggagcaataggaatactctatccaa

SEQ ID NO: 243624 - DNA, 880 bp, Homo Sapiens
ttggctctcagttccccttcactttctctgttcccaagaaggccatgaggttggtgcctccaggacccccccttgtaaagataggaaatctctactcagagaggctgggctgcagcccaggccccacagtgggccaagactaaggtcttgagatgcgcggcaactgggctttcaggtgagatctctgctctcagcctttgccaagcaaggatgagactgtggggccccaagcaatctgtggcagggcctgggcaccctggccccgtctcccctgcagggtggaagcaaggaagacactattcctggccacatagatcagctggtcacaccttctgttgtttggccccgaatagatattggccagtcttgggtctctctgtggccccagcccaaggcttccagggcagctgcctttcctgaggcattgggcagaattccttgtggcaaggagatcgtagcacagagcccagctgggactgcgcacagtaattcagggttgccattgttcctctatgggagtccggagagcccagcctgtgcttcacaaggctatgtggccctaggaaggtccttttttaggccacaggccttccatctgtgaaatgggggatgggttcagactttatgccctgaaaagatccttccagccctggccatcttggacttctggagctaccctggctcacaggggtcttgttgccctgggtgtccccagttcttgaaaagaatcagcctgggaggggccacaccctgaccatccccctttatcccttctgagatgtttgttaggaagtctgggtccaggggatatcattttcttgttccatccatgcaggggttgcttacctcgggtaggaaacccctcaagcggtggcaggtg

SEQ ID NO: 243625 - DNA, 863 bp, Homo Sapiens
  misc_feature (419)..(512): n is a, c, g, or t
aggagaacccggatgtagtagaggctgcagggtttgggaaacccccatttgttattctgtgcttcccctcctggcctggaagctggcccacttcatggggtgactcacggccctgcctctgtgccccaaggcagcctccgccctcctgtaaacaggcccacagggctccaaggggaggacatttgtgggtaaatcaccctcacatccccccaccacccacagctcatctggaaatcagctttccgaagcttccacatgtgtgccctccccctctctccactgcagacacctgcacaggctgagctgccctggccacacactactcagccagggctgggggcccttcccccatcaacacctccaaccccagcttccagcaaagctcatcctcccaggcagtctctcatctgagacccgtnnnnnnnnnnnnnnnnnnnnnnnnnnnnnnnnnnnnnnnnnnnnnnnnnnnnnnnnnnnnnnnnnnnnnnnnnnnnnnnnnnnnnnnnnnnnnntagggaccatcaatcacttaatgaataagacagaacatttcagagagtgacaggggcttcaaagaacttcagacaggctgccgatagaggggctggtgtttgagagtgccgtctctgagaaggggtcttttcctaaaccccagggaggagaaaacaacaaccatggacagagctgggagaaccacattccagggggaggcaacgccaagtgcaaaggccctgaagcatgaccattcttggcaaatgcaagatgcaggaagcaggttagcatggccagagcagagtgaggggaatcgtggaaagtgaggttggagtgggtgggaaagggccatgtgagtcattataagccaa

SEQ ID NO: 243626 - DNA, 921 bp, Homo Sapiens
gggagagaagggtcttggtgagggatttgctcagaactaaccacacagccccaccctgagcctagaaatcatcccattcatagaaatttccctccagagagaatctggctttacctgcacccacccagtcccctcccagactccccactccaggagagagctcttctagagccagagcttggtgtctcaaggaggaagacccctgtcctaggaaacccccagcaccctgatccctccccccagggccctggggggaacatagcaaggactgcagcccaggcttggcctggagtagacacagccggggctgggctatgagcatcttaagccatttccacttctgctccagctgcctgaccacctgggacccgcaaaggcccaggctccaaggaagtcgtgtgctcccactgtcacccatgctctgctgcctcccaaccctctcccaacgcaactgggttggaaatggatctcggcagaccagagtcagagtaactaattaatcagagcctatccccagagcccagcttgttccctccctaatgcgccttgtcccttcccccacccaccacatttctgaatttcctgcagcccacccaccccctcagatccccaccccaagacttccaaggagctgaggggtcagaggagaggagaatggggtgaagtgggacctacactctgctgaagctgctcatgggtgtggatgaccaaaagtgaggacagaagacgaggccgggggacaggaatgggttccattcaatccagcaacaacatgcaccatgtctcgtccacaggaaaatgctgggctaccacaactgcctaccctagattaaaaaacccttcctttcataaaaatagatgagagtctcttgctttataaatagattacatttagcttaagccaacttttttgtacaaagt

SEQ ID NO: 243627 - DNA, 1087 bp, Homo Sapiens
tataaaagccaactttgtacaaaaaagttgggtagctgacttcagcggaaacccactgactaggttgccagaaagctttcctgaattacagaatttaacatgtctttctgtaaatgacatctcactacagtctctacctgaaaatattggcaatctttataacctggcttcactggaactgagagagaatcttcttacatatcttcctgactctcttacccagctgcgaagactagaagaacttgatttaggaaacaatgaaatatataatttgccagaatcaattggagccctcttacatctaaaagatctctggttggatggaaatcaactgtcagaattacctcaggaaataggaaatctgaagaacctgctgtgtttagatgtctctgaaaacaggttggaaagacttcctgaagaaatcagtggcctgacttcattaacggatttagtcatttcccagaacttattagaaacgattccggatggcattggaaaactaaagaaactgtcaatcttgaaggtggatcagaatagactcacacagttgcctgaagcagttggggaatgtgaaagtctcactgagttagttcttacagaaaatcagctcctgaccctgcctaaaagcattggaaaactaaagaagttgagcaacttgaatgcagacagaaataaattagtgtccttaccaaaagagatcggcgggtgctgcagcctcactgtgttctgtgtacgtgacaacagactaactcggatacctgcagaggtgtcacaggcaacagaacttcatgtcctggatgtggcagggaacaggttgctgcatctacctttatccctgactgccttgaagttgaaggctctgtggctatctgacaaccagtcccagcccctgcttacattccagacagacacagactacaccacaggagagaagattttaacctgtgtcttacttcctcagctgccttctgaacctacttgtcaagagaatctgcctcgctgtggtgcactggagaacttggtaaatgatgtctctgatgaagcctgaacgagcgtgctgtcaacagagtcagtgcgatccgatttg

SEQ ID NO: 243628 - DNA, 969 bp, Homo Sapiens
ttggggaacgccagccgttcacgcgttcggtcctccttggctgactcaccgccctggccgccgcaccatggacgcccccaggcaggtggcaactttgggcctggtcccgccaagctgccgcactcagtgttgttagagatacaaaaggaattattagactacaaaggagttggcattagtgttcttgaaatgagtcacaggtcatcagattttgccaagattattaacaatacagagaatcttgtgcgggaattgctagctgttccagacaactataaggtgatttttctgcaaggaggtgggtgcggccagttcagtgctgtccccttaaacctcattggcttgaaagcaggaaggtgtgctgactatgtggtgacaggagcttggtcagctaaggccgcagaagaagccaagaagtttgggactataaatatcgttcaccctaaacttgggagttatacaaaaattccagatccaagcacctggaacctcaacccagatgcctcctacgtgtattattgcgcaaatgagacggtgcatggtgtggagtttgactttatacccgatgtcaagggagcagtactggtttgtgacatgtcctcaaacttcctgtccaagccagtggatgtttccaagtttggtgtgatttttgctggtgcccagaagaatgttggctctgctggggtcaccgtggtgattgtccgtgatgacctgctggggtttgccctccgagagtgcccctcggtcctggaatacaaggtgcacgctggaaacagctccttgtacaacacgcctccatgtttcagcatctacgtcatgggcttggttctggagtggattaaaaacaatggaggtgccgcggccatggagaagcttaactccatcaaatctcaaacaatttatgagattattgataattctcacggattcctacgtttgtccagtggagccccaaaatagaagcaagat

SEQ ID NO: 243629 - DNA, 1540 bp, Homo Sapiens
  misc_feature (706)..(787): n is a, c, g, or t
taacttatggcactttacaagggatttctctcacaaacacattttgatcctccaacaacattttgtcatggtccctgctctcagtctagtaatgtaaaatattactgacccccatcacacattgcaagcagcactcacttctttggaaagctgagctctgcatgcaacatgctgcccaagaaggaaaggaagcagcactggagacctgtgtttcatagctaaccaagataagggcatttttttccaaatgtctgtggagggggtcacaccattttaactatttactgctgtaaccccatttttaaagtgtagtctgtgagccatctgaatcaaagtctcttgcaaaatcccggccaaaatccagacatactgaatcagagggtcaggtcccagaataggcattttgaacaaactcaggttcataaagcttgaaaagtttttggggctgttgtgcctgttgttctcttagtctgggacactcttgtccagattgacaaagggcttgcttcattcagatctgcttaaatgtctgctcctcagaaaggtctttcctgactactcaatctaaagagtagcctctatcaccttcatccccttaatgtgcttgattttcatcaaagtgcttacaacctgatatcatattactcttgtgtctgtttattgtctggctctttcactaaatgcaagcttcatgaacatatccatnnnnnnnnnnnnnnnnnnnnnnnnnnnnnnnnnnnnnnnnnnnnnnnnnnnnnnnnnnnnnnnnnnnnnnnnnnnnnnnnnnctgctctatgcccttgaagattgcactggccattagcgctgattgccaaatatttccagccctttccccttctgagcacaaggtagaattttacatctgctcctgtttgtagagtggggtcatatgactagttctggccaataagctgtgagcaaaagtgactggagcttttaaatgctgatgtgggatcctccaggctctctcaatctccctttggcacagtgactggcaatattagacatggtgagtctgatgagaagagagcacttgccaacctgcaaaaggcatgtaatgtgagcgagaaaggagtctgttattgcagggcactcagctgtggagcttattactacagcataacctaacttgtcctgactcttacagtgattccatgtagacagttgtgcaactgtcagaatccctgggagttccctgaaagcttcggggatttcaggcgacttcagacgcctcaaagtcaaacaaaaccaaaaatgtccccttcaggaagtcaggccatgttctgtccttccgttttccttcttactagggaacttggggagggaggctgggcggcagcagttaaacaactcacccaatgggaaaaccagcacgctctgggaccacctctgaagtgatctcacaccctgaccacacactctaaactcactgtcataatccttccccttggtcaaaaataaaagcagcacacccactctgctgggagtgagtcacaaaccgaaaaaagtcaatgggtct

SEQ ID NO: 243630 - DNA, 864 bp, Homo Sapiens
ttggctcctggccgagaagcagagcctgccctacctggaggcggccaacttgctgttgcaggcccagctgcccccgaagcccccggcttgggcctgggcggagggctggacccggtacggccccgagggggaggccgtacccgtggccatccccgaggagcgggccctggtgttcgacgtggaggtctgcttggcagagggaacttgccccacattggcggtggccatatccccctcggcctggtattcctggtgcagccagcggctggtggaagagcgttactcttggaccagccagctgtcgccggctgacctcatccccctggaggtccctactggtgccagcagccccacccagagagactggcaggagcagttagtggtggggcacaatgtttcctttgaccgagctcatatcagggagcagtacctgatccagggttcccgcatgcgtttcctggacaccatgagcatgcacatggccatctcagggctaagcagcttccagcgcagtctgtggatagcagccaagcagggcaaacacaaggtccagccccccacaaagcaaggccagaagtcccagaggaaagccagaagaggcccagcgatctcatcctgggactggctggacatcagcagtgtcaacagtctggcagaggtgcacagactttatgtagggggggcctcccttagagaaggagcctcgagaactgtttgtgaagggcaccatgaaggacattcgtgagaacttccaggacctgatgcagtactgtgcccaggacgtgtgggccacccatgaggttttccagcagcagctaccgctcttcttggagaggtgtccccacccagtgactctgggccggc

SEQ ID NO: 243631 - DNA, 438 bp, Homo Sapiens
gtgtgagccaccgcgcctgccaacactgttattgcacccattttacagcaagggtgtgaaccccaggggactctggagccaactctgcctctcccccaaccccgtggtcttggactcctcccctcttctctgtcaccccccagagtcagcgaccacatggacctggggccctcagagctggtgggccgcagctgctaccagtttgtccacggacaagacgccacgaggatccgccagagccacgtggactgtgagacccacctccacccaccaagcctgcctaccaccccccagacccgagcatcccactccctggtccctggaagtccttcttcagggctgcccacagtccctcctgctgcacctacagctccagggactccgtttagcattggaagagcagcaaggagactgagtgatgcctcaggatgtgtgtgt

SEQ ID NO: 243632 - DNA, 1636 bp, Homo Sapiens
ctttgtacaaaaaagttgggtttcaaggtgctcagcaaagtccagatgcctccttcctacctcgacacggagtccaccagcggaacctcgagtccagtaaaaggtgaaaacggcaaaataattttggaaacaaaggcagtgattcccggtgacgaagatgcttcgtttccccctctgaagtctgaggacagtgggatcgggctcagtgcctcgtcaccggagctctctgagcacttgagggttcctcgagtttctctggaaagggacgacgtttggaagaagggcgggagcatgcagaggacgtttctttgcatccaagagctaatcgccaactttgccagcaagaacatttttggagtacagctgacagcgtcaggagaagaaagcaagtccgaggagcctgcagggaagagggacagggatgggacgcagagcctggcagccaatgattccagcaggaagaactcttgggagcccaagcccatcactgtgcctcagttcaagcagatgctgtcagacttgttcacagcacgagggtctccattcaagacaaaaagttcagagtcaccatcgtcttcgcccagcagccctgccaggaaaaacgggggagaatgggatgttgagaaggtggtcattgacctggggggttccagggaggaacgcaaggaggcctttgccgccgcctgccacctgctgctggattgtgccactttccctgtctacctgtccgaggaagagaccgagcagctctgtgcaacgctcttccagctgccaggagccggtgattccagttttccatcttggctgaagtccctcatgactatttgctgctgtgtgactgactgctacctccagaacgtggccatttccactctgctggaagtgataaaccattcccagtccctggcgcttgtcattgaagacaagatgaaacgctataagagctctggacacaacccttttttttggcaagctgcagatggtgacggttcctcccattgctccagggatattgaaagtcattgcagagaaaacagatttctatcagagggtggctcgtgtgctttggaatcagctgaacaaagagacccgggagcatcacgtcacctgcgtagaattgttctaccggctgcactgcctggcccctacggccaacatctgcgaggacatcatctgccatgccctcctggaccctgacaagggaacaaggctggaagctctgtttagattttccgtgatctggcatctgacaagagagatccaaggcagtcgagtaacatctcacaatcgctcctttgataggtccttgtttgtcgtgctggacagcctggcctgcacggatggtgccatcggtgcggcagcccagggctggctggtgcgtgcgctctccctcggggacgtggctcgcatcctcgaacccgtgctcctgctgctgctgcagccaaaaacccagagaacctccatccactgcctcaagcacgagaactcggccgatgacttgcaccgttggtttaacaggaagaaaacctctttcagagaggcatgcgcagtgcccgagcctcacgagagcggctctgaagagcacctgcctctgagccagttcaccacagtggaccgtgaagccatttgggccgaa

SEQ ID NO: 243633 - DNA, 361 bp, Homo Sapiens
tgagcaggctcagggtgaagcccagggagatgcccacggccacgggccctgcgggccgcagctccgacagcagcagcgatgcccgcatggcgcccggaccgcgggtccccggccccggcgaacccccagagcagccagaggagtctccgagggggcgggaccggggagggggcggatccggagggctcgggccccgcgggcgggcccgctccctccccgcagagcagagccagcggcccgagccgaatccccggagccgcgcctcgattcccctccagcagctgctctgggctgcgcagggttcttgcgctcggcactggagcctcagccgcggccgcagcccaacttttttgtacaaagt

SEQ ID NO: 243634 - DNA, 944 bp, Homo Sapiens
  misc_feature (539)..(690): n is a, c, g, or t
gaacctgttgaattgaaatggaaaaaccaaatttaaaaactgataaaagtcaaatcaaagatatgagagtagtgactgatgtcagactgcaatgagcacttaagctgtcacccacagagcagacgctgaccttaacaggacacaggtctagggctttcaaattgagtgaagcaggactgccccacaatgctcctttactagggattcttcagcaaaactttcaatgacaaaattttaccaggttcttcgttttttctcttctgttgtcatttacagaaatggtgttgctcttaagtgcctacatcatgtgaattatgcatgatacacagacatgcttcactgcacactatccttgcatctgtctgaaaccagttatggaactggtaatgttcctgccatgggtcctgatgtatattaactcttaaaggagatgatgatgatccctgtcaacaactacaaagtcctacacagtcctcattcttctcgaccttttccccctctgcttccaagatactgcattaccttcatttccttctacnnnnnnnnnnnnnnnnnnnnnnnnnnnnnnnnnnnnnnnnnnnnnnnnnnnnnnnnnnnnnnnnnnnnnnnnnnnnnnnnnnnnnnnnnnnnnnnnnnnnnnnnnnnnnnnnnnnnnnnnnnnnnnnnnnnnnnnnnnnnnnnnnnnnnnnntctgtttttaatagagactggcttttcttagctgaacccatttctgttatgtggaaaactcacaagtttctgtgcttgccttttttggatttatttcttctctctcctttttcccccattagaatttctttaattttattcagtaacatgcagattgtaagttccatgagatcacaattcttacatgagctccatgagatcatgtaactcttatattcattcacttattactcccctattcatgtattcaccaa

SEQ ID NO: 243635 - DNA, 1617 bp, Homo Sapiens
ttggcttatccttaagggaaaagttctaaatttttaaatttatttttaattccctagtctgagggaaatgtctttattgtccattacataaaaatgttgactccagtaatttatttttctctattttttcctccatgtatttactccatttttctctattttttccttccctgatggatttgcagaaatgttaaccaattagctcaacttttctctacctttgttgagtcttaatcttttagaagataggcttaccgtatatttatgaagcataatatattaaaagaaaacaaatctaggatgcttgcatgacataaagtatttgcctgcagttttcattaaaaactgcaagaatatcatgcttgtctgcttcttagtaaatgttaagtctgaaatggaagtgaggatgtaactctactgaataatcaaagatcatcttagatttggcttgatctgtgtttattgcttctattaatgtaaatcaactctgtgccaaatcctcctccacaaaccatttattgtcttagttctagtggtatcaatgaagatagttacagtatatgaattctaagtcctgaggaagaaattttatggggtttgttaagtttcacattcgtgaaagaggaaattagtagagtattcagactttgatatttggctgttaatgggatgcatatcaaatttttaaaagaaggcttggcctaaggagtttattggtacaggtgcagatgattttaaggcattaaaggattatagagttatgtcatttagactgtttctaataactgagaccatctaacatttttcttttggagtctcatttttatttgtgcaatattttcaggcatataggctactgttcattgtatttatatatatattagaatttactaagtactttaacaagtaaaaatctgaatatgaaagaaaatatcagatttgcactttaaatgagcttaattgcttgaagttgtgcctgaaatatcgaattgcctcctattgggtgtggctttgttgaaataaatttgtaattgttgctgtttgaagatatcagtacagctgttcacagaaatatattcccagcatgtcacttttccattaaagcactaagttttctttgaatgttccattgttccgataagtattttacttttttctcagtacatcagagagagcgtgatccccctacagctgtcacttccaaatgttcctgtagcataaatggtgttacagacactgaggtgcactcttggtttctgagcagagttgtcatactggtttcctggtctctagggcactggggatgtactttgaaatcaccgaacaggcttgcaattaagatcaataaggctgcagcaccatttcaatttactttccatcttacccagtagtttttgtgtttttaaattcgtttgggtggttatgtttgcatgcttaagcacacatttgaaaattaattatagctgtactacccgatgtttttccttggggatgatggccttgttcctttttaaattctgatgcttgaattctattttctagtgatttttcacatctccctttaagtttttgctgcagcaatttgagagagtacttttgattaaatgattctgatgg

SEQ ID NO: 243636 - DNA, 982 bp, Homo Sapiens
ggtggggggcggtgccaagcattactgcctgagctcagtttcctgttagatcagccatggcattagattctcaaaggagctcgaatcctgctgtgaaccgcacgtgcaagagatctaggttgcatgctccttatgagaatctaatgataaatgtaatgtacttgaatcatcctgaaaccatccccctaaacccccagtcctgtggaaaaattttcttccacaaaacccgtccctagtgccaaaacagttggagatcgctccactagagaacagttaacggcttacttcctttaaagtgccattacaatttcactgctcagagctaggttctttactgtagggaaaataatgaaaatgacaattgcaattgtcatctatatatcatctatttaaaaatcccatctatttagggatcctacccaaaaagcaaatttaactttaaattatcacaacataacacttatcttctcatgtgttcaagtgttactgacatttgtccactcacaggggctctctagattcctactttagagaaatacattatgcttttcaatcttgggagaaaaagagtaagaattgaatcatttgctaaaaagctcttaaatgattggtctattttcatattccaatcaataacgttatttaaattcacacctttgtaaaaagagtggatttttatattctttgtgcaatcactagttgcttttttactataaaacttaatatcaggaaaaaaggcatggaaatttacagctctgtattctactacttaaaggtagatgtaaagtattttaagattttcagacatttgtaaaaatgtcttttaacaaatgaacttataatttaaaattcaaatatttcttgattttttgggggatggcatgattcctctaaaaattaaaaatataatatggtcttcagaaacataatcatttcattatccaatgacttactaaactttacccaacttttttgtacaaag

SEQ ID NO: 243637 - DNA, 1090 bp, Homo Sapiens
actttgtacaaaaaagttggcaccgtcaccccagcagcatccgccgcctgcaccgcgcgtgcggcccgccccggcctgaccccgccgccgaacccggcgccagccatggagcccgaagccccccgtcgccgccacacccatcagcgcggctacctgctgacacggaaccctcacctcaacaaggacttggcctttaccctggaagagagacagcaattgaacattcatggattgttgccaccttccttcaacgcgggagatccaggttcttagagtagtaaaaaatttcgagcatctgaactctgactttgacaggtatcttctcttaatggatctccaagatagaaatgaaaaactcttttatagagtgctgacatctgacattgagaaattcatgcctattgtttatactcccactgtgggtctggcttgccaacaatatagtttggtgtttcggaagccaagaggtctctttattactatccacgatcgagggcatattgcttcagttctcaatgcatggccagaagatgtcatcaaggccattgtggtgactgatggagagcgtattcttggcttgggagaccttggctgtaatggaatgggcatccctgtgggtaaattggctctatatacagcttgcggagggatgaatcctcaagaatgtctgcctgtcattctggatgtgggaaccgaaaatgaggagttacttaaagatccactctacattggactacggcagagaaagagtaagaggttctgaatatgatgattttttggacgaattcatggaggcagtttcttccaagtatggcatgaattgccttattcagtttgaagattttgccaatgtgaatgcatttcgtctcctgaacaagtatcgaaaccagtattgcacattcaatgatgatattcaaggaacagcatctgttgcagttgcaggtctccttgcagctcttcgaataacaagaacaaactgtctgatcaaacaatactattccaaggagctggagaggctgccctacggattgcacacctgattgtgatggccttggaaaagaaagtttaccaaagagaaagccatcaaaaa

SEQ ID NO: 243638 - DNA, 636 bp, Homo Sapiens
tacaaaaaagttggcaccgccaaagaggtgtccttctccaacaagccctacttccggggtgagttctgcagtcagggtgtccgtgagggcctcatcgtgggcttcgtccactctatgtgccagacggctcatagcttctgcgacagccctggggagaaggggggtgccacaccacctgccctgctcctgctgctctcccgcctctgcctggactacgagacggccaccatctcctacatcctcactctcactgatgaacagtttctggtgcaggatcagttcccagtgacgcccgtgagcacgctgtgtgcagaggccagggaaacggcgcggcggctgctgacccactacgtgaaggtgcagggcctggtcatatcacagatgctgcgcaagagcgtggagactcgcgactggctcagcactctggagccccggaatgtgcgggccgtcatgaagctggtggtggaggataccaccgccatcgacgtgcaggtggggctcctgtacgaagagggtgttcgcaaggcccagagcatcgactccagcaagaggactttctccgtgtacagcagctctcggcagcagggccgctacgcccccagctatacccccagtgccccgatggacaccaacctc

SEQ ID NO: 243639 - DNA, 488 bp, Homo Sapiens
ttgggtgcaatggctggaataaagggttcttggaagcaatttgttacaggcaccctgtgggctgtggctggctgtggcacacgtgaaggttgtgtgtcagacctactccctggacatggcgcatggctgcacacaggcaccttggctgagaagatgcacagtcctggtttcactctcctcccctgccctgtcctgtctgcttccacccagctctgcaggccaccagcccccgcctctcgtggccacccccagcccagcatgtcctcagccgcacatctcctgtgtcgacaggtgaagtcccgcttggcttttgggaagcccctggtggagcagggcacagtgctggcggacatcgcgcagtcgcgcgtggagattgagcaggcacggctgctggtgctgagagctgcccacctcatggacctggcaggaaacaaggctgcagccttggatatagccatgattaaaatggtcgccccgtccatggcctc

SEQ ID NO: 243640 - DNA, 514 bp, Homo Sapiens
  misc_feature (275)..(337): n is a, c, g, or t
acatctgttgtgattattgtctttataaatgatctgaaagaggagggtcttcctagtgaggtatctagatgacattaaagtcttctagttgtgaagagcaaaaccagtgagtacagatgatgaacaaagaaacaccaaaattagcttctctctgtgctagaacaagtaacaaatccagcatcttaagattttatattctttgactgtaagcactgatttcaacacatttaatgttgaaaattgcttccagatttaatgttttatgattttatgannnnnnnnnnnnnnnnnnnnnnnnnnnnnnnnnnnnnnnnnnnnnnnnnnnnnnnnnnnnnnnaccaatcagggaataaaatataggaaaatataattttattttaatgaaaatataaacttattctggtataaaattcaaattatggttacagttagggaaaaatgagtgcagggagtgaatactgggaaactatacgcattgtttactgaatatatcacacttaagtagaaaacaaaa

SEQ ID NO: 243641 - DNA, 923 bp, Homo Sapiens
taaaaggcacaaacgctgttttaaaatccttgcccactcgtgtaaagaacatcagccaagcatggtgctatagaaataactcctatcttggctgttcctgtgtgtagttcactttcaatctctcagcatcctgagttgaagagagatcttgcttaactgggagggaaggccaaggggtttctggatacaggagccacccttggggatcttagagcctcagaagaggcaaggatgtacgttataagaaggggctgtccagatgataaatgaaattaataaaccacccctgtgatgccagcacatggctcacagcagatctgcatcaggcgcctaccattgccctaggatgccattaacacctactcttccttatgaggcttagaatcagggctgctgaggacttcagaaatcatctcattcaggtggggtgaagggggtgggtagcttccctgagggtcccacagcaagagttagagacacagccaggaccagaacttactgaaaagcaataatccaaggtctgacttgggttctgaggatttgctcagttatagatgtcattctcgatttggcctgaagagggcagacacttgccattcatggaggtgaagagcttgtttttaaggctggactaacatctcccaataaggtcatttggttctagtgagagttgcagctcacaacattcttgactcttctgctgcaaatatgctactggaaagacactgaagttcacagactgaagttcctttagttccaactctggcactgtaataggtgaccttgcacaggtcacttcacctctctgagtctcacttcttgtgaagtaagatctctactccgtgactgagaaggtggtattggggagtgatatgtaacttacaaagttgcatattacaacacacatcactgctgttaagttc

SEQ ID NO: 243642 - DNA, 781 bp, Homo Sapiens
gaggagcaccaactcctcctgggagaagtaaaatggtcacgtctcaaaggtcacgcagccctgccatgatggggacagttcgttccatgatcagtctctgtcctgggactccctatccatcccctgctcactctcctccccagctccacagctccaggaggtagcaggccctggttctgtgggcgcctcatgtgaccactgtgtcagcccgcagcagcaacaggcagggtgcagagaggcaccctctaagctctgggcctgaagtccagggcccagctcgctcttctgccagcctcttcccctagtgtcaccaatgtcatgcttctcagatacaaatgtgggcttctcctttaaaccccagtccagagccctggggtgaacagctcatactccctcccacgtgcgtttcactctttggactgcaccaccctcacagctccagaccttcaccacggcctcccattgccactgctaccttctccccatcctggcccctatcctagccatctccatgggctcccacgagtcactctgcacatggcatccagagagtgcctggcaaacataagcaccatcccagcctgccccagacctttgatggcctccactgccaagggcaacacccaggtaagggggagagggagcgctccacccttgccttggagccccctagctcccctggcctggcttcaacctaagccacccacggcacacatggatgtcacatacacttggccttctttgttgcacattctgaccctgtcatcactcacactcattt

SEQ ID NO: 243643 - DNA, 918 bp, Homo Sapiens
ttgggttttagatgcttctggatgttcaatgctagcacctttacagactggagcagctcgattttcttcgtatttactttcaagagcaagaaaagtgctgggctcccacttattttctccctgtggtgttccggagttctgctccatatccaccagaaagctggcggcccacggctttggcgcatccatggcggcaatggtgtccttccctccccagaggtatcactactttttagtgctggactttgaggccacgtgcgacaagccacagattcatcctcaggaaatcatcgagttccccatcctaaagctaaatggccggaccatggagattgagtctacctttcacatgtatgtccagcctgtagtccatccacagcttaccccattctgtacagagctcaccgggattattcaagccatggtggatggtcagccaagcctgcagcaagtgctggagagggtcgatgaatggatggcgaaggaaggcctcttagatccaaacgtcaagtcaatttttgtcacctgtggagactgggacttaaaagtcatgctcccaggccagtgccagtacttgggcttgccagtggcggattacttcaagcagtggattaatctgaaaaaggcttacagcttcgccatgggctgctggcccaagaatggacttctagacatgaacaagggcctcagcctgcaacacataggccggccccacagcggcattgacgactgcaagaacattgccaacatcatgaagacactcgcctatcgaggcttcatcttcaagcagacatcgaagccgttctgattgggccgaggacaggatggggcaggacagggtagctgtttgggccacccaaaatcctcctctccctcaccagaagggaagagggagagtggcatagctctgtgtccaaa

SEQ ID NO: 243644 - DNA, 914 bp, Homo Sapiens
gggaggtaatattttatgagagctgattgttctgttacttacagaaatatcagctggtatgtacagatagggatatacccaaaatatacacaacagataacaatcacacgagacacatgatggtttgatgcatagatgggttgtagcttaagttcaatcatgatacctataactccatctctgtctctcctgcccaataaagccaatttgagtaaaagtgagtgagaaagatgttatcatcgtcattgagagaataaactttattctcatttacaagacatagttgtttacaaccaagcatttgaattagctagtgcctatactctactaatttttaaatatttctattatgacatgtacttgcatctgaaggcatcttaaatgatgtttttgtttttgttttgtcagcacaactatctcgctgttctgaaaaagtctactcttgtctccaagaagtcaccagaagcaaggagctaaaggactgaggccctaggagccaaatggttgtacattcgtatcccagagtttgtcctattcctcctgcctgaccccaaaagaggcacctgtatgaccttgaaagacaccctgtaaaccatcccctaaatgtacactaataaaaccctaggcccaagcttcagccacaagatcaaggaactttcaacgaaatggataagatttgtctctaaaccaatgcttgacactcaagatccctaagtaaattatgaattttccccagtagcttaaaataacttctataccatatgacactttttgcttctccagaatttttgtttcccttctccccaaatgtgtgcttctaaaatcctgagtcagcttagaggttctcatgattttcttcccaccactattacagggcagacatgataaaccacttgctttcagaattttgccaa

SEQ ID NO: 243645 - DNA, 977 bp, Homo Sapiens
ccccaggacacagcatcaaggaaaagttaggatgcccagtatagattcccatgaataagtaagacacagaaatcaaagcctataaacaatttggacgaaggcagtgatgtacaagatgcaaatgttgttaaaataacaagcaggttgaaaaataatgcaaccaagaaaatgaaccacacagtaagacgaatcatccagcttcccagtaaatattcacagggcttaaaagcacctaaaaaaaacacacacagagagagagaaataaaagataacttagaaaacaatttagaaaatgatatggcttgatagaaaaactaatgatatagactaattaaatctgctctctacttgaacaaaactgaactgattactagttctaagatattttggtcatggaccaggctattttaaaaataaactgactttaatttattttattaaatatttggtaaggctataaatatttcttttattaaatatttgataaagagtgatatttagatgaaatttttcattttttcttgcatctaagctaatttacatagcacaatatctagggcataagaggtatttgatgactgagggtctggaatgagatggttcataacttgctattcttaccttaagaaagcaacttaaaattgtataaattttaacctgtattcattttctcacttgtggataataatgcctgtttcatacagttgtgcagcttaagtaaaattatacacataaggaactaagcaggatgctggatatatagttagacttcaataaatattagctcccttttcttcttcctttctagccccaatatactttataatcatgtatgtatatgtatgtatctacacatattttttatatattttcttatgactttcaaaagcaacctgatgaagcaggttaagacagtataattatccccatttttcatccagagaaactgatatttcaaagaaactgacaaaggccaa

SEQ ID NO: 243646 - DNA, 1097 bp, Homo Sapiens
ttggctcgggcgtcctgggagcagatcccgactgggcctcctacactctgggcgtcttcatctgcctgagctgctcgggaatccaccggaatatcccccaggtcagcaaggtgaagtccgtccgcctggacgcctgggaggaggcccaagtggagttcatggcctcccacgggaacgacgccgcgagagccaggtttgagtccaaagtaccctccttctactaccggcccacgccctccgactgccagctccttcgagagcagtggatccgggccaagtacgagcgacaggagttcatctacccggagaagcaggagccctactcggcagggtaccgtgagggttttctctggaagcgtggccgggacaacgggcagtttttgagccggaagtttgtgctgacagaacgagagggtgctctgaagtatttcaacagaaatgatgccaaggagcccaaggccgtgatgaagatcgagcacctgaacgccaccttccagccggccaagatcggccacccccacggcctgcaggtcacctacctgaaggacaacagcacccgtaacatcttcatctaccatgaggacgggaaggagattgtggactggttcaatgcactccgagctgctcgcttccactacctgcaggtggcattcccaggggccagcgacgcagatctggtgccaaagctctccaggaactacctgaaggaaggctacatggagaagacggggcccaagcaaacggaaaagcttccggaagcgctggttcaccatggatgaccgcaagctcatgtacttcaaagaccccctggacgccttcccccgaggggaagtcttcattggcagcaaggagagtggctacacggtgctgcatgggttcccgccgtccacccagggccaccactggccacatggcatcaccatcgtcacgcccgaccgcaagtttctgtttgcctgcgagacggagtccaaccacagggagtggggggcggccttccaaaaggcggtggacaggcccatgctgccccagaattacgcagtggaggcgcacttcaagcataaaccttatcaagtgcggctggaggaccacggacattg

SEQ ID NO: 243647 - DNA, 1340 bp, Homo Sapiens
  misc_feature (1147)..(1158): n is a, c, g, or t
gtgatgttggtaggattcacctctaggcaatctggaagccacacagtaacaacttcaagttgccagctgggtttggtcaaagaaatgtgtaaagccaggatccactatccttagctgattctgttagatcaaaatgcctaatacaaacaatttcctcatgtctaaaatactgtttccgaaagttatttcttttgttttacaaatagagagcagtaatcattttcctatgaatactagaatgattatataatcctcattcaaacctcacaccaagtgttttcaacagccagaacagagcaatttttaaactacgaaaaatgaagtgcaaaccttacaatttcatagcaatgttccccacgtttcactcatgaacagctatccaattgcatgcaccttcctgcagaacttcttccaagtccagtccttccactggaggggctttcttcctatttctccaataggtctaaaatgtcaggttacagtcagatttggcaatgtgtattacttcaaatgattgagctggaggaaactacattcctttggaatgatgacagaatctatcagaaacttcacacatccactcagctctcctggatccctgtccacaccatgaagcctgaagttgttatgatggcctttatgaacctgaaagaagccgctggcttccaccacaccacagtgtcacccaagaaatccaatccttgtaagaaaggatagggcttatcttctcatgacttagaatttttcagaaatgagaatattcacaaaagagggaaaggcaattcccttacctatgcgctaaggaagccaaagtcagtgtgtgcaagagctagctctcaaaggcaatgaaaggagagtaaagaatagttttagttatcccctatccacttctcattctgactccccactttgctttcttttgcaaaaaggatgagctagttttccatttttataaaaactggcgatagtatgaataaacccagcatctataaagtagttgaataaaatctcaggccaaataaaggcctccataaggaagaactgacattaggactccaattactgcctgaagttctgctgtcaaaatccagctgcatgatgatgccactgtactccagcctgtatgacagagcaagactgcctaggnnnnnnnnnnnnttccagcggcaccaagtaccaccttgatgacttctgtattcaccactaaaaactgaaatagaacatactatatacagcttcaagtttgtcactttttaataaaacttttcccacaaatgattataattacttgccctttgaagctattggatagatctgaaagtgaggtagggtggggccaa

SEQ ID NO: 243648 - DNA, 1477 bp, Homo Sapiens
  misc_feature (900)..(1173): n is a, c, g, or t
gaaagaagttaagttaatttatgagactaccacaataaaaatatattaccagcaatatatctttgtgaaaaatctataataaccacacataatacttagtaaaaaagaacataaattacatgataaagaatatgaccagaacaatgcaaaaaaattcacacccccaaaaaagacaagatattatatggcaattttgtggtaaaatattcatgtatttgtgctgcatttctaaattttccgtaactgacacatcagttttataattaggaaaaaaatacctttttaaagtaaagcgaacacaagattctttagcaatgttcattccatcccacaatagagtctagagagtcacaaaaacctcagcctccttcgggagggggggagcttggtagtgaaaaatggtcatgaatgaatgggtgaagagagggatgggacaacctagtaggagggaggtagggataggcaagggaaaggtggggaccagtagtcatactggtcagccaaggaaaggggcattgtggagtcagggaagactctgactgctcaacagaggtctgtctagacccagtagtaggcactgacggtgttatcaaaggacaggatcaaagagagattttaggaagacacgtggattattttagggacaggggaggaaagaggaggggtgggtaaactacttggaaagaaagggagaaggactgagaagatggcaatgggagtggggaggaaggggctgattgcctttgtgacctcactaccaaacatactttgctcacctccagataagtctttgtggggcaaatgcaggataaagaaacagctcataagaggcacttgccaacatccaacaaattcagttcaaaaccacagaaaatctaggagtctccaaagaaaatcacnnnnnnnnnnnnnnnnnnnnnnnnnnnnnnnnnnnnnnnnnnnnnnnnnnnnnnnnnnnnnnnnnnnnnnnnnnnnnnnnnnnnnnnnnnnnnnnnnnnnnnnnnnnnnnnnnnnnnnnnnnnnnnnnnnnnnnnnnnnnnnnnnnnnnnnnnnnnnnnnnnnnnnnnnnnnnnnnnnnnnnnnnnnnnnnnnnnnnnnnnnnnnnnnnnnnnnnnnnnnnnnnnnnnnnnnnnnnnnnnnnnnnnnnnnnnnnnnnnnnnnnnnnnnnnnnnntctaacgcactgggttttaacaagcccctcaagtagttctgatgctccctcatgtttgtgagccactgaatgagggccatgcaaaatgtctagaatcactagttctgctgtcagctaaaccacatgaaagaacccctgctcatgtgaaagagagatttctacaaataaagtgacgggaggaccactaataagttatgtccagcttagtggggttggggaaaggttatatgaagcaacaaagatacagtttctctaagccaagtaaaggtaaagaactgtggagcaggcgataaagccaaaccaa

SEQ ID NO: 243649 - DNA, 1200 bp, Homo Sapiens
ttggcccagtcctgctgaagacagatgtgccattgagctcagcagaagaggcagagtgccactgggcagacacagagctgaaccgtcgccgccggcgcttctgcagcaaagttgagggctatggaagtgtatgcagctgcaaggaccccacacccatcgagttcagccctgacccactcccagacaacaaggtcctcaatgtgcctgtggctgtcattgcagggaaccgacccaattacctgtacaggatgctgcgctctctgctttcagcccagggggtgtctcctcagatgataacagttttcattgacggctactatgaggaacccatggatgtggtggcactgtttggtctgaggggcatccagcatactcccatcagcatcaagaatgcccgcgtgtctcagcactacaaggccagcctcactgccactttcaacctgtttccggaggccaagtttgctgtggttctggaagaggacctggacattgctgtggattttttcagtttcctgagccaatccatccacctactggaggaggatgacagcctgtactgcatctctgcctggaatgaccaggggtatgaacacacggctgaggacccagcactactgtaccgtgtggagaccatgcctgggctgggctgggtgctcaggaggtccttgtacaaggaggagcttgagcccaagtggcctacaccggaaaagctctgggattgggacatgtggatgcggatgcctgaacaacgccggggccgagagtgcatcatccctgacgtttcccgatcctaccactttggcatcgtcggcctcaacatgaatggctactttcacgaggcctacttcaagaagcacaagttcaacacggttccaggtgtccagctcaggaatgtggacagtctgaagaaagaagcttatgaagtggaagttcacaggctgctcagtgaggctgaggttctggaccacagcaagaacccttgtgaagactctttcctgccagacacagagggccacacctacgtggcctttattcgaatggagaaagatgatgacttcaccacctggacccagcttgccaagtgcctccatatctgggacctgggatgtgcgtggcaaccatcggggcctgtggagattgtttcggaagaagaaccacttcctggtggtgggggtcccgggcttcccctactcgtgagtg

SEQ ID NO: 243650 - DNA, 229 bp, Homo Sapiens
ttggattttcatctctgaaatatctcgttatttattggaggtattgtttaaccttagagagaccattaaattatttataaaatattttgtaattacctgtagctaatacattacatagaaaaaaactatgttaacagtgtctctgtttaagtataatcagatataaatatatacttaattttttaattttaaaaatagatacctgtttgactttgaggtagtccagacc

SEQ ID NO: 243651 - DNA, 736 bp, Homo Sapiens
  misc_feature (514)..(527): n is a, c, g, or t
aaaaagaaatttttttatattgattgcatgatgaaatattttgaatatattgagttaaatagattttctcatttgtttatttgtgctgttttctttttaatgtggctattagaaaatttacaattaactatatgggtcacatttgtgacctccattgtatttctattgggcaatgctgtgctagactcaccagaacgtatacatatttttattttttagactgatgtatacagtgcccttgtatacatgtgtatttctacggcagttaactgaatactcttttaagagggagaagatcctcaaaaatctggattttaggcttgacacattaaagcctgaaacagctactaaatttgatggcatactaataatgaaaagcaattatttattaagttctggcaattttagaaggtgttaatcacaatgctaaaattaaaaatcactgggagaatttatgcccttaacttctagtccactaagatgtccatgtcaattttagatgacagtaagaaannnnnnnnnnnnnngctacaattgctttttcaaagaaaaagattaagtttcctgtagtccctataatcttcacagatttatctctctttcacacttggaaagctgatggtttctttttgaccgggaattcttcttctagccaggcaatcacaccatctgtaagtccaagaatgtcccatcctttaccttatatccaatcctcatccacaaattatgccccttc

SEQ ID NO: 243652 - DNA, 1739 bp, Homo Sapiens
  misc_feature (1349)..(1452): n is a, c, g, or t
  misc_feature (1542)..(1600): n is a, c, g, or t
ttggcaggctgtcagtaaacaacaagtcttctccgtgcagaagggactcaatgacacaatgaggtacattctgatcgactggctggtggaagttgccaccatgaaggacttcacaagcctgtgcctgcacctgaccgtggagtgtgtggaccggtacctgcggaggaggctggtgccgcggtacaggctccagctgctgggcatcgcctgcatggtcatctgcacccggtttatcagtaaagagatcctgaccatccgggaggccgtatggctcacggacaacacttacaagtacgaggacctggtgagaatgatgggcgagatcgtctccgccttggaagggaagattcgagtccccactgtggtggattacaaggaggtcctgctgacgctagtccctgtggagctgagaacccagcacctgtgcagcttcctctgcgagctctccctgctgcacaccagcctgtccgcctacgccccagcccgcctggctgccgcagccctgctcctggccagactgacgcacgggcagacacagccctggaccactcagctgtgggacctcaccggattctcctatgaagacctcattccctgcgtcttgagcctccataagaagtgcttccatgatgacgcccccaaggactacaggcaagtctctctgaccgccgtgaagcagcggtttgaggacaagcgctatggagaaatcagccaggaagaggtgctgagctacagccagttgtgtgctgcattaggagtgacacaagacagccccgaccccccgactttcctcagcacaggggagatccacgccttcctcagctctccctcggggcggagaaccaaacggaagcgggagaacagcctccaggaagacagaggcagcttcgttaccacccccactgcggagctgtccagccaggaggagacgctgctgggcagcttcctcgactggagcctggactgctgctctggctatgaaggcgaccaggagagtgagggcgagaaggagggcgacggtgagtgtggggccagggtgcaccagaagggacatcacacagagggtggctctcaccgagggcctctgggcacccggccctgtgcgagcgctgtgggaggaagatgtgcacagagtgcggggtggggccagctcctgccccgccggggagtgtgtccagacatggggagagaggaggggagagcccccaaaagaccacagctgctcccaccacacagggatgagaggacttaggccacacctatccggctcctgctcattccgtgttgggaggacctcactaggatgagggaggcagagaccctgtctggagttcatggagatccttctnnnnnnnnnnnnnnnnnnnnnnnnnnnnnnnnnnnnnnnnnnnnnnnnnnnnnnnnnnnnnnnnnnnnnnnnnnnnnnnnnnnnnnnnnnnnnnnnnnnnnnnnaaaaaatttaaaaattagctgggcgtcgtggcgtgcgcctgtggtcccagctactcaggaggctgaggtgggaggatctcttgagcacannnnnnnnnnnnnnnnnnnnnnnnnnnnnnnnnnnnnnnnnnnnnnnnnnnnnnnnnnntctagaatgttgtttgaggtgtgcccacgtggtatacgtgacactcctcactgccctgctgggatcactgccctgtgcaaaccccaggcagactgcggggtccttgccagaagcccagttagtgtgagtcctgtcccaa

SEQ ID NO: 243653 - DNA, 478 bp, Homo Sapiens
ctgtctcaaaaaataacataaattaaaaacatcaaggttgtatgagtcctgtcctgccttgcaatttattctaaaaaccagggaagaatatattccaaaaataaaaaatagtatgttatgtgggcagtaggacatatacagtatcttctcagaagactataccactatccacatggaagggccattgattccttctccaacctctgctacttataagtgacctaagacacctttcacaacctgggaataactactgcatttcattcttgagcttgcacaatatgaagactggaaaagagatcctaagaatactaaggcctatatatagatatacatatggtaaactgcctttctttcaggtgctaaaaagggaaactgaataaacaacatttcacaattccaaacaaacaagttaataaaatattcagttcatcaaagtgtaacactcacattctttagccaacttttttgtacaaag

SEQ ID NO: 243654 - DNA, 831 bp, Homo Sapiens
tcaaaatcaggaacatactattgaattgcttaaacacaatccacagaaataaaaacaaaatcagatgccatccacagttatactaattatccattaaaagcttacacttaatacttgaaataacaatcaatatctagcagggaatactgaaagtgatttcagagtctcatcctgttgtactctattgggaaggtttcttgagtagttatgtgactggccaaagatgggtacaaccaagaccagaccagcaagtaaaagttctaccacagtttctgtagtttccacttgtttttctttgtcagttaaaagtgaacagtgagaattaaatacttatctttacatatacacaaggtatgctatgaaagcatatctgcttacaaacatataaaaatacttgttaactagtttgataagaaaataatgtataaaagtatatagcaaaaacattaatcatctctgaccctggaaagatcaattccatattttatattacaaacaaaaacagttttagttttttgaatcccttacccagaaatacttgaaaaggaagacagaaggaaattattcctttttacccttagcgtggctgtgaaaaagagttaaattaaaaaatcaagtacactgaaatatctaagtcctaaatgagtccaaatatttgaccacatagaatattatcatctccaagagtaggagtagtaacacagggttttataagcagtttttaatccataaatacaacaggcatttggtattttggccatcagaaaacaaaagttgtagtatcagtaaaggtctgagatggttcacttttgtagattcaattcagtccaa

SEQ ID NO: 243655 - DNA, 925 bp, Homo Sapiens
ttggcttctgtaaagcagagtgatggctgagaagtcctctctagctgcagaagcctgagcttcccggtgtcagtcagctctgcaacgtgggagccttggaggcgggtggcctggctgtgcttcatatgcccaggagtggagaaggaggctgagaagctggtttcccagctctgatctccacaggcacctcctataaccctcctctcacccaccccgctacggtctgagagatctgaaataacctttcccagtgggcagggttgccagggttgaggggacagcacataccacccccacccaacctgttcgaggggccctgcatggcacgggatgagtccctgccctgtgcagctgcctggcagtggctgggacaaggatcttgcagccagcacagaggcctcttcaaaggcctctccctcttggcactccaggcaaggcaggtgcccgcttccccaacacctccaggcagtgaccctagggcatgccccagcaggtctccgagcagccactgggacccgtctcagcacatcctggcctttgaaagtctgatatcctgagaggagggcaggttttagggccgcagttccagccagcgtccccagcctggcttccctgccatggactcagtagctcgtggggcttcttaccacccaccagccccgctggggtgcggcctggctgtgggcaaaggaggacttgcctggagatttgagagaagattccttctaccagggctgctgaggggccaggcctgcatcaggggctaggctctggctgggcccggaggctgagactaaggctttcgaccctggtgcctccatgtggatgctgcctcagacaaaggcagtgagccttccctgccaagtgcccatcccatgggctcggcctcactggtcactgttagccatgaacacgtgtgggcctc

SEQ ID NO: 243656 - DNA, 439 bp, Homo Sapiens
ttggcatattgaaatcttacgtatttgtttagatcagggcctgaaaaatcccctgatttctaattttcacttgaaaaataatcaaaaagttttcctatacttataaaaatgtgtctcctccaaaacactggaaaaaataccaaactatgaaaaccacttcacagccaccacccaaggtaaccaccataaacactgtagtaaatcccttccacacgtcatgattcactgttacataaagaatgtaggttcatcgcaggaaaattagaaaattcagatagaaaaatcatcctttctcatccacagaatcattttttgatatttcattatatgtcgtcccaaacttttacactgcttatacatagactattttatgtcaatagaaagatgtgaattccacaggcacatctttggtgggtagggggtggggggattgggaggg

SEQ ID NO: 243657 - DNA, 827 bp, Homo Sapiens
  misc_feature (90)..(140): n is a, c, g, or t
  misc_feature (254)..(323): n is a, c, g, or t
cagccatgactgagtttgatagcgtgtggccctagaccatcctgtggcctcttcaggatgagcctggttgctggaggaatcaaccacatnnnnnnnnnnnnnnnnnnnnnnnnnnnnnnnnnnnnnnnnnnnnnnnnnnntttaatcaatcttcattagtcatctaagtaatgaagcctcaatacgaactattgaacacaaggcttgagagggtccgggctgctgagcacactggtgtgctgggagtgctaccnnnnnnnnnnnnnnnnnnnnnnnnnnnnnnnnnnnnnnnnnnnnnnnnnnnnnnnnnnnnnnnnnnnnnnctgagttgtgtccataacaacagaactgtatgtcaaattaatattataggaggcctttgtttcgggcctaagctcctgcattaggccccatgagaccagactgaaaataaaagtagtcacccatgcttaagttccccttcaccaaacccaaactaagtagttatctgaccttctgagaagtcacaagaggtaacagccaatttcccaaataggccagctgaaatcttcagtagccatggaatgcagttcccttggctttaatccttacatgacatgttaactcatctgatattccatcgttctgtttccccgtccctccctctgcctgtcccccaagaaaagtatctttgaaacgactagcaggctactgttccttgttcctgctttcttcagcccttctctgtctataaagccaatcccctctgctcagcccatgggaacacttattctattttatggaatgatttgttgccagttctagaatcatgaataaagccaatccaa

SEQ ID NO: 243658 - DNA, 570 bp, Homo Sapiens
  misc_feature (167)..(176): n is a, c, g, or t
  misc_feature (240)..(249): n is a, c, g, or t
gcggaatgatgttaacagtttctttaagagagatttctatgcaactgaagaattgcacaaaatgcaaccatgtccatgtgagagcatgttctagtgcttagcactgcattgctgtcctatgcatttctggcacccttaatggaaatcttctagaacagaggttggcnnnnnnnnnntttttgtagccagatgccaactatcttaggcttacatacagtttccatcacatgtttttcttgnnnnnnnnnntttacaatcatttttagctcaacggctgtataaaactagagcaagtcatattttcccatgggacatagtttgccaccctctgttcaagggtgtatcaaacttgaggacatgaaggagaataaatatattgcttgacagaatcaggatccatacggacaccatgaggctcatggcacattagaactggaagggacctgaaaccgagagatcttccgggcaaagacctcctgtctattcactggtcaaattgcgacgacctgggattatgggctggcagaaatatgtagaaaaaaaatgcatgggcttctatttgaaatccaa

SEQ ID NO: 243659 - DNA, 714 bp, Homo Sapiens
atcaacccacaattctacatattttgaagcaaacagaagccaaactgtacaatggttcaatttgatcacaggtcaaacatcaagtttcacaccatgcctgtaatagacttggtgctgcttcctaaatgctcagcaattcattgcatggacactggagaatgggactgtgatgcagttttctcttttcctttaaagtacatcattcttaacagcaactggattacaaagaagtgatactatgcaaactggataccatgtatcaagcacaaaaaatcctatggcattcccaggaatatactgaagtcatacagacaactgagaaaatttgctcaaagattcttccaagtttatgggttcaagtagtctaagcatcacagaataataaccacagaagcaacatacaatgccttgacttttttgatcaacagttgacagttagttgcgaggaaagggtccaaaaggcatggaatacttcagagacttttattttagcatccttgtcagtttacatagcttcttacttaactaaaagctctcccacctccatatcaccttaaccaaaacaaccacaatctagccacttttagattatcagaagcaaatcgctaaggtataattaatttatgaagtgaagttcatcttgtgtagtgaatccagcctcacaattattctatcttacaaggggcattttaaatccaacttttttgtacaaag

SEQ ID NO: 243660 - DNA, 1108 bp, Homo Sapiens
ttcgggtgagggaagggttattgtggcaaaccctaagtaagctgagaaacaatggggcagtggtaatggggctttcagtaaagggtcttggaggtctcgggggccatgcagtaaagaacctgccaaccaggaacaagcttgtgttcacttagtggcattttatcagggctgccatggacactaggggtgaagatgaatgcacaaggaatccagaatctatgggaaacatcatgtatttaccaaacgcacagatgccccacctgcccgcattgagcactggaaactggtgaacagcagcttcctcccgttcaggagaggtgtgaggaactttaaccccccacctacaagccatttctcagcagaaacccaagaccatacccctactcctccctttgtcccctgatctccccacatctggactgtctcccaacctcaaagtcacaggacagcagcagtggaagaaagctcaggaccatccagtctgaccagggttttaagacaagataacaggtgcctagagaatagagccagcttggccacggtcacccagtaggggggtcggtgacaaagctggaatttgacctcacgttggaccaccaggtgaggtgtttcccagcaggctagccagctcgcagccctcctcttcttgctccacagtaggagaaccagccactcaccaatcatctgcttttgctcatgcaggggcgccgcagccagcatggacgcggtcaggggctcctgtcctgggatgtgcacagccggctcctggacccgataggtgctatgtgctgctgaggaacatttgcacggcaggagcggccggcctggtgtacagcatcctaccccactgggtcctgtggtctgagtaccaatgttggctactctctgggtatgaggcaccgtgcgtggcacctgggtggaggcctgcctgacactgctgatgtgggccggggggcgccgaggcacaactggtggccggaccattgaggcacctggagggtaggcagcttgtggtgcagacaccacagagagagaaaagttggatggagtggtgggaataatcagggtggcacactgtgcctagaagcttccagggccaccaagccaa

SEQ ID NO: 243661 - DNA, 753 bp, Homo Sapiens
tacaaaaaagttggccagactgggggcgagctgagcacctgtagtcaatcacacgcaggtaaagccacggccgagcgagctccgcggagcggggatcgcaccccggacccgtcgaaccgaatctccgagccccgaggtccccggcgtagctcggcccatcacgccgcagcctgaggggatcctggggggcctgtcatctggcgccgtgggggtcccaggggctggcttgcccagtggtggggacagcccagatcgcggcgggggatacgccttcctgaggccctttgtccccttctgcccgaggaaccgaggttggggacaaccccgaccgcggcctttcccccattggtgctcactcctgggtcttcaggggcctggggaggggtctgccggttcaggctcggcgaagaaggtccgggatccgcacctggaaggagagggccgaggggcctgattacagcccgagatacccgagaggcctctgtgtttcggggctccaggggctcacgcaggaccagtgggtttaagttctagaaaggcagcttttgacccacttggaagcacatttaccgagttcggccccgcgaccggcactgttctaggcccttcgtgagcttttcccacagctagaagctgtccagcagcgcaagaggctgcctgccaggccgggcagctagcgcctcgaccttggcgatgtccaagcagtggcctgatgacagccacctgtgtcggatgcttaggactcccaaggga

SEQ ID NO: 243662 - DNA, 1399 bp, Homo Sapiens
  misc_feature (182)..(244): n is a, c, g, or t
  misc_feature (285)..(412): n is a, c, g, or t
  misc_feature (564)..(912): n is a, c, g, or t
ttggatacagcacaagtagttctaaaagcaaagtttaaagcaataaacacctacatcaaaaagcaagagagatcccaacgtaacattatacctcacggaactggggggagggagaaactaagcccaaagttagcagaaggaaggaaacaagatgaaaacagaaataattgaaggagactagnnnnnnnnnnnnnnnnnnnnnnnnnnnnnnnnnnnnnnnnnnnnnnnnnnnnnnnnnnnnnnntctttagttacaccaagaagacacaaaatcagaaaaaaagnnnnnnnnnnnnnnnnnnnnnnnnnnnnnnnnnnnnnnnnnnnnnnnnnnnnnnnnnnnnnnnnnnnnnnnnnnnnnnnnnnnnnnnnnnnnnnnnnnnnnnnnnnnnnnnnnnnnnnnnnnnnnnnngaaatagaaaatccaacagaccaatgggtaaggagatgaaatcaataagttttccatcaaagaaaaccctagggcctgatggcttcatggctgaactctaccaaatatttaaagaactaataccaatccttctcagattctttcaaaaaggnnnnnnnnnnnnnnnnnnnnnnnnnnnnnnnnnnnnnnnnnnnnnnnnnnnnnnnnnnnnnnnnnnnnnnnnnnnnnnnnnnnnnnnnnnnnnnnnnnnnnnnnnnnnnnnnnnnnnnnnnnnnnnnnnnnnnnnnnnnnnnnnnnnnnnnnnnnnnnnnnnnnnnnnnnnnnnnnnnnnnnnnnnnnnnnnnnnnnnnnnnnnnnnnnnnnnnnnnnnnnnnnnnnnnnnnnnnnnnnnnnnnnnnnnnnnnnnnnnnnnnnnnnnnnnnnnnnnnnnnnnnnnnnnnnnnnnnnnnnnnnnnnnnnnnnnnnnnnnnnnnnnnnnnnnnnnnnnnnnnnnnnnnnnngggttatttttcagttctaaatagcaataataataatagctaactcctactgtgcactaacttcatgccaggtgtgttttaagcacttcacaggtattaactcagtactactcagatagagttccgttaattttattttcttttttaattatcagccaaatcgcttattgatttggtttcatttctgctatttttttctttgtctgtccattgactctaagccataaatttttatgcaattttaatctgattatcatttcctcttaagttttttgaggattggtttcattttgctagaagaaccttgtgagaccttcttcctccattccccttcaaagactcttgttagtttcagtcaaccaaatgtgataatgtctaaagtaaactggtcattttcaagtttctgtaacagtaagcctcttgatgattatgttaatgttaacaataggaagaaaacatcccagattcttaatagagaaatcagttt

SEQ ID NO: 243663 - DNA, 918 bp, Homo Sapiens
  misc_feature (505)..(814): n is a, c, g, or t
aaattttaaatttcattttcctttaataatcatagtccaatgtaaaaccagactctttaatgtttttacattagtactgtttgaaagttttcagttttaaaaagatgactttatgactttttcctttgattaaaccacaaggtagaaaaaggatacaaatatagaatttttaataaacataagactttttctacctttaaaaggctaaaatgaaactttctaattaacattggttattttgttgttacctctattattaactcaggattatttacacataaacatgggtgaacaactaaatcaagctgtgattaaacagccagtgtttatatattggttttcataaatctcagacaatactgaaaattatatgaatttacagaatattcttacgctatccggtaaagttttaatattctataggattacagagtattgaaaaaatttctacaaaaagttaaaattcagacacagaaaacataaaaagtccctaacatacgatacnnnnnnnnnnnnnnnnnnnnnnnnnnnnnnnnnnnnnnnnnnnnnnnnnnnnnnnnnnnnnnnnnnnnnnnnnnnnnnnnnnnnnnnnnnnnnnnnnnnnnnnnnnnnnnnnnnnnnnnnnnnnnnnnnnnnnnnnnnnnnnnnnnnnnnnnnnnnnnnnnnnnnnnnnnnnnnnnnnnnnnnnnnnnnnnnnnnnnnnnnnnnnnnnnnnnnnnnnnnnnnnnnnnnnnnnnnnnnnnnnnnnnnnnnnnnnnnnnnnnnnnnnnnnnnnnnnnnnnnnnnnnnnnnnnnnnnnnnnnnnnnnnnnnnntgattcatatgtttttaaacctatgtatctctgactataccttaacatgtttgttcttcataacactcaggatgaaataaatcagttaatgtttacccaacttt

SEQ ID NO: 243664 - DNA, 631 bp, Homo Sapiens
ttggattctcccttcgaggcccaacaaattgagaaggaactgtgatggaccacttccaaaacagagacgggggcaggggctgaagggcagagaccaggtgatgtcagaaggaaagccgggttgcagacacagccgcccctgctctggtcctccagcgtgtttatgacgctcgtgcaggtcgacgagccatcctatggactagttaacactaaggtggagttcagacttttttagacaacggcgcgactggcagcctttctctatcaagggtcagacggtaaacgttttcagctttgcagaccagaggtccctgtggctacagtagcgcagacacagccacaggcatgtcattgaatggctgcggctatgttccaataaaaacttatttacaataacaggtggtggccaaattggcccatgggccttatttggtgaaccctgttctatgagatcacctaggcttcagccttaaacagtggaagccatcccctgaatgacaagtcacaagggtatcaaagaaagacccctgaattttcatggaaaaagctattcagacccctgcttggaaagctaaggcacactgccacgaagcagcaaggacgccttacaagtctcagtgcaacagagccaa

SEQ ID NO: 243665 - DNA, 652 bp, Homo Sapiens
tcacacccagccttgtgctctcttaacctcaggggcacccgggtcacaccaagcactgtcaggtcagcatcccctaccccagtccctggagccagtgtggctgtcactgtgtctgcctggggcctggaagttgtgtcctgcctggcttgagacctccaggggtcagaggggcatgcatactgtccaagcccctgcgtggggtgggcctgaggacaccaggggaactgggcttggccttggtggttatgggtggcagagccaggtgtcgaacaccagcaggcacagctccctagcctggcccagcccttctgaggcaacagctcaacttcctgtggtctgccctccccacagctctgtgatcagcagctgcccgggcctgctctacctcaacctggagtcctgccgctgccttccccggggtctgaagcgggcctaccggggcctggaggaagtccagtggtgtctggagcagctgctcaccagcccctcacccagctaggcagccacagacctgggacacctcagccagcttgcccaccctccacctttgcccaatttcagatatttgagcattttgttaaaataaaacatttttaggagttctgtgtgtgtggtcctcagggtagggttgccaacttttttgtacaaagtt

SEQ ID NO: 243666 - DNA, 947 bp, Homo Sapiens
actttgtacaaaaaagttggcacatttccatggtgtgagatcctctttactctgggcagaagtgagccccccccttaaagggaattcgatgcccccctagaataatctcatccccccacccgacttcttttgaaatgtgaacgtccttccttgactgtctagccactccctcccagaaaaactggctctgattggaatttctggcctcctaaggctccccaccccgaaatcagcccccagccttgtttctgatgacagtgttatcccaagaccctgccccctgccagccgaccctcctggccttcctcgttgggccgctctgatttcaggcagcaggggctgctgtgatgccgtcctgctggagtgatttatactgtgaaatgagttggccagattgtggggtgcagctgggtggggcagcacacctctggggggataatgtccccactcccgaaagcctttcctcggtctcccttccgtccatcccccttcttcctcccctcaacagtgagttagactcaagggggtgacagaaccgagaagggggtgacagtcctccatccacgtggcctctctctctctcctcaggaccctcagccctggcctttttctttaaggtcccccgaccaatccccagcctaggacgccaacttctcccaccccttggcccctcacatcctctccaggaagggagtgaggggctgtgacatttttccggagaagatttcagagctgaggctttggtacccccaaacccccaatatttttggactggcagactcaaggggctggaatctcatgattccatgcccgagtccgcccatccctgaccatggttttggctctcccaccccgccgttccctgcgcttcatctcatgaggattttctttatgaggcaaattatattttttaatatccggggggtggaccacgccgcccctccatc

SEQ ID NO: 243667 - DNA, 1381 bp, Homo Sapiens
gccaacttttgtacaaaaaaggttgagggacatctgtttggggaactaaaagcaacaccactttccaattcactccatatagaactgtcctacgtcattctggaaacttgaggatgtgcggtgcataaaggggctggaagtgaccaacctgtgatgagccctttctaaggagaagggtttccaatagatcaccccaccaaaaaagggtaagaatgagcgaattgggaattttagactgtcactgcccatggacctctgggaagacatctggcgagagctaggcccactggccctacaaacggatcttgctggctcacctgtccctgtggaggttcccctgggaaggcaagatgcccaacaacagcactgctctgtcattggccaatgttacctacatcaccatggaaattttcattggactctgccccatagtgggcaacgtgctggtcatctgcgtggtcaagctgaaccccagcctgcagaccaccaccttctatttcattgtctctctagccctggctgacattgctgttggggtgctggtcatgcctttggccattgttgtcagcctgggcatcacaatccacttctacagctgcctttttatgacttgcctactgcttatctttacccacgcctccatcatgtccttgctggccatcgctgtggaccgatacttgcgggtcaagcttaccgtcagatacaagagggtcaccactcacagaagaatatggctggccctgggcctttgctggctggtgtcattcctggtgggattgacccccatgtttggctggaacatgaaactgacctcagagtaccacagaaatgtcaccttcctttcatgccaatttgtttccgtcatgagaatggactacatggtatacttcagcttcctcacctggattttcatccccctggttgtcatgtgcgccatctatcttgacatcttttacatcattcggaacaaactcagtctgaacttatctaactccaaagagacaggtgcattttatggacgggagttcaagacggctaagtccttgtttctggttcttttcttgtttgctctgtcatggctgcctttatctatcatcaactgcatcatctactttaatggtgaggtaccacagcttgtgctgtacatgggcatcctgctgtcccatgccaactccatgatgaaccctatcgtctatgcctataaaataaagaagttcaaggaaacctaccttttgatcctcaaagcctgtgtggtctgccatccctctgattctttggacacaagcattgagaagaattctgagtagttatccatcagagatgactctgtctcattgaccttcagattccccatcaacaaacacttgagggcctgtatgcc

SEQ ID NO: 243668 - DNA, 1492 bp, Homo Sapiens
ggactgcagatataaaaaatgtaaagtataaaattatgtaagtttgaaatggttttaattgtattcattaaaaatatttacatttcccagtacttacttgacaaaacccccttgcaatataattctactctaaacttttatttataaaatgaggctcacttatgacatttcaatgactgcgatactgcaaattacttacattctgtaaaatatcttacgaactttcatatcaaaggtagtttatattggattatctgaaacccaatagagcccacagatgagcttcctatagttcttttcattaatgcttggaaagcatgtgaacatgaaaagtgctgttaagtgctatcatctcccttaaattttcacttatactgtgtgcacattgtgaaataaacacatatgcagcatgtccatgttttgatatgtattttttatttccctgcagttttcacttatcaagaacaagtaacagggaaagttgtctgaactagtgcataaacaaacattctgaaacaccactacacgtatctaatttacaagaaccgtataaaaaaagtcactaaaacactacactatgaaggtgtccaacgcttacagtcagactttttccaacccgttacttgccttgtagccacaggaaaactctccaaaattgaaaagacaatcttgccacaaccctccccccgcccaacacctgggatggctcgatatctagacttccaataattattgcaatgatataatgcaatacatacctggtaaagtatcttttatgtgatgtgttacagttttaaagccagttaaaatatgcagccttcagataaaatgtaatcctcgaaaaattttcatatttgcacagtttaaatgtgctagatgcataatttttcctattccattttttctgtgtaattattttttataaattggtatcataaatagaaatatacattcaaaatatatggaaaagtgagttactacattaaatttgcatgtatcgatccatccctttcccctgcacagtaatagaaaatactattttgccttgaacttcatatttgacagtgaaatgccactaaagtatttaccaaaaagtccatctagtcaaattgtgaaacaaaatgaaccaagtgaaaactttacagttcctttagaaaaaaattacaagaatttcatttcctagctatgaatctttaactttttagacacaaagttggatttatttttacaagatacaaaatgtaaacatggcaaaataaatagttaaaacaagtgatgcaggatcccatttcatgctcatgatcccattaaagaattattttttaaaatccattcagttgcaaattcaagtgcaaaagcatgatgatgaatatctactattcaagtaacagaaataatattgatgatacaaataaactattttacaaggtagtgattttcccaattttacaaaatatacgatcatatatggatccaacttttttgtacaaag

SEQ ID NO: 243669 - DNA, 955 bp, Homo Sapiens
tcaaatgtatactcagtaaaccttgccagaaggctgaaaatctgtttcccaattgaaaaaccacagccagatatcatgtataaaggaaagtcattcatagtaatcttactctccctttactattgttttttaatagatgactgaagattactgagagaataagataaaaagaaaaagacagaaaatattgaatatgtttgaagtctttaacccttataaaataaaaatatccaatcatcttcactacaggaaggaaactaggaatatacatctttgggagtaaaagacacctccccttccttttcctaaatagtcccttctggctcaattagctgatagaggagagctatttcacccttgaaatcctaacaaggtggcatgggaagggcagcagtgctccattccttgttgggcccacccctggatcttgatcagggattaggggtgtcacagttaattcattcataacatataaagctccaaagtttctacatttttaactgagctaaaggaatttaaatttttcctaaaataatatcattttcactcccttgtactctgttatgctttctcagtagcacgagaagggattagagttacagttagtcctgagaattgaggataaccctggttctgatgataggacaacatcagacacgtgaaggccacccatcattgtcacaagggaacaacacagaacagatacctcagggaattcctggtgatttagtcacccacctttccccgctttgcctcttgggatctctgagctctaatggtggagaaaagggaaagagataagggtcagttcttccctttgagggaaagtcctgagaaagcagtgcacagccattgaaggtccgaggccattcgctctgtacaacacactgataaaaaacaaacctgtgaaaaataaagtctagttaactcaggcaaatgcttttgaaaaagccaa

SEQ ID NO: 243670 - DNA, 755 bp, Homo Sapiens
tcccagacctggaaccaaccaaccatttctctaggcatccctatttacccattgagtttttatttcaattccctttttcatatttagaagtactatttggttccttttaaatctgtttggctgttctttaaaaggtatcagttaggatataggctaagaccctgtaacaaagagatcctaaaatacatggcttaaatatgatagaaaatgatttccttctcaagtaatagtctagaaataagctgtgtagagctggtgaggcaggtcaacacatacttcaatctctgggtccaaattctgcggactcgagttttcatcaattatcagtacacaagaagaggacacaggtagggggcagtactcatgtattgctttttaaggcaaaacacaaaggtgtcacacatgacttctattcacaatccactgccaaaacctcagaggccataccaacgttcaaggaaagttagtacatgttgtttccagcttgacagccatatatctatacaacttattaacttctaaaataatagatcagtcacttagtctcaagtttctaaaatgagccttcatacaatcctaccctttattgacagatatttgaatagttttatattacatcaataaagttcaattaaaacattttccaggattttcactcagccatttgcaatggattatttacatttatcagtatcttttcctctctacaagttaccactttctcaaagtaaaagccaacttttttgtacaaagtt

SEQ ID NO: 243671 - DNA, 895 bp, Homo Sapiens
ttggcttaaagaaaacatttccagaaatcactccaatgtcttaaaaaacacacaaaataaaacctttctccactgcagtttaactgtggcaatgagttgcagacgatcaccaacactgaaacttaatttagcttttttctctcctctccaatcataaaaagtctctttttggttcttcatgcaggagctattttctttcttttctggcctctaacaggaaaacagagtttctagccgagctgctcctgaggtattaaaagtgatgttcgtgtcatgcggatcaatcctgcccaaacattagtgtgcatgcaaatcacctggcagtcttattaaatgcagaatctgattccatgaggtccatgttgtccgtggaccaaacttgcagtagtagcgaggagtctagaagacgtccatgttatagaaattgaacccaggaaaggatttggggcttatgaagctaacaaaagcacgtaaaacccagcctgagaaacagtagctacacccagctcttgttgctattctggaaccaaataatgcaaaatatgctcgagacacatctcagttcttgcttgcttgactttctgagtgtctctctggcacaagggcctgtcatttgaattcccatcccccacctcatccccatgtattattccactggatatcccaaatatctagagtttcaaaacccaaatgatcccatttggccagagccttttttatgagtatgctaatgttatctgtgtatgaagcacacaaactttttcaggatacccggctatctattaatccttcagcacggacgttctccatggtaacagtctgacctataagatctaatgcctttcccagggggctcagaatcccatgagtttgggttaaatctgccataacatct

SEQ ID NO: 243672 - DNA, 519 bp, Homo Sapiens
attcaaaaaatatcttttaagaacaggtaaaactaatctacggtgacagaagtcataataatgaatactttgcacggatttgtgacaaggagggagcatgaggaataagaaaggctgctgggggtgctggcaatgtgctatttcttgatcattacactcagaggtcatctcatagatatattcactttgcaatgttttactgagctgtttatcatttatatacttttccgtacataatgaaataactgtgtgtaagtgtatgtatgtggtatcacagaaagatatttggtctttgtccccattcttggcacagagctcctaattccctaagaattttctgagtactgagggtgacgggagtgtcttttgtttcaatgagatgactcttggtgggcctctagatagcttcaggatgagggctagttgccggaaaggccaagccttaataagaaactttgaattttcagtcccacccctgaacctccagggtggggaaaacagttggagcctgaatcccaa

SEQ ID NO: 243673 - DNA, 875 bp, Homo Sapiens
ttggctgccgcattgctcccgccgggctgtagctgagcgcggagcccgtgggggccggtgagtttgagttcctgagatctagttggtgagagacatgatgttctaccggttgctgtcgattgttggaagacaaagagccagcccaggatggcagaactggtcctctgcaagaaacagcgcatcagctgccgaggcgcgttccatggccctgcccacccaggcacaggtggtcgtctgtggaggtggaatcacgggcacttctgtggcccatcaccaatccaaaatggggtggaaggatattgtccttttggagcagggcaggctggctgctggctctaccaggttctgtgctggcatcctgagcactgccaggcacttgaccattgagcagaagatggcagactactcaaacaaactctaccatcagttagagcaagaaacagggatccgaacaggttacacaaggacaggctcaatctttctggcccaaactcaggaccgactgatctccctgaagcgcatcaacgcagggctgaatgttataggtatcccttctgagatcatctcccccaagaaagtggccgagcttcaccatctcctcaacgtgcacgacctggtgggggccatgcatgttcctgaggatgcagtggtgtcttccgctgacgtggctcttgccctggcagtgctgcctcccaaaatggtgttcagatctatgaccggacatctgttcttcaagtaatgggcaaaaaaggtcaagttactggagtggagaccgataaaggacagattgaatgccagtattttgtcaactgtgctgggccagtgggcatacgagctggggtctgtccaacgaggagccggttagtatcccgcta

SEQ ID NO: 243674 - DNA, 922 bp, Homo Sapiens
  misc_feature (407)..(417): n is a, c, g, or t
tccctattcagttaacttaaaccaagaatatgtttatggttccctccttttgtataatctggaattggtaaatttggtgatcacccaatattgtttttcccttgatatatcatgagaccttactgccttgaaacatctaaagggtaaatctggaaaaactactatgctggccagatggagtttatctatgggaaaatgaggcttacgtaagacagacaaaatccttgactctttcccaaaaccatgccagaaaaaagctataaatccacactaaggaccacaaagggagcagctttctcagacgcttataaaaagcccctgtgaggacacccttggcaatttggaagtacagaccctgatccttcccctccatcattttggggaaataactaaccaatgacaaaagnnnnnnnnnnntcctggcctgcaaaaccacaggttgaaaggaggttaaaggtgtagatctgaagagtttccctgtgggattattagaaaataaaatgctcccagggaaaaacactgtcagccaatgttcagccagctcagcacttagattatctttggtgtgcaagtaaacagacttgaaattgcttttgaaatctctccaagactgtccatcccactcagtcttttatgtcaccatctagtgagttaagttgtgaaaaactccaattttccttaaatatagttatacaaggctaaaatgcaaggcattttccatgatcacacttcaccttgccacttatgatacatgttgggcagtaaccctttcctgatgcgatctaccaaacagaaccaaaactttatggggaaaatacccatcttagaagacttaaaaaggaaagaccttaagaattaaaacattgccttatgagggaaacaagttgaactttacaaagaaaaaaatgccaacttttttgta

SEQ ID NO: 243675 - DNA, 930 bp, Homo Sapiens
tcctatctgtatgaggagccaaaatcttggtgaccaagggcctgtccttttatacttcatgtgattcctttttgaaggccatcagaaccaaagcaagccctccaaagaaggacccccagatctctgggaacggggtacctcaaacttggaacaattcgggtggccaggggtaaggatgctcagagtctggttttggtcctcacccatgggaaaagcaagcccagggacttcagtctgtacgttttgtaccaactcactggatctggacagtgggcaggctctcagggattaggaagccaggtgtgcaggcttaccaaggacatgggtctcccaatagaaagatgcctcgtgctgtccttgaacatgtcttcggtcctgggcattgtgaccccaaagtgttttgtccaagtgaggcctttagttgcaaattctcatcctccttgtgctgccagttagatgtgcctctgggtccctccccagggctcattacaggtcctggcccaaagcagttcatacaaatctgctcagctcagagactgggcttcccagctctataaagtacagttagcccctccctccatgcttgccaagagacccagcaggtggcagcagaaagagcagaggatttgaagaatcacttccaagctgtgtgaccttttagcaagtctcaagcctcctgagccttagttttttcatctataaaatggaggactttggcaaccaatgtcaaagtactttgcataccaaaaacgctctggacaggtgtgtgtgtctctgctaaatattcaggaaagaggatatacattttagggtcattgccaggtaagaaagaacagcaactgtcctatctcatgaggaagaaattaaatatgcattttttttcaaaacatggcaaaccattatgtttcaggctttcactatttgcaccaa

SEQ ID NO: 243676 - DNA, 429 bp, Homo Sapiens
cttaaatgtcttcagtattaataaacaaaggtgagaaggtaaatgagcttaaaattcatcttaaaatatttggaaaagaaccacaaataaaactaaaaagaactaggaaaggctttgataacataaaagctggaattaatgaaatagccaaaaattgttctttgagaaataaaacagataatcatcttgcaagtctaattaagaaaaaaataataaatatttacaagacttgaaatgaaaaaacagacataaccacagatgagacaattttaaataattatataagaaagtacattaaactctgtaacaacacatttgaaaacctagagaaaaaggatgattttttagaaagccaaattaaccccacaagaataaaaattgaataggtcaattatcaaataaaagaattaaatcgccaacttttttgta

SEQ ID NO: 243677 - DNA, 836 bp, Homo Sapiens
gaagtgggtgggaacaaaagagcaagaactgagcttgcatctgcagaaaatgtcccaaagacaactggcagagttcactccatggggaaaaggcatgttagtgtgtaggtagagaaactggacaaggaaggatggccttagccttccataatggagaagtcgggcaggggatgtctgcatgcaatagacaactgaattagaaagagcagaaatgtaaaccagcagtgcttccctatcttgggcctggctagcttaaaggggctctactgtcattggtcaaaaaactttcatgaggagatccaatcactaatgcaacaaactctaatgagttctaagttggagagagctcagttctaaagcttgggggtagacaggtcactgagagaggaggaatgaaggagtgggatctgaacattgtaataagtcatctagtagctctgatcactttggacattgctgggggatacataacagctcactataacattacaacacatacttatatctgtttgctcctccaaactaacatgacaatgtgtttctgccatcttagcttacagagacatgatctagttcagcttatactcagattttacaaaagagactttgaccacatagatattcataaaattaatgtggttaagaaaaaagtgcaggggcttgaagtcagaagagctccgttcccattttggctatgctgctgttcaggtttgtgacctgcagagcagtttagcatctctgggtctcaatttgttcatctgtagagcgtgggtgatcaacctttatgtaatccttctgtgttggagggggtctcaagccaacttttttgtacaaag

SEQ ID NO: 243678 - DNA, 914 bp, Homo Sapiens
tcaaagtaaaaaggatgctggagttcatctggtggaatgaggaacagcctttaatggggagccaggatccttttctgtgggagtacagtgggccccatgtgaggaggatggtcccaggatggtggggggaaggtgagaccacagcaacagctgaacgtgggtcaatcttttccttctgagtttaaagtctataaaaagttaataaaacaatctaaagccaatcactccacctgtcctcaggatcctgccatgcctatactccgccatctctcttgctctttctaaacaggttcaggtcctctctctttttaaaaacgtacgggatccacctatcatctcctctagagccctgccttcctccagctgctgctctgctgcctgcctccttgacagtcaaactggagccatgtttctgttcctccttcttcacctctcaggctccctcaattctcgccaatatggcttctgccccatgccccacaaaactgttcttgcagagatgactaatggcctccctatagagaagctgcaggacacacacccaggcctcatctcacttgaaatctcagctgcattgaacaaaatggacgactccctttgcccctgaaactaaggcccacagttcccctcctcctctccggccacttgtagttctatgccggcaacactttttttgctttgcctccacagattccagtttcttgaggccctcttctcttctgtcactgtaatttctttctaagcaaaacaatctgccccaatagcttcaattatcatctgtaaactgatgaaattccaaatttagtcctccagcccacacctttgccaaacctgtgtatctacctgcttatcccacttgagaaaagataaagaaaagaaaaagactaggaaatggagccaacttttttgtacaa

SEQ ID NO: 243679 - DNA, 778 bp, Homo Sapiens
gttccaggagaatattttagttgaaacaaggaggaaaaggaagagaaacacagcaagggagtgaaattaaggaagccatcaaactagaccataaaggaaattgaaaaggtgaggctgagagataatggctgagttctgtatgttaaagagagatgccatcttctagaagggtcactgcagggaagagaaagaagtgtaagtttctggcacatgatacatgttatcaggtgctggagtttagcaagaattaactatagcggcataggctgtggttaagagacaggaggtgcctggtttgaatcccagcttcgccactcattagatgagttgaccttagggaagttatttaacctctctttgcctcaatttcctcatcatctgtacaagtaccttttcgtcaccagggattaaatgagttagcatatgtgaaacgcttataagagtacgtgacacctatgtatagcataatgtgccacagggacacaaagtgccagggattttgttttggggtagaggtcagagaaaactacagggagatgatatctgaactagatgtggaaagatgaagaggtcatgaaatggacaagggtgaaacaacaattcaagcagagaaagaaaacaaattactgcctcagcggggttggggaatggactgggtctgacttctaaccactatggtatattgcttcctatcatcatgaatattaatacctattcgacacctactacactgcaatactgcaagcatgttctctgtttcccataacaactctctaag

SEQ ID NO: 243680 - DNA, 930 bp, Homo Sapiens
gaaatgaaggcagagtgatctgatactttggctggctttcagaaaaatcatctagcataggaatagaaaaactagaaatgaagggagccagggctacactccccaagagtgataaattgagaaataagttttaagcctgggagtgcattttgaagcaaattggcaagagatatgggccataagcacatttctcaaggtctgtgtcattccttggtggaattttcggaggcagacctagcctggaatggtcttctcctttcctgacctcctgtgtctcccattaacttctttagtttgttattggtttattgtcctgtgctattaactgtatcctcaatgtttatgttttatctttacagcttgattgagagctatttaagggtgattccttcttgggctttcttatgtctcccttttatcaggttctgggagcctcttcccctctttccaacatctctctctctttacagcaggccttgggaaactccctgtcctccaaaagcctctttcccaccattctgcttgaggtttctggctccagtcttgtaactctctgatttctttctgccttttctgcttttgcagagaaattttggttcaatcccttgcttccttctggtttgcagctttgccttcaatgaaatcctttggattccttgtgcttaaaactctggttgcaggccagtcattcctctctctcatttctccatccagtctgactctaggcttttccccaggttcttggccatgggccctggcttgtcttggaggagagtttgcccaaagtgaagcactgagtaaatatttgatacctgatgacacatgctttccatgattctttctcccattaaaagagctgttgttattagttttttaatccgaggaattttatctttatcttgaaaatatatccaacttttttgtacaaag

SEQ ID NO: 243681 - DNA, 804 bp, Homo Sapiens
  misc_feature (456)..(495): n is a, c, g, or t
  misc_feature (724)..(741): n is a, c, g, or t
aaattgatgagcaatgcttttccccatttatagagcgactttgtacaaaaaagttggcttcatctagcagggaccagaaaagcaagtcattcaaggcggtggcttggtgtcttaattagatactaccttggtgcttgctttctcttcgtttgcactgacggtatctaaatgacagtgttctgggatttctggatcagacacaaaatgtcttctgctcaaatcttccatgaaatgtaattttaaaaccatgagcttggttcttactcaagcagaactcttagcgtatttactgggacttcagctgaattggaatggaattgtgagatcacattcctttggaaatataaacagtttgtttttacgtataaggaagccacataaaagtatctagaattttagctcagtagactggttggtgatttggtgatgaacattattcttttcaatattatggcnnnnnnnnnnnnnnnnnnnnnnnnnnnnnnnnnnnnnnnnggtagggaaataagttctcttctagaccatctttcatctaggaagctcagttcattgtaaagccaattaggagtaacaataaactgctagaacattttaccaatattgttaaactaatggcaaaggaaagggaagctacatgcaagattgtggttagtgtgttgataattttgtgtttgttgtgatctggagcataagtaagggtttctttacagattttactgtgaannnnnnnnnnnnnnnnnnacggagcagagagtttattaggcaagaaaaaaagggggaaaaagaaagataagctcccctgta

SEQ ID NO: 243682 - DNA, 147 bp, Homo Sapiens
caatcacggagtactgtcaactcaacctgctgggctcaagtgatcctctcacctcactctcactctccgtagctaggactacaggctcactccaccacacctggataattaaaaaaattttgggggaccaggcacggtggctcacac

SEQ ID NO: 243683 - DNA, 1160 bp, Homo Sapiens
tggcttgtttctgttgttcccttgaatttttttcgctatgggaggcagccgaggcctggccaatgcggcccactttcctgagctgtcgctgcctccatggcagcagccaaggacccccagaacaagaagacccccccgcaggatccctcctgagctcggggggctctgccttctcaggccccgggcttcccttctccccagccagaggtggagccaagtggtccagcgtcactccagtgctcaactgtggctggaggagctggcctgtggaacagccctgagtgtcccaagccgggagccaacgaagccagacacggcttcactgaccagcggctgctcaagccgcaagctctcagcaagtgcccagtggagcctgccgcccccacctgggcaccgggaccccctcaccatccagtgggcccggagaaacctgatgaacagtttggggactcaggaccagatgtccgtctctcttgcttgaggaatgaagacctttattcacccctgccccgttgcttcccgctgcacatggacagacttcacagcgtctgctcataggacctgcatccttcctggggacgaattccactcgtccaagggacagcccacggtctggaggccgaggaccaccagcaggcaggtggactgactgtgttgggcaagacctcttccctctgggcctgttctcttggctgcaaataaggacagcagctggtgccccacctgcctggtgcattgctgtgtgaatccaggaggcagtggacatcgtaggcagccacggccccgggtccaggagaagtgctccctggaggcacgcaccactgcttcccactggggccggcggggcccacgcacgacgtcagcctcttaccttcccgcctcggctaggggtcctcgggatgccgttctgttccaacctcctgctctgggaggtggacatgcctcaaggatacagggagccggcggcctctcgaacggcacgcacttgcctgttggctgctgcggctgtgggcgagcatgggggctgccagcgtctgttgtggaaaatagctgctaatgaaatggctgggggccgctggggtccgtcttacacactggcgcaggtctcttctggggcgtctgaactgggagtgggagctcctccgcagaagttgtggggg

SEQ ID NO: 243684 - DNA, 943 bp, Homo Sapiens
ccatgaggattatgtaaagtaacatatgtaaacgtatctagccccaaaagcgtgttctcttccgtgtcatattcttgatcttcccctttttgctgttttggttaataatcaagaattctttcccctctgcttcatttcatttattctttaatcaccaagaaaggatattaaaactagaaaatctgagtggcttcaatgagtctattgtagaataaataccgtttgtgttgttctatgtcctgtaggagtaaacaatattagaagggcaaattaaaaaaaatatatgaataaagacaattgagctctagtttcccctgcctctgcctttaatccttatgagatgtatacatttgagaaggttacatattttattgagcgggagaaatctgttttctaatatattaaaataaacaggttaaataggtgatcttgaaggcttattacacttctaaattttgtattatcattaaatacatctcaacatcagtggctttctattttcctcttctctacaatttccaacttcttgcctattaacgttgtcttcaatttggttagcttggttaatacaattctgatatgaatgaatgaaaccacattctgatcttgcacaagccatagtgtgtttgctccattccagaagttaccaataacatatcctttaatgaccctgggagagaccataaaatatgattggatcagcaaaaaaaattcccaattttggaaaaaatacttagagtgcacattctgctaatattatctttacttatgtagaacaattgcgtactcatcataaataatagacaaattttacatcgtcgtactctgtatgttttgaatataagtaagtagtttcctttatgaatataatgacaaaatacctaggatatactgtatatacatatgcatatataatagttaaatatattttatatgaggccaa

SEQ ID NO: 243685 - DNA, 175 bp, Homo Sapiens
taaaatagcccaatccacgaaataaagattagcaaatgatttatacttattttaccttttcatctcacactcaagaatgtgtaatttttgcccagcacaataatccagaggttataaatataccttgactcaatatattactgtcccaatactcttccttcctaatcggaagcaa

SEQ ID NO: 243686 - DNA, 1100 bp, Homo Sapiens
gtactttagttaattgtgagggtaaacgtcaatagtgctgagaattcacataacttttgaatttactagtataaaggtaaaatatttggttgcaatttttcatgttacaaaaataatcttaataatatgcaatttataatttcaacaagtaaaataactgtttttaaaggcatatcctgccaacaaatttcacatgagaaagtattatcaagtaataaggaaaaaacaaatatctgaattcttttcaggcagtaaaatgtttcaagaggaaacagaaaaagcgatttccatttaaaataatctaagaaaaaagtaacagttatcaaagaacactggttctggtggctgtacaagttggtaactttaatgacaactgttttgtattccttctcgtgaagacagaatggcttcactgaaactgagaaaaaggtggcataagcatgaagaaaaagaaatcacaaaaagcaggtagaagattcattagcatcagttttttaaaaatatggagggaggaaaggattcctaacctgtgtacctacagtatcctgtggcgtaacctaactatgaattaaattagattatgtcaaatcatcatttaataacaagctaattttcacattactgagcaatgttaagaaatggttaagaaagtgaggtgcacatctggtagtgattctggctttttagacctttctcagtgaaaaggacggatatattatcttccctcaaatcgccatgctctctcatacagcacacaaccaatccctaacggtaatcagaagttacaaattagattttacatacaagttgtactgaaatgtttggaaaaacattattacttaattctaaagtgtcacgtcaaatgtgattacacatttaaaaatgagaagaggaatctcagcaaagctatcattattgtgttaacaaagcactaccttgatcccccctaagagtaagagaagaatttcagttccataaccattaacgaagaaagctggaaaatgatggcagaaattgtaaagggcaacatcgtgcacacatcctgcatcattgctaatctaaaaagcctcaattacctgatgtagtaactgtcttgccaa

SEQ ID NO: 243687 - DNA, 1061 bp, Homo Sapiens
ttggcacaggcaggactagaactagtttccttaatgttgtctctttgataagcttaagagatatttgtaaattttttactactttcattagaaacccatacggtttctaaaaattcagttaaatttttattgagttactgctatgtgcaaagcactatacttaccactgagcgtgtaaagttgaaactgactcattagtatgcgtgcaccacagagacactttgttcagctaatcataagcactcaatgaaaatatgattattgaagaaaaactgtttcttacccttaagggtttcaaaatctcaataatttatattcaataaattaaatcgataagaattttatttcaaaatgtcttcgctttacaaccctcatgatgttattaaagagaaaacttcataagcagagagaaatctgtaactagaattgtggcaaaaaacaataaagttgagaattttttctgtgtacttacaataaatgtttaccagaaatactaatttgtgtatttacgtaagctgttcatatctaaatgggacatgtcaaagatttattaatgcacaaattcatggataatgtagcccagtggcttttaaccttttggagaatctaatgtacatttgcaaattttacatacagtgttaagatgcttatgcttttttctcccccaccaagctcatttatgaacttctaattagatgtatctacatctggagttattgggggtattttgaaagagcctttcaagtggctcttgtccatggtgggctactgctacgataagaacttattatttcttgctggtatgttgaaaatcacagataacttttattcattatttacatagtgtgccttttttaaaatttctaaactttgccagactggtaatcttctctcgggtatttgtgttctgagtccaaaataatattacctgcctattccagataaagtagtcctattttaataaatatcaagggatggtagaaagtatattaaactctattgcaaaagatccgaattccagaattactattaatagttttatatttaaaataatatgtacc

SEQ ID NO: 243688 - DNA, 360 bp, Homo Sapiens
attatgtccatgtccttgtgtagtttaggggaatcatttactatcatgtaataaatccctgcttctccttaccggtgggtctgaaaacagtcttgcccaaatgtgaagcaactcagtgcggatcaatacatgatattcacctgaggtacagccgggagtcccatgcccattgacgttttctttgtctgtggactctgagtacatgtgggcatctgtcctgtctgacagttacccaggactctcattatcaatcttaatcctctgggaggttgatgatccagcccactggacaactacagctcataggccaatccagcctatgacttgacctttgtaataaagttttattaaaacatggtc

SEQ ID NO: 243689 - DNA, 534 bp, Homo Sapiens
  misc_feature (57)..(77): n is a, c, g, or t
tgtttgcatttatatattattgtactgactaggtcttactcctgccattttaattgnnnnnnnnnnnnnnnnnnnnnctgtcttcctttagtaaagttgattttatctggtgatatgattcactttcttgctttacattatttgtgtattcactgtatgttttttggtttgtggttaccacgaaggtttcaaatactatcatataaaccactgtttttagctgataacaacgtaacactctttgcataaacaaacatacaagcaaaaacaaaattaataaaaattgtataccttaactttgtccccttacttttaactttttattgtttctatttacaaattattgtactatgtcttgaaaatttgttgcagttattattttttattgctgagtcatttaatcttcctacttaggataagagcagtttacacaccacagctacagtgttataatattccatgtttatctgcatacttactattaccagtgagttttgtaccttcaggtgatcatttattactcattaatatcct

SEQ ID NO: 243690 - DNA, 961 bp, Homo Sapiens
ttggacttctcctgcttcacttgatttccctgagtcccagaaaagttcccgtggtggttctcctgatctctggaagtcttccttttttattgagcctcagaaacctgtcttccctgagacccgaaaaccaggtccttctgggccatctgagtcccccaaagcagcctcagatatctggaagcctgttctctctatcgatactgagcctagaaaacctgccctgtttcccgagcctgccaaaacagcccctcctgcttctccagaagcacgcaaacgtgccctttttccagagtcccggaagcatgcccttttccctgaactccccaaatctgctctattctcagaatcacagaaggctgttgagcttggtgatgaactacaaatagattccatagatgatcaaaaatgtgatattttggttcaggaagaacttctagcttcacctaagaaactcttagaagatactttatttccttcctcaaagaagctcaagaaagacaaccaagagagctcagacgctgagcttagtagtagtgagtacataaaaacagatttggatgcgatggatattaagggccaggaatcaagcagtgatcaagagcaggttgatgtggaatccattgattttagcaaagagaacaaaatggacatgactagtccagagcagtctagaaatgtgctacagtttactgaagaaaaagaagcttttatctctgaagaggagattgcaaaatacatgaagcgtggaaaaggaaagtattattgcaaatttgttgctgtcgtgctatgaaaaaaggtgctgttttgcatcatttggttaataagcataatgttcatagcccttacaaatgcacaatctgtggaaaggcttttcttttggaatctctccttaaaatcatgtagcagcccatgggcaaagtttacttaaatgtccacggttgttattttgaatcaaatttcc

SEQ ID NO: 243691 - DNA, 895 bp, Homo Sapiens
ccagcagggaggccgggatattcagcattcttctgagtaattattctctattactattcacttcccattctcattctcaataatgttccagacttcacccctctctataccctcaagtttttaaatttttacacacatacacacacatcccccacagcttttatctcttttccaaagcttatagtcccttttatgtattagttcaaattatacaaaactgccatttttttgttttaacaatttccaaagtccatgaacaaaactgccatttttgtagactaaggacttcaacaattaggacagagatagccagatattttctttaaagggccagacagtaaatatcttaggctgtatgggccatattgtctctgctgcaactaatcagctttgctgttgtaactcaagagcagccataagtaacacgtaagtgaatgggtacagctatattacacgaaactttataaaaggcgaattttgaattttatataattttctcacatcacaaaatattttgcttccattttaaaatgtaaaaatcattcttagctcataggccatacaaaaacagccataggctacaggttgtcaatccctgagtttgaagataactaaagcacacatacaacactggttaataaagagacctgtacagtggctacaggaaaataacgtttagcttttaagtaattaccatatctatggctttacagcttgtagataaaaagtatgaaatccatttttaccaaattcttagatacacaatttgattttgtcatattggttaacgtaagagtcattacttctacaaacagatggacaaatacgtgccaatggaatacttctgcctagaattttttttatgacctttgatcactgaaaaataactagccaa

SEQ ID NO: 243692 - DNA, 410 bp, Homo Sapiens
agctaaggcattagaggaaatacccttaggaaatacttctgattgacagtgccttttaaaaaaacctgcaaaggaacctcaatcctttctaataaaaaatgaccaccaggtttgcttgctctccacatgaacagtgcccttttgctgcctgttctgtctagacctttctggtagctctctatcgcatcgtcaacctaattaatcttgccattaagaaaaggtacttatcctgtgttttatttgtataggactgttatttcctctgagatgagaaagatcatatataaatctaggccaaatgttggcaaacattttctataaagaactagatagtaactattttagattttgtggtccgaaaattttctctgccacaactactcaactgtgctcttgccaacttttttgta

SEQ ID NO: 243693 - DNA, 918 bp, Homo Sapiens
aaaaatattgtgactgatgggcagcatttttcattgtgagaaataaatatttcataataaacttgacagagaaaaatatatttggtatagaataatttttcacagttccagactgatataaataatatgtaaaaccaccaagaaacaagtgattggtcttcatattttcatgaaaacaatatgcagcttaaacttgtcattttatgaatattttgcaaaacagtactgcttcacagttctgtgggggaagtgagaaaaagctcaagatgtagggtttaaaatttagcaaacattcttcaatcaaacaaaagaaatgctttcaaggaagaatatcaagtaataaattacaatcattccaagtacttattgtttttattatttataatagcacaagtatcagcttttagcaacagagcaacctctcagtgatatcgtaagccaattaaaaagcctccttcaatttccaactaaaatgtaaatacagaaaatagcaacattaatagaccctgtctagtctctgaactttaaacttcccagaacaaaccatgagatcattctaataattttagaaatgacatgtcagaagcctaactcaaatcccatttgttgttctgtccactaagttagtgggctatcagggatgataaccaatacaataaagtaatgattgccaacacaataaagtaatagttctttgagagagtcgctttttactcagcactcagtctccttagctatgcacatggataacttctggtaatgtagaatggacactatattgagccaagaggcttgcttggtaaatgattccttttgcaacttaagcaaataacttcattattttattttgtaatgttcccatctttaaattgagggtacgagactaggtctattaaagcaaacagattccttccccaa

SEQ ID NO: 243694 - DNA, 890 bp, Homo Sapiens
ttcatgtcacatttatacatgtatatcagacatctcaaattaacatggccaataaaatggccaatatccatcatcaaacctgctctcccgaagtcatctccatctcagttagtagcaatccattcttccaaattataaaacccaaatctgtggttttatctttgaatcatttctcttacatcctgaattcaatttttcagcaaatcctaccggctttgtcttcaaaatatatccagaatctgaaaacttttcacatttattgctggcaggctagtctgtgtctctgttatcccttgcctgggattattcctataacctcccatttagatcccttgctttgctccttataccttatgatattttcttactctacagaactcagaataatcctttcagatatacgattctctttgcctcaatctctttaatgattttccatgtcattcaaagtaatattcaaaaatcctgccatggtctagaaggttctacattatctatctacaaactctgcccccaacagttcttctctgtcctgtgactctaatcattgctgggttccagacatgacagagtataaggaaggagaggagaaataaatagatcagaatcacagttaaagtgtttagattctgtgaggttttcccctcaagaaaaggatttgcctggctcatttgttttgacggggtaagcttggttgtgaagaaagcaacacagcttccagccacagcaaccattcacactttgcctcctaccaggacaaagactggttgctttcatcttttgcattgcagaatgctaatgccataactaacacatagtaagaaaatttaaaaatgttcattaagtgttacattgctagagaacacatagttcttttaatattatcccaa

SEQ ID NO: 243695 - DNA, 304 bp, Homo Sapiens
tgtacaaataatctgtgctctcacactcaacagtctactgttgcatattggcatttgcttccagtgtttccaacatttttttcacattgttctttttatattattatggttgaagttttccgtgtttttccgggttactgcatagtacaaggttcgcgtgtatgccactccattgctgtcctcttccataatacagcttagttcacctcatcccttctctagtttggcatctagttgactctccattttttaaagaagccgctcttctgtttgcaccagcaagatccaagtggattttccaaac

SEQ ID NO: 243696 - DNA, 907 bp, Homo Sapiens
ttgggactcttcccattttgcaaatgagaaaagagaaacttaggagaggttatgtaacatcaactttgtgggctgaggctgagtgaagacctcgcagaagagaccagacccagcatgctccagtagctccactgcagggggtggctgcttacgaggacagagagcagaattcagacgactccagctgacctacttggtgcaagtcaagtgaatactagtcgggagggattagatgactcagcctctgccttcgttggagtcaggaagtaggctttgcagtccatttcctggggaattttcagatggaccagtgatttcattttcctcttctaaagcacccccatgcacagggaaaggttgttcacgtggccatttggatgaagccaacggatctgatgtcttaaaggagaagctgaaacagcagtggaaactttctaggcctgttggtattagtaatttcattcctggccaaacatgaatgagaaatccttctagtccactttgactgaggctagagtgtggattaacagtgctttgatatttcagtattgctgcccaggttgtgaaggtataagcctcatgcaggtcacctgctcttgcctccattgtacctattgcctaactgggataggcctggggtggggctgctgagagctgacaatgccaggccaggaaaggcaagctaaagaccagcagcaggcctcggggttggaaagctacacagtaaacgggtggagtaccaaagcttagttgtgtgtctagagaattcagggcgtgggtgagtgatcagctcctggaagagcaaagattagtatttaatacatatgcatttattagcgtggctgggtctctcgtcaaaatgtcataattttcacagatcaaggattttaaagcaatagaattattg

SEQ ID NO: 243697 - DNA, 828 bp, Homo Sapiens
  misc_feature (637)..(637): n is a, c, g, or t
  misc_feature (723)..(723): n is a, c, g, or t
  misc_feature (743)..(743): n is a, c, g, or t
  misc_feature (767)..(767): n is a, c, g, or t
  misc_feature (781)..(781): n is a, c, g, or t
  misc_feature (797)..(797): n is a, c, g, or t
agattctgttggtcacgtctcctagagtttgagcggtgctgaactgtcagcaccatctgtccggtcccagcatgccttctgagaccccccaggcagaagtggggcccacaggctgcccccaccgctcagggccacactcggcgaaggggagcctggagaaggggtccccagaggataaggaagccaaggagcccctgtggatccggcccgatgctccgagcaggtgcacctggcagctgggccggcctgcctccgagtccccacatcaccacactgccccggcaaaatctccaaaaatcttgccagatattctgaagaaaatcggggacacccctatggtcagaatcaacaagattgggaagaagttcggcctgaagtgtgagctcttggccaagtgtgagttcttcaacgcgggcgggagcgtgaaggaccgcgtcagcctgcggatgattgaggatgctgagcgcgacgggacgctgaagcccggggacacgattatcgagccgacatccgggaacaccgggatcgggctggccctggctgcggcagtgaggggctatcgctgcatcatcgtgatgccagagaagatgagctccgagaaggtggacgtgctgcgggcactgggggctgagattgngaggacgcccaccaatgccaggttcgactccccggagtcacacgtgggggtggcctggcggctgaagaacgaaatccccaattctnacatcctagaccagtaccgnaacgccagcaaccccctgccttantacgacaccaccgntgatgagatcctgcancagtgtgatgggaagctggacatgctggtgg

SEQ ID NO: 243698 - DNA, 846 bp, Homo Sapiens
gacattggcaggcagttattgtagggtatatggttaatcacgattgtctaacttttccagagaaagtggtgatatgcttcttccttgcatggagctgtgggaattggatttgttggctcttcatttccagtgtttctacagtgcagaataaatgtaactttttaagcctgcatgctagtaatatgctttgctctttagtaaacaaatatgcaatagatagtaatctatctactttttttaaagcagggatctgctccctatctagacagatcttttaatgcattaatatttagagtagcaaaagaagttttgccatttgtagctctctcacaggtggcttaagcgagggggttgtgttgcatgtgcttagaaaggccaggttcccagaattggaaggtgccacatatacttttagaatattttaacaaaggcttgtctctaggaaaatccacttggactgcagcaggattgttctggtcttccacagaccattcacatggtctttctctccagagaatcattcttagaaagccaggctaaatcagagtagtgctgtttttaaagcaagtatattggatgatggctatagggtaccttaatgctgtgttgaaattggaagcagactgctcttcagcagcacatatactgcaactgaagttagagacagtactgaagacgaagggagtagctaaatgctgtggatatttcatgtctggttggctaatgtcttctcttgaggagtttctatgggtagcaattaaaattagaatttattttaaggtttttattaaaatatatacaatttgccataaattctagattctgatattcttgacaagcactttt

SEQ ID NO: 243699 - DNA, 473 bp, Homo Sapiens
  misc_feature (145)..(163): n is a, c, g, or t
cgggccgggggcgccgaggcggcggctacaatgcctacggaggcggcggcggcggttcgtcctacggtgggagcgactacggtaacggcttcggcggcttcggcagctacagccagcatcagtcctcctatgggcccatgaagannnnnnnnnnnnnnnnnnntggaggcagtagctggggcggtcgcagtaatagtggaccttacagaggcggctatggcggtgggggtggctatggaggcagctccttctaaaagaaaatttaaaatgcctgggagtggctataggggtagctctttccaacagcccaagtggggtcaactcctaagccccaccccctcacacacaccgccttccctgttttgcccttgggggagccacttctaaggctgcttacccttgggggtgttcctctatttgcctgccacctctcttgtctctccctctggagatggcctcggcgcccccggccg

SEQ ID NO: 243700 - DNA, 1090 bp, Homo Sapiens
  misc_feature (1059)..(1059): n is a, c, g, or t
cccctccccagactgcctgctgtcaaaccacggagcagctggagcctgccctgtccacggcccgtttccacccgggcatgttcgtctctcatgacttcggcagaggcccctggtggccttcagtttcagtttctcatccaggaaggtaaccttgggcattggcagtgggtttccctatggcttggatccccagattagaattgatctttgttttcactttccatagttaataacatgcaagataatgagaagaatttattttaaggtgacagctatactggtccaacatcgcctgcttattgtcagggtacagaagtttaatactttcttgatccagtttttcaaacttctccctgtagaccgtaaggatgaattccacaataggatcctttttaaaatcgattttaaattgttgcctagtgcctgcgcaaggttattatgtgcatctagttatttttccaatacatgtaaacagttgcagcatgatgctttgtttaatgtcctgttcttaagctcgttagagccagttttgaaacgtttggtcttaccgtgaacggaggctggcttggcttagccacgctgatgagtaagtgagggatgtctccatcttgagatcaccaggcagagagttgcctgcaccaggtaagaggccaaagcccctggggtaacagtccccaccgctacccgaggtaaaacaataaaagctatgtggttgagctcaggcctctcgtgcctggtgtcagagaaggcagagcccacagtaggtgcagggtgcaaggccctgggagggcactggccagggaaggtggtatagatggccctcagattgcggggccccgagcagctccccactctgcccgtccaccttccctggctccagcctcattctctctttagtttaactatgcaaagagaggaggttgagagtgttctggcagctggagctcttttccttgtccttcctgccctccgatggggccacctgtgtcggggcagcagtgtccatgtttatggagatcagaggtgtccccactgtgtggctggactgtactctgctgnccgggtagccaggagtctctcctctctccct

SEQ ID NO: 243701 - DNA, 1250 bp, Homo Sapiens
  misc_feature (23)..(23): n is a, c, g, or t
  misc_feature (29)..(29): n is a, c, g, or t
  misc_feature (43)..(43): n is a, c, g, or t
caattcgagctcgtcttttgagnattccngcagcggacccggntggtgtcgacggatctctttacaagacgcacccacagtattcccggcgtttccacaagactctaaggcgcttggtgccagactccgatgtgcgcttcctcctctcggagagtggcagcggcaagggggctgccatggtgacggcggtggcctcccgcttggccgagcagcaccggcagatagaggagaccctggctcatttccacctcaccaaagacatgctgctggaggtgaagaagaggatgcgggccgagatggagctggggctgaggaagcagagcacaacaatgccgtggttaagatgctgccctccttcgtccggagaactcccgacgggaccgagaatggtgacttcttggccctggatcttggaggaaccaatttccgtgtgctgctggtgaaaatccgtagtgggaaaaagagaacggtggaaatgcacaacaagatctacgccattcctattgaaatcatgcagggcactggggaagagctgtttgatcacattgtctcctgcatctctgacttcttggactacatggggatcaaaggccccaggatgcctctgggcttcacgttctcatttccctgccagcagacgagtctggacgcgggaatcttgatcacgtggacaaagggttttaaggcaacagactgcgtgggccacgatgtagtcaccttactaagggatgcgataaacaaggagagaggaatttgacctggacgtggtggctgtggtcaacgacacagtgggcaccatgatgacctgtgcttatgaggagcccacctgtgaggttggactcattgttgggaccggcagcaatgcctgctacatggaggagatgaagaacgtggagatggtggagggggaccaggggcagatgtgcatcaacatggagtggggggccttcggggacaacgggtgtctggactgatatcaggacacactacgacagactggtggaccgaatattccctaaatgctgggcaaacaaaggtatgagaagatgatccagtggttatgtacctgggtgaaactcgtccgcaaacatctttaatcggactttcaccaatgaagggattcctctttccgaagggccagatctctgaatacgctgtagtatccgggggcatcttcagagacccaagtttcttttctccagaatcgacagttgatcgtctaggacttgcgtccgggtccgggctatcct

SEQ ID NO: 243702 - DNA, 724 bp, Homo Sapiens
gcagtctcttcaacttgattgtgtggcagtaccttcaagccggtcaaattcagccacagaacagcctggttcactgcacagttcccagggacttgggatgggtcctgtggaggagtcctggtttgctccttccctggagcacccacaagaagagaatgagcccagcctgcagagtaaactccaagacgaagccaactaccatctttatggcagccgcatggacaggcagacgaaacagcagcccagacagaatgtggcttacaacagagaggaggaaaggagacgcaggttctcccatgacccttttgcacagcaaagaccttacgagaattttcagaatacagagggaaaaggcactgcttattccagtgcagccagtcatggtaatgcagtgcaccagccctcagggttcaccagccaacctcaagtactgtatcagaacaatggattatatagctcacatggctttggaacaagaccactggatccaggaacagcaggtcctttagtttggtacaggccaattccaagtcatatgcctagtctgcataatatcccagtgcctgagaacaactatctaggaaatacacccaccatgccattcagctccttgctaccaacagatgaatctataaaatataccatatacactagtactggcattcagattggagcctacaattatatggagattggtgggacgagttcatcacttcgtgggcag

SEQ ID NO: 243703 - DNA, 640 bp, Homo Sapiens
ggtcaacctggtgatgagctgtggcatctccgtggagttctgcagccacataaccagagcgttcacggtgagcatgaaagtcagccgcgtggagcgcgcggaagaggcacttgcccacatgggcagctccgtgagtaccctgagcagggccacgccggcagagtcgcaccacaaagtaatcctcctcagtgactgaagagtctggatcctgtacttacaaagcagcttctaaggattgcaagctttcaggcaattcatggattagctgccacatcgtggacagaacggacgttctgtggaactgtacctgttggtacggctcctttttaggtggcagtgtgctgaagcaggaaaataacagacaagttaaacatgagacagctggcagtctttcccatttaaaatgcaggggagcccgggccagaacccagcgtgtgatgtgcggttggtgcctggagagtcgtcttggttcaactctacaccctggcttagcctatctctttaccactgtagaaaatacctggtaaagagtaaaaactaaaactttgtttcgtaacacttttaaatatttaagttttcacctgagaatataaagaaagataatcaattggatacacctgatcttgggatcctctgacac

SEQ ID NO: 243704 - DNA, 539 bp, Homo Sapiens
ggcgatctagaggatacccgatcacgtgtgtatcccccagaggtatcatctctggctatgataacaactggtaccttggccagaatgaggccaccctgacctgcgatgctcgcagcaacccagagcccacaggctataattggagcacgaccatgggtcccctgccaccctttgctgtggcccagggcgcccagctcctgatccgtcctgtggacaaaccaatcaacacaactttaatctgcaacgtcaccaatgccctaggagctcgccaggcagaactgaccgtccaggtcaaagagggacctcccagtgagcactcaggcatgtcccgtaacgccatcatcttcctggttctgggaatcctggtttttctgatcctgctggggatcgggatttatttctattggtccaaatgttcccgtgaggtcctttggcactgtcatctgtgtccctcgagtacagagcatgccagcgcctcagctaatgggcatgtctcctattcagctgtgagcagagagaacagctcttcccaggataca

SEQ ID NO: 243705 - DNA, 670 bp, Homo Sapiens
cgaccacactcatcgcgagaacaggaaggcttgggatctccccaggcagagctgactgcagacgcagcaaacccccgccactgccagggtcagcagtgctcacaccgatagagtggccggccagaggatatgggctgtggaagcctgggtggcccttgggctcctgcagggacagagggcctctgtccctagtggtttgagggaaactggttgtatttaagcaaaagccacccagagggtgggtgaccaggaatgtgcagggcccagcctgccccacggggcccgggtctggggcaggcctgaccaagggaccctgctctccccctgcagagcacctggtgaatggccggatggactttgccttcccgggcagcaccaactccctgcacaggatgaccacgaccagtgctgctgcctatggcacccacctgagcccacacgtgccccaccgcgtgctaagcacatcctccaccctcacacgggactacaactcactgacccgctcagaacactcacactcgaccacactgcccagggactactccaccctcacctccgtctcctcccacggtgagtgacctcagccaagcctgcctctcccactaacccttcctctcttccagctcctgagcctcggcttctgtctgctgtccccaccgccatactcgag

SEQ ID NO: 243706 - DNA, 331 bp, Homo Sapiens
  misc_feature (63)..(112): n is a, c, g, or t
tctatgcagaatataagctcctgcagggcaaggatctttgtcttattctctgatgcatcttannnnnnnnnnnnnnnnnnnnnnnnnnnnnnnnnnnnnnnnnnnnnnnnnnacatgaacacattaggtatactgtacagcatactgttcaaggaaatgctatataactgtatctttttgaaaatgttacctgttgccctacaagataacttatccaagttagtgacaaattatttttcttttctcttttatctgcttagtagttcagacattctcatttttagacatttctactagtggtctgaggctatgggatacacacgtgatcatt

SEQ ID NO: 243707 - DNA, 222 bp, Homo Sapiens
agaggcctacacactaccacatcctttctaagcatgtttgcctgacatccagctcacccgtccgagtactggaatagcacagaaagccccgtcgctagccctgccacgtcgttaggagctggtccaggatgaaggtagcagggcatgagctcagtgccaggagagcagccgcactcgtggtgtatcacctgccataatgcttttatctaacttcccctttcc

SEQ ID NO: 243708 - DNA, 594 bp, Homo Sapiens
tttttagggtagattttaataagattttaataatattggtaaggagccaaattacagaataccctagaatgtggaatacaaaatctcagagacaaaataaaaactcatgaaaatataagagcactttaaaaaggtaataatctttaggataaagaaagccttttctcaacacaggtactgagcatgtttaataaaaattaaatgagattaaagagaaggggcacagccacacgctccccgccccgcggtgattaggaaggtgatgcttgtgtaggtgaaagcatggagccagggcacagaagagctccgaacaccaacagtgctgcagtaagctgtctccacgtgggtggaatttctcacaatccactcacgggataggaattaattttctctccagttgcagaggggccttgtacatgaactgcgttggcatgcggaggaggggcaacacatccaatgttgggaacccttacatacgcaggcccaactgccaccacgggagggcatgggccttgggggaaacagggagagcaagctgtctccctctgggacgactattattcagctaaacggagatgtagaactccatgtgac

SEQ ID NO: 243709 - DNA, 845 bp, Homo Sapiens
ggctgggatcatggtagatggaaccctccttttactcctctcggaggccctggcccttacccagacctgggcgggctcccactccttgaagtatttccacacttccgtgtcccggcccggccgcggggagccccgcttcatctctgtgggctacgtggacgacacccagttcgtgcgcttcgacaacgacgccgcgagtccgaggatggtgccgcgggcgccgtggatggagcaggaggggtcagagtattgggaccgggagacacggagcgccagggacaccgcacagattttccgagtgaacctgcggacgctgcgcggctactacaatcagagcgaggccgggtctcacaccctgcagtggatgcatggctgcgagctggggcccgacaggcgcttcctccgcgggtatgaacagttcgcctacgacggcaaggattatctcaccctgaatgaggacctgcgctcctggaccgcggtggacacggcggctcagatctccgagcaaaagtcaaatgatgcctctgaggcggagcaccagagagcctacctggaagacacatgcgtggagtggctccaccaatacctggagaaggggaaggagacgctgcttcacctggagcccccaaagacacacgtgactcaccaccccatctctgaccatgaggcccccctgaggtgctgggccctgagcttcttacctgcggagatcccactgacctggaaaccaggagggggaaggccataccccagtacacggagctcgggggagaccaagccctggcaggggatgggaaccttcaagaaatggggaacctgggggtggcgacccttcctggaatgcc

SEQ ID NO: 243710 - DNA, 1004 bp, Homo Sapiens
  misc_feature (779)..(779): n is a, c, g, or t
  misc_feature (863)..(874): n is a, c, g, or t
ggacgcgtgggtcgacccacgcgtccgggctgggatcatggtagatggaaccctccttttactcctctcggaggccctggcccttacccagacctgggcgggctcccactccttgaagtatttccacacttccgtgtcccggcccggccgcggggagccccgcttcatctctgtgggctacgtggacgacacccagttcgtgcgcttcgacaacgacgccgcgagtccgaggatggtgccgcgggcgccgtggatggagcaggaggggtcagagtattgggaccgggagacacggagcgccagggacaccgcacagattttccgagtgaatctgcggacgctgcgcggctactacaatcagagcgaggccgggtctcacaccctgcagtggatgcatggctgcgagctggggcccgacgggcgcttcctccgcgggtatgaacagttcgcctacgacggcaaggattatctcaccctgaatgaggacctgcgctcctggaccgcggtggacacggcggctcagatctccgagcaaaagtcacatgatgcctctgaggcggagcaccagagagcctacctggaagacacatgcgtggagtggctccaccaataccctggagaaggggaaggagacgctgcttcacctggagcccccaaagacacacgtgactccccacccccttctctgaccatgaggccaaccctgaggggctgggcccctgggcttcctcccctgcgggagatcaccctgtaccctggcaacaggaatgggggagggncataacccaggacaccgggaggttcgtgggaaaacaaggccctggcagggggatgggaaacctttccaaagaggggcccacctnnnnnnnnnnnncccttccgggaaaaggggaccaaaaaaatacaccgtgccactggggccccccttggggggggttacccccaaaaccccgttcacccctggaaaataggagaaaccggggttttcccacggccgaccccta

SEQ ID NO: 243711 - DNA, 484 bp, Homo Sapiens
tgggtggacgctgttatatttgtcttcagcttggaggatgaaataagtttccagaccgtttaccactactacagtcgaatggccaactatcggaacacgagcgagattcctctggttctggtgggaacccaggatgccataagttctgctaacccgagggtcatcgatgacgccagggcgaggaagctctccaacgacctgaaacggtgcacgtactacgagacgtgtgctacatacgggctgaatgtggagagggtcttccaggacgttgcccagaagattgttgccacaaggaagaagcagcagctgtccataggaccctgcaagttcgctacctaattctcccagccattcctccgtctgttccgcgcaggtgtctgccgtgcacatcagccagacaagtaatggaggtgggagtttaagcgactattcctcctctgttccatcgactcccagcaacagacagaaggaactcggatcgatt

SEQ ID NO: 243712 - DNA, 601 bp, Homo Sapiens
tctggtggttccagtcatcaggaatgtggaagctatgaattttgcagatattgaacggaccatcactgaactgggagagaaggcccgaaagaatgaacttgccattgaagatatggatggtggtaccttcaccattagcaatggaggcgtttttggctcgctctttggaacacccattatcaacccccctcagtctgccatcctggggatgcatggcatctttgacaggccagtggctataggaggcaaggtagaggtgcggcccatgatgtacgtggcactgacctatgatcaccggctgattgatggcagagaggctgtgactttcctccgcaaaatcaaggcagcggtagaggatcccagagtcctcctcctggatctttaggaggaacccacacaccctacaagttgatcatgcaggaactgaaaaccagtcttctgcctgtcccctcatgggtcccgggttagcctggtgacaggcagacacatgctgttggccttaagcaaggaagcagagcactgtgtaaccagcagtcacaggtcttttcttggcgttcctgccaggctctccctctctgcacctgtctcatagcctcgaata

SEQ ID NO: 243713 - DNA, 489 bp, Homo Sapiens
ccagcggtacttttcagccgacgtgtacattatctgtagatattgtgactaacgtggtcatttatctaaaaactgccccggaccacgaaaagttcgtcgctgcttcctgtgctccaggagaggacatctcctgtattcctgtccagcccccctttgcgaatgctgtcctgtgcctaagatgttggaccactcatgtcttttcagacattcctgggatatacagtgtgaccgatgtcatatgctaggccactatacagatgcttgcacagaaatctggaggcagtatcacctaacgaccaaacgtggaccacccaccagaaagggtttctccaatgcacagaacatcagccaaagaatagtcgcgtatcacggcgcgaaagacaagcccataatcgtatagagaaattccagtatatgattgagaattgacatatttgcataattagtagcaaattgaatagatataacttagcagaactgaggtaatac

SEQ ID NO: 243714 - DNA, 630 bp, Homo Sapiens
cacacagctcatctcgcggctcatgctccaagccctgtccctgccttggccccacttccacacctgcatccatcactccagcatcagcgagagcatcttctgaacctgcacctgctagtgcagctaaacaagagaagcctgcagaaaagccagcagagacaccagtggctactagcccaacagcaactgacagtacatcgggtgattcttctcggtcaaacctttttgaagatgcaacgagtgcacttgtgacgggtcagtcttacgagaatatggtaactgagatcatgtcaatgggctatgaacgagagcaagtaattgcagccctgagagccagtttcaacaaccctgacagagcagtggagtatcttttaatgggaatccctggagatagagaaagtcaggctgtggttgacccccctcaagcagctagtactggggctcctcagtcttcagcagtggctgcagctgcagcaactacgacagcaacaactacaacaacaagttctggaggacatccccttgaatttttacggaatcagcctcagtttcaacagatgagacaaattattcagcagaatccttccttgcttccagcgttactacagcagatgagtgtaatgtcggccc

SEQ ID NO: 243715 - DNA, 685 bp, Homo Sapiens
gatccccaggccgcagctaaaatgaagacaacccaaattccaaaaagctagctgttcgtccccccctagggtaagtgtccccttgcgttttttagggtgcctttctttacccttcttaaaggttacagggcgtgaacggcaatcaggctcgattctccaccctctgcactcagacgtgttaaaacgctgctacagggacccaagcatttaaatgttctgactcaggcgtcttttaaattcttagagctgtctttacacgctgcactgaacgttaaattgattttacaggttattttcacaagatatgacccttacagggcccgagatgaatcaaaatgcagaacgggctctccggcgcctacttcccttctgtctgggcggccaaggattcccaagagcgacgacggtctccggccactggccggaatgactctcccagagctcctcttccccgaagctccgcccgccgaccctctaaagcaaacctgcacaccctggggcagctgaagctctcaaggcggtgccgagaacctcggctggggcgggctggccagcagcgtctacaccccagaacccgcccgcgccggggctccggaacctctcgttcgggccgggcgcaggggctgggggaagcgagcccggaaagaccaagctgcatgggtaccaactcgagtcgtatctgtaa

SEQ ID NO: 243716 - DNA, 319 bp, Homo Sapiens
cccagggagctctgctgcccttgctggccctgccctttcccacaggtgagcagggctcctgtccaccagcacactcagttctcttccctgcagtgttttcattttattttagccaaacattttgcctgttttctgtttcaaacatgatagttgatatgagactgaaacccctgggttgtggagggaaattggctcagaggtggacaacctggcaactgtgagtccctgcttcccgacaccagcctcatggaatatgcaacaactcctgtaccccagtccacggtgttgtgcagcaggttgagtgaatgagatcctcgag

SEQ ID NO: 243717 - DNA, 598 bp, Homo Sapiens
tgatcactgttcttgtttgtccctgcctgctttgcagaaagggtttgatgtgttcaatgcactggatctcatggagaacaaaaccttcctggagaagctcaagtttggcataagggacggcaacctgcagtattacctttacaattggaaatgccccagcatgggggcagcgaaggtaggcgacacatagccagagtccaggctgcccggcccagggtgtccatgtctccagcagaaaccgggccatgggttgaggagacagccgcagtctgggtccttgttacctcgagttgaacctttgaaaatgccctccctctgctggccagaccagcaaggtcagcgttcccctctcagcaactggtgtgaggatggcagaggggacagagccacacagtagcacgaagatcatctccaatgaggccttcccacgtgagggaaccgtggaagttgagttgcccacggtttgccaggagggtagggctgggggaactctgaggaggtttcctctcctgagctgctgccctcttctggcatgacactttcttagcccttcctcccccagtgccatagggaacataggggtgagcagtgcgcaacg

SEQ ID NO: 243718 - DNA, 805 bp, Homo Sapiens
  misc_feature (158)..(214): n is a, c, g, or t
atttattggtttgagagtctcgctctgtcacccaggcctgagtgcaatgacacaattatggctcactggagccttgacttccaggctcaagcaaacctcccaggctccagcctcccaagtaactgagactccaggcgtgtgcactatgcttggtatannnnnnnnnnnnnnnnnnnnnnnnnnnnnnnnnnnnnnnnnnnnnnnnnnnnnnnnntgtattgctcaagcgatctgcccacctcagccttaaagtgtcttccagcttttatgtgtctgaaaatatctttatttcacttcgctaaaatatattttcatcacacataaaattctaggtttgcagtttttgccttcagcactttaaagatcaagttgcactgctgtcttctcacttgcactatttctgacaagaaatttggtatcattcttaatctttgttcctgtgtaaataacatgtactattttcccagctgccttcaggatttgatctatatcattggttttgagcaatttgattatgtgatttgttacagttttctttgtatttcttgtacttgacattgagcttcaggtctgtgggtttatatttttcattacatttggaacatttttggccattatttcttctaatatttttccatgtctcaactttgtaaacatatgggatatagttaaaattaatgttaatgtctttctctgttcattttaatatgtgtcagtttggggttggtttggatcaaaataaggattgcttggttgttattatgggcctgtgaatatagattgccaaataaacaagaaatgctac

SEQ ID NO: 243719 - DNA, 1763 bp, Homo Sapiens
  misc_feature (690)..(690): n is a, c, g, or t
ctgcgagcagcgcgtgcggcagcccgggggaagcgtccgggaccatgtctggagaactaccaccaaacattaacatcaaggaacctcgatgggatcaaagcactttcattggacgagccaatcatttcttcactgtaactgaccccaggaacattctgttaaccaacgaacaactcgagagtgcgagaaaaatagtacatgattacaggcaaggaattgttcctcctggtcttacagaaaatgaattgtggagagcaaagtacatctatgattcagcttttcatcctgacactggtgagaagatgattttgataggaagaatgtcagcccaggttcccatgaacatgaccatcacaggttgtatgatgacgttttacaggactacgccggctgtgctgttctggcagtggattaaccagtccttcaatgccgtcgtcaattacaccaacagaagtggagacgcacccctcactgtcaatgagttgggaacagcttacgtttctgcaacaactggtgccgtagcaacagctctaggactcaatgcattgaccaagcatgtctcaccactgataggaccgtttgttccctttgctgccgtagctgctgctaattgcattaatattccattaatgaggcaaagggaactcaaagttggcattcccgtcacggatgagaatgggaaccgcttgngggagtcggcgaacgctgcgaaacaagccatcacgcaagttgtcgtgtccaggattctcatggcagcccctggcatggccatccctccattcattatgaacactttggaaaagaaagcctttttgaagaggttcccatggatgagtgcacccattcaagttgggttagttggcttctgtttggtgtttgctacacccctgtgttgtgccctgtttcctcagaaaagttccatgtctgtgacaagcttggaggccgagttgcaagctaagatccaagagagccatcctgaattgcgacgcgtgtacttcaataagggattgtaaagcagggaggaaacctctgcagctcattctgccactgcaaagctggctgtagccatgctggtgagaaaaatcctgttcaacctgggttctcccagttacggaaaccttttaaagatccacattagccttttagaataaagctgctactttaacagagcacctggcgtgggccaagtgcctgatactcccttacactgaatcatgttatgatttatagaaatacctttcctgtagcttttatagtcattgtttttcaaagacgatataccagccctcacccaggttttaaaaaagcactggtaggcatagaataggtgctcagtatatggtcagtaaatgttctattgattatcaatcagtgaaaaaagaaatctgtttaaaatactgaattttcatctcactcccattgcaaatcaaggagatctcagcagtgaactgggaaaatacaaaagctctgggctaatctataaaaacttaccctgaaatattaagggcagtttgcttctagtttggggattgcgctagcccaatgaaggtgatgaagcttttggatttggagggtaaaagctccttcacaccccttccaaaagtcagtcacagaccactgcaacatgccttccctgctggatcattatatacattcagattgtgagtggattgccttggttgacttttaatttattgttttttgttctttataaagatgataatcttaccttgcagttattgactttatattcaattatttac

SEQ ID NO: 243720 - DNA, 1114 bp, Homo Sapiens
gaaaatgagagcattcaggtctaatctggtgtgaagcccaccggctaccggaagcgctcctccagcatgtcagatggggataacccatactgcctggaagctatcatccgccagatgaatgcctttcatacagtcatgtgtgaccagggcttggaccctgagatcatcctgcaggtattcaaacagctcttctacatgatcaacgcagtgactcttaacaacctgctcttgcggaaggacgtctgctcttggagcacaggcatgcaactcaggtacaatataagtcagcttgaggagtggcttcggggaagaaaccttcaccagagtggagcagttcagaccatggaacctctgatccaagcagcccagctcctgcaattaaagaagaaaacccaggaggacgcagaggctatctgctccctgtgtacctccctcagcacccagcagattgtcaaaattttaaacctttatactcccctgaatgaatttgaagaacgggtaacagtggcctttatacgaacaatccaggcacaactacaagagcggaatgaccctcagcaactgctattagatgccaagcacatgtttcctgttttgtttccatttaatccatcttctctaaccatggactcaatccacatcccagcgtgtctcaatctggaattcctcaatgaagtctgaagatgcatgtttccagcattagtttgattcccaatgtgtgtttgtagttgctgctaagcgaacgccctttggagcttacggaggccttctgaaagacttcacagctactgacttgtctgaatttgctgccaaggctgccttgtctgctggcaaagtctcacctgaaacagttgacagtgtgattatgggcaatgtcctgcagagttcttcagatgctatatatttggcaaggcatgttggtttgcgtgtgggaatcccaaaggagaccccagctctcacgattaataggctctgtggttctggttttcagtccattgtgaatggatgtcaggaaatttgtgttaaagaagctgaagttgttttatgtggaggaaccgaaagcatgagccaagctccctactgtgtcagaaatgtgtcgtttgatccgcatacg

SEQ ID NO: 243721 - DNA, 883 bp, Homo Sapiens
  misc_feature (716)..(753): n is a, c, g, or t
gaagtggtccaagtgagatggacagacggccaagtctatggagccaagtttgtggcctcccaccctatccaaatgtaccaggtggagtttgaggatggctcacaacttgtggttaagagagatgatgtatacacactggatgaagagcttcccaagagagtcaaatctagactgtcagtagcctcatacatgcgcttcaatgtgattttcacagagaaagaggttaagcaagaaaagaaacggcaacgagttatcaactcaagataccgggaagattatattgagcctgccctataccgggccatcatggagtaggtgcttccagggtccaagggattctcagccatccaggcaagagcactctgggttccacagcacagcagacatggaacgctgaagtctctgaaagtgaagtcgtataaagaaaaggaatgagataaccgacccatcatcttctcacccaccctcattgcattccgctgtagtgtaaggacgagccatttctgggcacgtggcagcagtcgctgatctcccagctgaggggctgagcactggaatgctgtggctgcactggcccctgtccatagaggggtcaactatgctggctggacctggctgccttgttcctggcctaggacttagcttcataactatcacctgcaccgactaggctgaggtgctggtacttgcccccacccctacttttgtatttatannnnnnnnnnnnnnnnnnnnnnnnnnnnnnnnnnnnnntgtttggtctggaccagcttctgccagccctggcctctactttcttccttgcctatgcagggccaacaaatgtgaaattctgccctccagctgagctggtaaggctcctgggagttggctgggcgtgaca

SEQ ID NO: 243722 - DNA, 1103 bp, Homo Sapiens
ctgtttctatgaggatccccctcacagcaacttcctgagtagtgtaaagacatcttaagtggtggagacatgacagcccagacaccacagcagagggaaactggggagaggagggggcctgaccctggatcccccagctggtgtccacaggctagagggacccattgctgcagaggctggtgcctggttttccccatacttggtcttctaaacccaaagacagggtcctgatggtggagacctgggtaggtcgggaggacagacaccaggagagggcacaatcccaagcgcagctctcctgcactggctcgcaccacagccctcatctgagtggccgacacaagcctggagtacggcagctgccaaccacagacaaagccgcaaaaaagactgagaaaacaggaacccagagttccacaggggcaaggcctcgcagaccagccaagcccgagatgccctgtgctggcagtcatcacagtctggacagcatgtccttccgtgggtgcccagctcagtgcctggaacggtcagggattgagggcgtagccaaccttgtatggccaaacccagcccttacgcccctgctgacaaggggagacaagctgccccgctgaactccaacaacctctgggtgggctcagcagcccctaggaagttaagcgagagctacagggcaggggggctccctgagggagtttgcacagaccaggaggggccaaggggtagccccaagggagtagaggaaggagaagggcaggaaaaggtccagggcacagggcaagcaacagtgccagagggtgcctggtcacaggaagcccagctgcatgttccatgctgcccacaggactcccagccaggccccagcaggcctggacagtgctgggcccccatcctcggccttcccagcacagcaggtgctggaagatgaccatgacccaagcgagaagagccgccatgaactgtggtcataccagccagggcgttctaggacaagacttcctaacccgacagcaatgacatccacagtgtatggactgggctcttgaggagcacgagggagaggccaggcaggcctgtcaggggtcctgggacatattcaggca

SEQ ID NO: 243723 - DNA, 742 bp, Homo Sapiens
cccaaactgccattctctatgagaaacacctgaacccttcaacaaactcctccatgaagtcagagagtcacaacatgtgttcccccaaacaaatgtatcaagtcccactccagatcccgctttgtgacgttaatggagcgccagcctgggactcttgaaggacccgacatgtgggtaagtttacgaccagagctgtgagatcatgctgaaccatttggcaacagcgcgattcatggccgaggctgcagacagctaccggatgaattctgagaggatcctggcaggttttcaaccagatgaagaaatgaatgaaatctgcaagactgaatttcaaatgcgattgctatggggcagcaaaggtgcacaagtcaatcagacagagagatatgagaaattcaaccagattttaactgccctctcgcgtaaattggaacctcctcctgtaaagcaggcagagctttgataactctccagagaacctttagaatatcttttcaagtttccccagcttcatctttgggaaagcttactgtttttgataaagtaataatgtgcgaatctgaccatatacaagcttttagtatccacaggatattaaacgtgtatattgcacagagcacacttatttatgaattgtcctcaagttactactgattttaaaatgaataatttattattaaggtaactactgctaatgtcgatcagcaatttaagagaagacctagctatgttggctgagcta

SEQ ID NO: 243724 - DNA, 404 bp, Homo Sapiens
aacgctcgagccaaccactgaaggcattggcctatgtggccaccccacagaaccctggttacctgggccctgcgcctgaagaggccattgccacgcagatcctggcctgccggggcttctccggccacaaccttgaatacttgctgcgtctggcagacttcatgcagctctgtgggcctcaggcgcaggacgagcacctggcagccatcgtggacgctgtgggcaccatgttgccctgcttctgccccaccgagcaggctctggcgctggtgtgaggggctgagcccctgcggggagtgctcatgtggacatcagggccagacacccactccagtgcacaagacagacttgcgaccgcttgaagcccactgagcagatatggtgggtggctggagcttacaacg

SEQ ID NO: 243725 - DNA, 364 bp, Homo Sapiens
ctccagccaaacattcactcaacctgcgcccatcttgttgccccgggtgaactatctgaactactatctaaagtcagtttcttcccacgtgcactacattccagcagcttttacttagcaaagaacattttccagcaatttccttatctctccttaacaccattttctccccttttcctactggatcattctcatcagcatttaaacaagttattacttgtttcccaacctgaccacatttttcatcttccgtctccgtaaatctgatctgtgcccctctatttatttcctgaatttctatgatggccttttacctgatcttcctgcatgtgtcctctcaccctacacaatctattcccagcat

SEQ ID NO: 243726 - DNA, 889 bp, Homo Sapiens
gaatgataaagactggagaaagtggcatgatagttttccggcttcttacaaaaaacaaccgatggacttgggtccagtctaatgcacgcctgctttataaaaatggaagcccagattatatcattgtaactcagagaccactaacagatgaggaaggaacagagcatttacgaaaacgaaatacgaagttgccttttatgtttaccactggagaagctgtgttgtatgaggcaaccaacccttttcctgccataatggatcccttaccactaaggactaaaaatggcactagtggaaaagactctgctaccacatccactctaagcaaggactctctcaatcctagttccctcctggctgccatgatgcaacaagatgagtctatttatctctatcctgcttcaagtacttcaagtactgcaccttttgaaaacaactttttcaacgaatctatgaatgaatgcagaaattggcaagataatactgcaccgatgggaaatgatactatcctgaaacatgagcaaattgaccagcctcaggatgtgaactcatttgctggaggtcacccagggctctttcaagatagtaaaaacagtgacttgtacagcataatgaaaaacctaggcattgattttgaagacatcagacacatgcagaatgaaaaatttttcagaaatgatttttctggtgaggttgacttcagagacattgacttaacggatgaaatcctgacgtatgtccaagattctttaagtaagtctcccttcataccttcagattatcaacagcaacagtgcttggctctgatctcaagctgtatggtacaggaacacctacatctagaacagcaacagcaacatcaccaaaagcaaatagtaattcatgtacg

SEQ ID NO: 243727 - DNA, 1302 bp, Homo Sapiens
cgcatgtcctgtaggccagcgtcatcatctaccgcaccctggccgggctactgcctcataactatgaccctgacaagcgcagcttgagagtccccaaatgcccgatcatcaacacacccgtggtgagcatcagcgtccatgatgatgaggagcttctgccccgggccctggacaaacccgtcacggtgcagttccgcctgctggagacagaggagcggaccaagcccatctgtgtcttctggaaccattcaatcctggtcagtggcacaggtagctggtcggccagaggctgtgaagtcgtcttccgcaatgagagccacgtcagctgccagtgcaaccacatgacgagcttcgctgtgctcatggacgtttctcggcgggagaatggggagatcctgccactgaagacactgacatacgtggctctaggtgtcaccttggctgcccttctgctcaccttcttcttcctcactctcttgcgtatcctgcgctccaaccaacacggcatccgacgtaacctgacagctgccctgggcctggctcagctggtcttcctcctgggaaacaaccaggctgacctcccttttgcctgcacagtcattgccatcctgctgcacttcctgtacctctgcaccttttcaggccgcctccccagcccccactggcaacccctgctcctgcaccgtgaactctaataaggtgcctagtgcagcacctggcccagggtttcctcttctgtgtgtccccttggctgcccttctgctcacgttctttcttgctcaggcttccttgcgtatcctttgctccaacccgcagggcctccgtcgtaacctgacagctgccctgggcctggctcagctggtcttcctcctgggaatcaaccaggctgacctcccttttgcctgcacagtcattgccatcctgctgcacttcctgtacctctgcaccttttcctgggctctgctggaggccttgcacctgtaccgggcactcactgaggtgcgcgatgtcaacaccggccccatgcgcttctactacatgctgggctggggcgtgcctgccttcatcacagggctagccgtgggcctggaccccgggggctacgggaaccctgacttctgctggctctccatctatgacacgctcatctggagttttgctggcccggtggcctttgccgtctcgatgagtgtcttcctgtacatcctggcggcccgggcctcctgtgctgcccagcggcagggctttgagaagaaaggtcctgtctcgggcctgcagccctccttggccgaagtggatcct

SEQ ID NO: 243728 - DNA, 188 bp, Homo Sapiens
taccctgtcacgcgtccagcgcaagcagttaagcgtaaacaggaaatcattaagagggactatcgaaccttaaagtagaaataagatcatgatctaagtcttctagcatcttatattattggaagaagacctaacttggcagcgagggaagtggctgagcgttgacggggatcctctaggcacccacg

SEQ ID NO: 243729 - DNA, 363 bp, Homo Sapiens
cccttaacgctcagccacagtgagtcaggagaggctttctaggcaaagacatctaagttcagaatccttgtgatccagatgcctgtaccctttgagttcagaggtgggccagggtatctcaggtatttctttctctttagcatcttgcaattcaaaatatggtccttgaatcgacatcacctgagagcttgttaaacagagaaggctacttcaaattctatttctgtcttttatgttagtcatcttgcggttcttaagtcatttcactgtaacctctgggggcgctaggggattctttaaggaccgtatccattctcctgaattgtctttcagaacctgttacatggctggacgccgtgatca

SEQ ID NO: 243730 - DNA, 225 bp, Homo Sapiens
tctcgaggatccccgttcacgctcagccacacaggacttctttgagttctttcagtgaccaatctctttctcgcctcagtggcctttgtagctggcaggttccttccgccggacacgtcgggtttcctcgtttttgcggactggcgctttctgatttcagagactctccgcaacagaaccatctcaagtgggtctacctcctcgcctttttttgttgttgttgtt

SEQ ID NO: 243731 - DNA, 760 bp, Homo Sapiens
gtgagaaggtgaccatgcagaacctctatgaccgcctggcctcctacctggacaaggtgcgtgctctggaggaggcctacgccgacctggaagtgaagatccgtgactggtaccagaggcatgtggcacagcgagctctgccaagacagtacgcatgcagagagaatcgagaacatgagggaggagatcattgcggccaccattgagaatgcgcagcccattttgcagtcccagctcagcatgaaagcatccctggagaacagcctggaggagaccaaaggccgctactgcatgcagctgtcccagatccagggactgattggcagtgtggaggagcagctggcccagctacgctgtgagatggagcagcagagccaggagtaccagatcttgctggatgtgaagacgcggctggagcaggagattgccacctaccgccgcctgctggagggcgaggatgcccacctttcctcccagcaagcatctggccaatcctattcttcccgcgaggtcttcacctcctcctcgtcctcttcgagccgtcagacccggcccatcctcaaggagcagagctcatccagcttcagccagggccagagctcctagaactgagctgcctctaccacagcctcctgcccaccagctggcctcacctcctgaaggcccgggtcaggaccctgctctcctggcgcagttcccagctatctcccctgctcctctgctggtggtgggctaataaagctgactttctggttgatgc

SEQ ID NO: 243732 - DNA, 401 bp, Homo Sapiens
  misc_feature (374)..(374): n is a, c, g, or t
ggcctgctgagatcaaagactacagtccctacttcaagaccattgaggacctgaggaacaagattctcacagccacagtggacaatgccaatgtccttctgcagattgacaatgcccgtctggccgcggatgacttccgcaccaagtatgagacagagttgaacctgcgcatgagtgtggaagccgacatcaatggcctgcgcagggtgctggacgaactgaccctggccagagctgacctggagatgcagattgagagcctgaaggaggagctggcctacctgaagaagaaccacgagggaggagatgaatgccctgagaggccaggttggtggagatgttcaatgtggagatggacgctgcacctgggcgtnggacctgagccgctttttggaacgaga

SEQ ID NO: 243733 - DNA, 688 bp, Homo Sapiens
  misc_feature (438)..(438): n is a, c, g, or t
  misc_feature (641)..(641): n is a, c, g, or t
ggcctgctgagatcaaagactacagtccctacttcaaggaccattgaggacctgaggaacaagattctcacagtccacagtggacaatgccaatgtccttctgcagattgacaatgcccgtctggccgcggatgacttccgcaccaagtatgagacagagttgtacctgcgcatgagtgtggaagccgacatcaatggcctgcgcagggtgctggacgaactgaccctggccagagctgacctggagatgcagattgagagcctgaaggaggagctggcctacctgaagaagaaccacgaggaggagatgaatgccctgagaggccaggtgggtggagatgtcaatgtggagatggacgctgcaccttgcgtggacctgagccgcattctgaacgagatgcgtgaccagtatgagaagatggcagagaagaaccgcanggatgccgaggaatggttcttcaccaagacagaggagctgaaccgcgagttggccaccaacagcgagctggtgcagagcggcaagagcgagatctcggagctccggcgcaccatgcagaacctggagattgagctgcagtcccagctcagcatgaaagcatccctgggagaacagcctggaggagaccaaagtcgcttacttncattgcagcttggcccagattccagggagattgatttggcagccttg

SEQ ID NO: 243734 - DNA, 796 bp, Homo Sapiens
  misc_feature (355)..(407): n is a, c, g, or t
  misc_feature (724)..(724): n is a, c, g, or t
  misc_feature (771)..(771): n is a, c, g, or t
acagcacgctctcagccttcctgagcacctttccttctttcagccaactgctcactcgctcacctccctccttggcaccatgaccacctgcagccgccagttcacctcctccagctccatgaagggctcctgcggcatcggaggcggcatcgggggcggctccagccgcatctcctccgtcctggccggagggtcctgccgtgcccccagcacctacgggggcggcctgtctgtctcctctcgcttctcctctgggggagcctgcgggctggggggcggctatggcggtggcttcagcagcagcagcagctttggtagtggcttcgggggaggatatggtggtggccttggtgcnnnnnnnnnnnnnnnnnnnnnnnnnnnnnnnnnnnnnnnnnnnnnnnnnnnnnatgggcttctggtgggcagtgagaaggtgaccatgcagaacctcaatgaccgcctggcctcctacctggacaaggtgcgtgctctggaggaggccaacgccgacctggaagtgaagatccgtgactggtaccagaggcagcggcccagtgagatcaaagactacagtccctacttcaagaccatcgaggacctgaggaacaagatcattgcggccaccattgagaatgcgcagcccattttgcaagattgacaatgccaggctggcagcccgatgactttaggaccaaagtatgaacacgaactggccctgcggcanaactgtggaagccgacgtcaatggcctgcgcccggtggttggataanctgaccctggcaggactgacctgga

SEQ ID NO: 243735 - DNA, 185 bp, Homo Sapiens
cacaagcatctggtgaccatgtggttcctgtctgatgagtggacaggcaggcagacacatgtcatgagaggtatatgcatttgtcagcatacaacttacttcatagcctttaaggataagcgtagaatttctgtcactcattatggccaaatactatcacccgttttgtgatgccggtccggcta

SEQ ID NO: 243736 - DNA, 432 bp, Homo Sapiens
gctcagccagctctccctctagtgttttttaaaaatgtaatttgtgtttttcattgattcacacagcagatatttactgagcacctactatgtgcccagtacacagtctgcccttaagactattaggtacaagtcctaggagtcaatgggaagcaaaaacagacactgtctgccctcatagggctttcagtctagtggtagggactgaaaaacttcatgtgtgagaagtgccacaaaggagagatcaatggtatgataaagagggctcattaatgggggatttaacttagttagaaagtaacccacagctgaaagctaaaggtaaactaggagaagagagaagagtgttccaacagatccagcagcagcacatgcaaagcccctgtggcagcagggagtgagatggggtgaaggggtgagagaaggctggtg

SEQ ID NO: 243737 - DNA, 744 bp, Homo Sapiens
ttccaagagcccatcggtacttctttagctactggaatggataatagaaagtgttaattctcgaagagacgaactagatagtagaagcatttatgttcccttggagaatcttcccaccaaggactcaaagttgtctccagactagggaatgcctggggccttggactttcccaattctggtatcacctcccattctcctttaggtccagctttctcagaggggcatgcattgttcattgccaccaagggcatccaaggacagaaactgaagataatagtgccttattgtctctcagtctatctttctctcccacatgctggaaagagagccaagtccaatttatccaattacaaaatagcaacattggcatcatgagatcagctaacaaaactttcagaggcaatctatcttcctaccaaaagtaaccaacatctgtggagcactgaccatgactaagggtcaacataagtggtttgcatgctacatgcatcaggatggactaggttatgctgcagtagcaaattaaccccagagtctcagcagcttagcaaccaaggttgatttcttacattccatgtccacaatgggttggctgggtatggtgtgctccatatggccactcaaagacctagaatgatggaaattctaccatcttaatgtaaggattctcccctagttactgcaccaggagatgagagaatgagatgttgacgcggccgcgaatttagtagtagtagtcgacc

SEQ ID NO: 243738 - DNA, 521 bp, Homo Sapiens
ctccagccaagccacacacatgaagtgatgcgattgggcattccaatcacagtcactcatgcagcaccgacacatgctcggccgcaggcactgtcgctggagccacacatagtatcataaggcacacagggccacacacaactgcaaacatggtctcagttacccctgagttccaacacactcctaatctcccggagtctcactgctgccacctggtgatgcacactcatccatggtctcatatgcaccgcaatgcaattgctcagtgacagggtcagactcacccacagccctgtgtacagaggcagatggctagatacacacacacccagttacacaaacagaaacacacccccgttcacagccccaccaggcagggatagccaccttacctcctgccaggtgtccagtaacatgatgtcatacttgtccaggtcctcctggctgaagaaccccacttctgcgaggaccaggcagcccatgtggctggagcactcaaacagtcgtggctggagcggaag

SEQ ID NO: 243739 - DNA, 1107 bp, Homo Sapiens
  misc_feature (1067)..(1067): n is a, c, g, or t
ttgatagcccaatcccaggctggcaaattagctttactcaacatgacctgagtcaggtaactaaaacacctcttagtctaggtagacactttcactggataggtacaggcctttcctacagggtctgagaaggccaccacagtcatttcttccattctgttagatataattcctcagtttagccttcccgcctctatacagtctgataacagatgagcctttattagtcaaatcagccaagcagtttttcaggctcttagtattcagtgaaacctttatatcccttacggtcctccgtcttcaggaaaggtagaacggactaatggtcttttaaaaacacacctcaccaagctcagccaccaacttaaaaaggactggacaatacttttaccactttcccttctcagaattcaggcctgtcctcggaatgctacagggtacagcccatttgagctcctgtatggacgctcctttttattaggccccagtctcattccagacaccagaccaacttagactgtgcccccaaaaacttgtcatccctactatcttctgtctagtcatactcctattcaccgttctcaactactcatacatgccctgctcttgtttacactgccagtttacactgtttctccaagccatcacagctgatatctcctcgtgctatccccaaactgccactcttaactcctgaagtaaacaaataatctttgctggcaggactatgctgaatctccttaggcactctctaatcagatgtcctaggtcctcccaattcttagaccttttatacctgtttttctccttctcttattccatttagtttttcaattcatacaaaactgtatccaggccatcaccaatcattctatatgacaaatgtttcttctaacaaccccacaatatcaccccttaccacaaaatcttccttcagcttaatctctcccactctaggttcccacgccgcccctaatcccgctcgaagcagccctgagaaacatcgtccattctctctccataccacccccaaaaaattttcgccggccccatacttcaacactatnttgttttatttttccggagcaccacccgagcccaccaata

SEQ ID NO: 243740 - DNA, 759 bp, Homo Sapiens
  misc_feature (679)..(679): n is a, c, g, or t
  misc_feature (708)..(708): n is a, c, g, or t
  misc_feature (713)..(713): n is a, c, g, or t
  misc_feature (726)..(726): n is a, c, g, or t
aaacagttttagtgctgactcaaagcctttttgttggtctcttcacacggacgcgcgtgaaatttggtgccgtgactcggatcgggggacctcccttgggagatcaatcccctgtcctcctgctctttgctccgtgagaaagatccacctacgacctcaggtcctcagactgaccagcccaaggaacatctcaccaatttcaaatctggtaagtggcctgtttttactctcttctccaacctccctcactatccctcaacctctttctcctttcaatcttggctcacatacttcaatctcttccttctcttaatttcaattcctttcattttctggtagagacaaaggagacatgttttatccgtgtacccaaaactccggcgccagtcacggactgggaaggcagccttcccttggtgtttaatcattgcagggacgcctctctgattatacacccacgtttcaagggtgtcagaccacgcagggacacctgctttggtccttcacccttagcggcaagtaccccttctctgctttttcagggacagggcaagtaccccaaccccttctctccttgtctctaccccttctctgctttttccggggagagggcaagtaccccaacccccttctctcctttgtctctacccccttctctgctttttccagggaacagggnccaagtacccccaaccccctttctctccnttggnctctacccccttnctctgcttttttctgggggaaaagggggaaaaa

SEQ ID NO: 243741 - DNA, 289 bp, Homo Sapiens
tgtcacgctcagacaagccaacccgtggctaaaatttagtcaacttcagcgaagaagactgccccttgtaaaacttgtctgctcttggaaatcaggttttttgtctcattttccccagcctttgctagcattgcacttgtaaaaaattcctggcatcctttctgcggagttaagtgggaaggctcaatgttctgggataggtgggaacatcaaacccgctagaggctgctggtggcagtggaggcagaatgagttgtagcagtagtgtggctgagcgtatacggaccgg

SEQ ID NO: 243742 - DNA, 258 bp, Homo Sapiens
ctcgaagacaggtactctacacattcttgggtgggcatatcaactggggcaacctatctggaagaaaattcagccatcaaaatttaaaatgttctttccctttgacccaagtcctaggaatccggacttgtagaagtatggcaaaaataaatatacaaggatgctctctaccaacactgttgatactagccagccaagatccccatcaacggggagactcatttacaagattatgattgccgttggcttgagcgtggt

SEQ ID NO: 243743 - DNA, 666 bp, Homo Sapiens
  misc_feature (110)..(124): n is a, c, g, or t
  misc_feature (134)..(231): n is a, c, g, or t
  misc_feature (284)..(306): n is a, c, g, or t
ggggggaacccagccctttttatggccccggtttccttgggaacaagtatggccccgtttcctttccttttggggccccgcgcccaacggaaggttttaaaaactttttnnnnnnnnnnnnnnncgccaagggnnnnnnnnnnnnnnnnnnnnnnnnnnnnnnnnnnnnnnnnnnnnnnnnnnnnnnnnnnnnnnnnnnnnnnnnnnnnnnnnnnnnnnnnnnnnnnnnnntgggcagagttggagtttatttgctgcagttccttggcgctagtttacaaggnnnnnnnnnnnnnnnnnnnnnnnttagaataattatttcttaaaaaccctgtcaacaactttcagtcatttctttatatttttgtattttgacaaaacttcttttaaacaaatacaaaataatctaaaaggagaaaaactatacatagattatttacacctctgataaatagactaatactgacccaggtgcctctctgtctaggaaacacttgagaaccaggccagggcccgggccagctggacaggctccagcaccggcccaaacgccaagacctcggcaggcaccacctggttctcccacccagaaagttcaggtttccagcctggaccctcttctgtcaccctcacaagctctggcacaaaagtgcctaaagccatccc

SEQ ID NO: 243744 - DNA, 1039 bp, Homo Sapiens
  misc_feature (887)..(895): n is a, c, g, or t
  misc_feature (920)..(920): n is a, c, g, or t
  misc_feature (986)..(995): n is a, c, g, or t
gacctgacgctatggagctctcggagttttgtgggggacggctgtgagtggggggttcctgctgcgggatgagaacgtagacgccagtggctcactcgctcctggcaccttccctttcaggctccagatggaccctgggaaggacaaagagggggtgccccagccctcagggccgccagcaaggaagaaatttgtgatacccctcgacgaggatgaggtccctcctggagtggccaagcccttattccgatctacacagagccttcccactgtggacacctcggcccaggcggcccctcagacctacgccgaatatgccatctcacagcctctggaaggggctggggccacgtgccccacagggtcagagcccctggcaggagagacgcccaaccaggccctgaaacccggggcaaaatccaacagcatcattgtgagccctcggcagaggggcaatcccgtactgaagttcgtgcgcaatgtgccctgggaatttggcgacgtaattcccgactatgtgctgggccagagcacctgtgccctgttcctcagcctccgctaccacaacctgcacccagactacatccatgggcgggctgcagagcctgggggaaaaacttcccccttgcgggtccctggcttgtcccagtggggattgtgaaaagatcccccaagccagggcccctccaagggaaagctggggcttaaaaaaaggtggtaattcccgtgggccccaaattggccaccttttggaaatcttcccctggaaggcccggaaggctggttttgatgcccctgcaccaagccccttccttggaaaggacccctggaggaacaccaagctgtgccaagggaaaacccccccgggggaaataaaaaaatctggnnnnnnnnnagggccccggaaaaaaataatactncaacccagaacacatgacgcgacggagttaggaaaaccttccgggggcgctctctcttgtgcggannnnnnnnnnaaaaaaagggcgaatggatatatgggcccctgggggctcacacc

SEQ ID NO: 243745 - DNA, 507 bp, Homo Sapiens
tatgagaaacgtgacagtaggtttgtagtgagcttgtgctacgcctatgagaccaatggacgcgctgtgcctggtgctgacactgatgaactgggggcgacctcaagttccacatctaccacatgggccaggctggcttccccgaagcgcgtgccgtcttctacgccgccgagatctgctgtggcctggaggacctgctccgggagcgcatcgtgtacagggacctgaagcccgagaacatcttgctggatgaccacggccacatccgcatctctgacctgggactagctgtgcatgtgcccgagggccagaccatcaaaagggcgttgtgggcaccggtgggttacatgggtccggaggtggtgaaggaaatgaacgggtacacgttcagccctgactggttggcgctcggcttgcctcctgtacgagatgatcggcaggccagtcgcccttccagcagaggaagaagaagatcaagcgggaggtagcgagcagttccagtttagg

SEQ ID NO: 243746 - DNA, 693 bp, Homo Sapiens
  misc_feature (476)..(532): n is a, c, g, or t
acttcttagagaaaaggtgtgtgctggtgtctccaagtctaatgatttcaccagtggattctgcttcatctccatcccaagaggggcccaacatctcagaagacaaggagcacctggaaaagttccctccttcactcagggcccagcctgaccagagggcccttcccctgaggacctggagagctgctgggtgcagaaaaaggaaaagactctcccttttgctgcttagcatgtcttgctgcttatgttttgttttcactgatatatgaatggtagaaatagctgtatataaagtgtcaacgattaaatgtataggagaacagcaaatactggtgactctagggtgtgggagtgaagggggtgggatgctaactttgcattaaatatccttcaattgtttcacttttgcgcttattttgttactttaaaattcttatggaaagaagttcaccaggccgggcatggtagctcactcnnnnnnnnnnnnnnnnnnnnnnnnnnnnnnnnnnnnnnnnnnnnnnnnnnnnnnnnnctgggctgtagtgcgctatgccgatcgggtgtccgcactaagttcggcatcaatatggtgacctcccgggagcgggggaccaccaggttgcctaaggaggggtgaaccggcccaggtcggaaacggtcagttccactttaggcggggatcctcctagatca

SEQ ID NO: 243747 - DNA, 213 bp, Homo Sapiens
ggtgaaccgggatctggctgcactcttcgacgacatttgcggatgccgtcgatgtcggagaagtccaactgagggtcgaggtcctgggtgtacatgttcaacgccacggtcaccaggtcgacgttaccggtacgctcgccgttgccgaacaggcagccttcgacacggtcgcgccgcatcagacccaattcggtagcgccacgccgtccatat

SEQ ID NO: 243748 - DNA, 554 bp, Homo Sapiens
tttagctatttagcctttgtaactttagacactggggatgccttcatgctttctggtgagggtctgttaacttggcccgtggagtccttcactgcacggaagagcagaggtttccctgttcacctgctctatggtctgtgctcttgtgaaaacaccttaccctggccctgggtcctgccttcacgttcctgccttttcttctatcagccttctagttttgcttttcagaatggaatgtttccgttttggagtcaggtaggatcacacatgtccagtttctctttctgttcatgacgtatatgatgtgacatatttttccaccagatattatgggatagaagatgaaaagcacacactcccaggtccacttgacctgttgcagtggaacctccgggcatgggcccaggagtctgtatttttagtaaaagccagtggaatcccgtggtcttcaagctctccccccaccaccccatgtgcagaaatgcctgggcacccttggggggctgccggccagcgtgggtgaatgcgcccaccagacgagcgtgagcatatat

SEQ ID NO: 243749 - DNA, 652 bp, Homo Sapiens
aggaccgggggtcaggacatcaagatgaggagcctggagacttgggccgacgaagcctgaatgtgagggttacgaccccaacgccctgtattgcatttgccgccagcctcacaacaacaggtttatgatttgctgtgaccgctgtgaagaatggtttcatggcgattgtgtgggcatttctgaggctcgagggaggcttttggaaaggaatggggaagactatatctgcccaaactgcaccattctgcaagtgcaggatgagactcattcagaaacggcagatcagcaggaagctaaatggagacctggagatgctgatggcaccgattgtacaagtataggaaccatagagcagaagtctagcgaagaccagggataaagggtagaattgagaaagctgcaaatccaagtggcaagaagaaactcaagatcttccagcctgtgatagaggcgcctggtgcctcaaaatgtattggccccgggtgctgtcacgtggcgcagcccgactcggtgtactgcagtaatgactgtatcctcaaacacgccgcagcgacaatgaagtttctaagctcaggtaaagaacagaagccaaagcctaaagaaaagatgaagatgaagccagagaaagccagtcttccgaaatgcggtggtc

SEQ ID NO: 243750 - DNA, 586 bp, Homo Sapiens
gatggcgtgggtattgatttctagtgtttcacagtgtctgtaaatcaagaccaaagagcctgtcgatgagactgtttattaccagattcacttctgaattggccagaggaaatctgaatgtattatcctgtgtgtgtctaggtagagatattggaaggctgccaggggatttcgaagtttgcaacctttataggataactgatggcaatattaagacagacgcctgcttttgcaaataacttacaagactgtaaattccaaagatctgaatggggctttcctgatgttggtatctaaggcttaggcctatagattgatttacctttggaattgtgctccaaatgtctactgaagcttaaccgaagaactaataaatggactacagtagctcacgttacagggaaggagggtaggcagggaggctctgtgtgttaaaatgagggtctcactgctttaggattgaagtggctggaaagagtgatgcctggggaaggagatggagttatgagggtactgtggctggtactttctgtactaaacatttccttttttctattttaccactaattttgttttaactgtgagc

SEQ ID NO: 243751 - DNA, 304 bp, Homo Sapiens
taaagcataagtcttgactaccaacactgctcagcttggcatatcagtaaaagatttagcacgagcataaaacgagaaaccatgaaagatcaccgctctgattggcaagaaaaagaaatggaaggtaggtggagttcttttgttttccagtgtgttctagtgacctaatcatgttaccagctagaacatacagatagagtggctccctatcgggggagaatcctagcactgttaaatcatgagacaatagactctgtgtatgacagtgattcctatgccccttcaggtgatccatagatacttt

SEQ ID NO: 243752 - DNA, 347 bp, Homo Sapiens
cataaacgagtgtgactgttcccataaaactatgttatgggccctgaaatctggatttcatatgatttctacatatcaccaaatagtcttattttgatttttttcaaccatttccaaatgcaaatctattcttagcttgctctctgcacaaaaacaggcaatggactagaattggctcactgaccatagtcatgcctgtaagagttaaagaaagaagaaagaaacatgaaacgtggctttgtagtcaaagacaggttttctttacttaaaacctgagaggcttcccggctaatttcggttaggagcactttctcttacagagcctgcacttgatggatcacctgcat

SEQ ID NO: 243753 - DNA, 507 bp, Homo Sapiens
ctcctcagcagacgcagctctgcagaatacagtgtccataagatcacctctacctttcatcaagatgttgatggctggaaggctgtccaacgaaatgggtctcctgcaaagctccaatggtcacagcgccatcaagatgtgtttagctcagcccaacgactagaccctgtctattttgtggctcctgccaaatttcttgggaatcaacaggtgagctatgggccaagcctgtcctttgactaccgtgtggacagaggaggcagacacccatctgcccatgatgtgattctggaaggtgctggtctacggatcacagctcccttgatgccacttggcaagacactgccttgtgggctcaccaagacttacacgttcaggttaaatgagcatccaagcatatattggagcccccagctgagttactttgagtatcgaaggttactgcggaatctcacagccctccgcatccgagctgcgtctgctgaggaggtaccgagctcgatctat

SEQ ID NO: 243754 - DNA, 204 bp, Homo Sapiens
ctgcctgcagcagacgcagctcccagtctttcagttcttatagtgaaatgtcaaggcagtgcctccagattcactccattgaacacgaaatttaggttaaagagtgtgaaggggaggaatgggaggaagaaatatggcatttaaaaatgtgcttgctaatacttagtgaactctggagcttaaagataggttcctataagagat

SEQ ID NO: 243755 - DNA, 616 bp, Homo Sapiens
gtttcacagaaaagatgggttcgagttcagtggtcttcatcttccaagcatcattactaaccaagtcagacgttaacaaatttttatgttaggaaaaggaggaatgttatagatacatataaaattgaagtaaaatgttttcattttagcaaggatttagggttctaactaaaactcagaatctttattgagttaagacaaagtttctctaccttggtttaatcaatatttttgtaaaatcctattgttattacaaagaggacacttcataggaaacatctttttctttagtcaggtttttaatattcagggggaaattgaaagatatatattttagtcgatttttccaaaggggataaaagtccaggtcagcataagtcattttgtgtatttcactgaagttataaggtttttataaatgttcctttgaaggggaaaaggcacaagccaatttttcctatgatcaaaaaattctttctttcctctgagtgagagttatctatatctgaggctaaagtttaccttgctttaataaatatatttgtccacatcattgcagaagaggtatcctcatgctggggtgaatagtatatgtcagtttatcacttgtcgctta

SEQ ID NO: 243756 - DNA, 969 bp, Homo Sapiens
ggaggccggaactctttctcaggataaggcttaatgaacagaatcttgatctggaagaccatgtttctggtgaaaagaagaccaaactgagggcaactcctgaagcaatacagaaccgtcttcaagatattgaagaaaggatctcggagcgtcagcgcattctttgcctgccacagagatttgcaaagagcaaacagctgacccggcgagaaatggaaatagaaaagtctttatttcagggagctgatcgtcactccttccttaaggctctttattaccaagatgaaccccaaaagaagaacaaaggtgatcccatggacaacctggaaagtttttaccaagagatgataatgaaaaaacgtcttgaagagtttcaacttatgagaggtgaaccctttgcttctcactcactgttctcagctacatcagtgggtgatagtggcacagctgagagcccatcattactccaggacaagggaaaacaggcagcacagggtaaaggcccccgtctccatgtggcaaatgttattgatttttcacctgagcagtgttggactgggcctaagaagctgacgcagccaatagcatttgtccccgaagatgaaatccagagtaatcgtttgtcagaggaagagaaccgaaaaattcctatgttttcttcatataatccaggggaaccaaacaaggtataggccaaaccaagtaaaacaacctgggttgatttcgcttttatttacctctacctaaagtaatacttttaaattagctttgattataccaaagaatcatgatataggcacagtgattgtgtttgtccttgaccttgactattcattctctgcatactatataagtagcatatgtcctataaggttcctggtatctttgataaggtcctgtagcaatccgttagtcgatggtcaaggactgtttgcctggattttaatcgacggcccagtgaatccgtag

SEQ ID NO: 243757 - DNA, 829 bp, Homo Sapiens
gctttggatgcggctatttgcaacttctttttagagccaatgtaattgcctgttaggagccagaagtttgcccagctgctttcttctggttgtacagatccattgtggtctgccttccaggctcattaatagtctaactacgtaataactgaagacctatctcttgtgaagattcattctcaatgtgttcacttggacagagccctgcctggcctaacgattagagggttagtctccatcctgctcagatatgactcctgggcaattcacttaacttctccatggctgcttcctgctgaataaatagggacaggcataatggataggaatgaatgaacttttaagatactgtctagctctaaaattggaagaacaaaaagttttagattagagtcatagccttaatagccctagttgtcatcctgggagacaggcaacagtagagatatttgagagcctaaagagaggtttggcctgtgggtttttaagtggttattgaattggtatcaggagatcctgaggctggtaggggaaggtaattctttctaagttacctctgtatttttcaagttttctataaggaatacacatacacccacatgcacacaccatagtttttatacaaacagcaataacaaaaccaaaaagatgcccctttttttgtagggataagaaatacatttgttttatacttctatgctatattttgctattcaaaatttagtgggcattacttaacattgtttctaattattttgtggctgctgtatgttttatgtgttggggcccattgtaatagccgcatccaaagcgggatcctcagagtcac

SEQ ID NO: 243758 - DNA, 638 bp, Homo Sapiens
cacagatagttttttgctcaattaaattctgttgcataaaatttgtttaaactttttcttttaacagatggcatcaatcagtggaatctgaagtatcagcttatagcattcctcaggaacatcatgtgaccatgtgagaaatccaccaggccattatgtccattactctcttgctgcaactgggatcattggtaagttctctgttagattctgaagctccatggatttgtgttttaagctttccaagtttctttgagcaaatgttttatctgaactggatttggaagtcacagtagaaactagactgggtccagggtctgatttgctctcataattaactggcttggatctatttggaggcttcagattgttgtcaaccaaacttgggtcggcctgcccagcacaggaaagccaaatactgtcattgggatttgcagcaagagaaagtgaggcatttattgcaaggcacctgccaaggagaatggggcaggtcatgcttcagatctgaaccctctcatggctgacatgtacgagtttttagaggtggggagacagaggttacaggcaaagtcatacatcaatacatggaggctatacattagtttggactaaatagccgcatcgagagatcctgtaga

SEQ ID NO: 243759 - DNA, 815 bp, Homo Sapiens
cagcaaatattaagcacactcagcaagcatattgttaataccgtttgctaggtactatgtgcgacaaaagagataaacgacatattctctacccttgagtataaaatcagattgggaaaatattttttataataatattttatggtaactgtaagagggtcatttatcctttttcttaaatgaaggtaagtgtaaaaacatttttaaagctttgatgttaggtgacaaaacatttcaattttgaactgggatcacttggcggatttataatactgacccctgaaaggcagtattttctctagagaatgtgatacccttctttgaaaaaagaagaatctgcattataatgcattgtttccaggtgagtgtaatttagcgaacctataagttttcatcaatcatcattgaattgctgtgtgttttatcttttagtttatgcaacagtgacatataggacactgtataaagtttacttttttcaaaccgtgaaatgttggcatagttaagatttgagacgcatactctgtgatgttcttgactcagggggtctttgcttagcagtgtgagggcttggcatataagtgcatttatgtttttctagtgaaagttcagtgtctcatctacagtccagtctcttcttggacacttttattaaaacaaaggtggtaatcattgtggattcagaaattccaggaatatgtctcaactatgttaggtttcatggtgtccttcattaaccaaatgtgtgaatcacctgaatttaacagttactagtcaaatagccgcatccaaggcgggatcctgctagagtcaca

SEQ ID NO: 243760 - DNA, 408 bp, Homo Sapiens
  misc_feature (104)..(112): n is a, c, g, or t
aggtaagtcttttagtatcttataataattttaattttgttggactgaaatttcttctaacagctcctgtgtgatactttgaagaacctggccttggaagattnnnnnnnnntgatgtggtagtaatattttaaaatacttttctctttgcagaaaacacaagtgacaaagttagtatccacattactggagaggaaatatggtgatttatatatgagtaaacagcatgaatgcctgatttttgcaaaattaagttaaattttgcaaaagagctgtaatttagaataaccacatttagtattttcagtaagcttggtttgcattgctatgttgtggtgaattgttttatagtaataaatagtagtgtttaacataagtcactaaaatgtatgtgggttctactatgac

SEQ ID NO: 243761 - DNA, 839 bp, Homo Sapiens
ccgtttaagatgcgggaccggaattgaccatttgccggcccgctggagtttacaagatctactacctggacaccacctacccttatcgagcctggcgcccaggtatccaagcccaccaatgggattctgtctcagcaccctacctgcctacagcagaagataacctggaatatgtacggactctgtatgattttcctgggaatgatgccgaagacctgcccttttaataagggtgagatcctagtgataatagagaagcttgaagaacagtggtggagtgcccggtacaaggatggccgggttgggatgattcctgtcccttatgtcgaaaagcttgtgagatcctcaccacacggaaagcatggaaataggaattccaacagttatgggatcccagaacctgctcatgcatacgctcaacctcagaccacaactcctctacctgcagtttccggttctcctggggcagcaatcacccctttgccatccacacagaatggacctgtctttgcgaaagcaatccagaaaagagtagcctgtgcttatgacaagactgccttggcattagaggttggtgacatcgtgaaagtcacaaggatgaatataaatggccagtgggaaggcgaagtgaacgggcgcaaagggcttttcccctttacgcacgtcaaaatctttgaccctcaaaacccagatgaaaacgagtgattgctgttgccctgtttcctgctgctttgttgttctgcctgtcctagtctcctttgaagtgggaaagcattttctctcataggcaagtcacactgcattgccgaagtccagctttctgcagactggcagtcgca

SEQ ID NO: 243762 - DNA, 424 bp, Homo Sapiens
gactctacaggatccggcacgtggtgtgatcaacctacccaaagactactgcagcactgacttggatctggacactgagtttgagatcctcttgccacgccgacggggcctgggcctctgtgctaccgctctcgtcagctactgtgattcgcctacacaatgaaattgtctacgccgtggaaaaactctccaaggaaaacaacagctattccgtggatgccgccgaggtcactgaactgcatgtcatcagttatgaagtggagcgggacctgactccactgattctctccaactgccagtaccaggtggaggagggcagagagaccgtgcaggagttcgatctggagaagattcagcggcagatcgtcagccgcttcctccagggcaagccccccaacgagcccgctacgagccaccccacgag

SEQ ID NO: 243763 - DNA, 1594 bp, Homo Sapiens
atctcctaccccacgagaaaggaacacagtaaactgaatgatccgtttagaagtttacaatgaagtttcttctaatactgctcctgcaggccactgcttctggagctcttcccctgaacagctctacaagcctggaaaaaaataatgtgctatttggtgaaagatacttagaaaaattttatggccttgagataaacaaacttccagtgacaaaaatgaaatatagtggaaacttaatgaaggaaaaaatccaagaaatgcagcacttcttgggtctgaaagtgaccgggcaactggacacatctaccctggagatgatgcacgcacctcgatgtggagtccccgatgtccatcatttcagggaaatgccaggggggcccgtatggaggaaacattatatcacctacagaatcaataattacacacctgacatgaaccgtgaggatgttgactacgcaatccggaaagctttccaagtatggagtaatgttacccccttgaaattcagcaagattaacacaggcatggctgacattttggtggtttttgcccgtggagctcatggagacttccatgcttttgatggcaaaggtggaatcctagcccatgcttttggacctggatctggcattggaggggatgcacatttcgatgaggacgaattctggactacacattcaggaggcacaaacttgttcctcactgctgttcacgagattggccattccttaggtcttggccattctagtgatccaaaggccgtaatgttccccacctacaaatatgttgacatcaacacatttcgcctctctgctgatgacatacgtggcattcagtccctgtatggagacccaaaagagaaccaacgcttgccaaatcctgacaattcagaaccagctctctgtgaccccaatttgagttttgatgctgtcactaccgtgggaaataagatctttttcttcaaagacaggttcttctggctgaaggtttctgagagaccaaagaccagtgttaatttaatttcttccttatggccaaccttgccatctggcattgaagctgcttatgaaattgaagccagaaatcaagtttttctttttaaagatgacaaatactggttaattagcaatttaagaccagagccaaattatcccaagagcatacattcttttggttttcctaactttgtgaaaaaaattgatgcagctgtttttaacccacgtttttataggacctacttctttgtagataaccagtattggaggtatgatgaaaggagacagatgatggaccctggttatccctaactgattacctagaacttcctaggaatcgggcctaaaattgatgcagtcttctactctaaaaacaaatactactatttcttccaaggatctaaccaatttgaatatgacttcctactccaacgtatcaccaaaacactgaaaagcaatagctggtttggttgttagacatggtgtaattaatggtttttgttagttcacttcagcttaataagtatttactcgcatatttgctatgtcctcagtgtaccacgatctctacgagatatgtatcatcccgatgtaagcgg

SEQ ID NO: 243764 - DNA, 372 bp, Homo Sapiens
cacctcatctgcctgcgtggatggccctgcaaaccattgagcgtaggatttgttgcattatgctagagcaccagggtcagggtgcaaggaagaggcttaagtatgttcatttttatcagaatgcaagagcgaaaattatgtcactttaagaaatagctactgtttgcaatgtcttattaaaaaacaagaacgaaagacaaatggaacaaagaagctgtgaccccagcaagatgtctaatatgtgaggaaatgagatgtccacctaaaattcatatgtgacaaaattatctcgaccttacataggaggagaatacttgaagcagtatgctgctgtggttagaagcagatgaggtggtgcagatcaggtggtgg

SEQ ID NO: 243765 - DNA, 389 bp, Homo Sapiens
cttccatggcaaggcagcccaacatattggtgcatcttcagacttcagctctgacactttctccaacatccactctaaatatgtcccaggaggagcctcctgagttaacctcaagccagaccattgcagaagaagagggaacaacagctgaaacacagacgttaaccttcacaccatctgagaccccaacatccttgttacctgtctcgttctctcacagaacccacagccagaagaaagagttctccatgaaacatgggcaagctctatttccgttcctgccaagactctccttcggttgactacacactgatggaacgactagtgtaccaccactacaagatatctagccagctagctacaaggatagtcctcgtgacatcttcctc

SEQ ID NO: 243766 - DNA, 366 bp, Homo Sapiens
cactaagattcactggtgtcagttctgaaaaccctagacctcttactgcaaccaagttgtttcctttcatgccgttccacttaaaaaggaatttgtaggttttttttagtcctccatagattctgctgaattcagaagaaattgcatgcaatccctagctttgtttcagaagttaatttgtgtaagtatgaaagccattatctttttcttgatgtagtttgagaatgaaataatcttttgtgtgtatgtatttgtaccaatacctctcataggtacaatgatatgcaggggtgtcccatcttttggcttccctgggccacaatggaaggattgtctgggcactacatcatacactcatgtagctga

SEQ ID NO: 243767 - DNA, 1018 bp, Homo Sapiens
ggcgggcagggcttccactggggccacttgtctgaagaatcttggcggcctggaagcaagcccccttggttcagtggaaacccggtgtcccggttttggttgggcttcccggcctggggaacattcaaggggctgtggccacaggccaagctcctcccagcccacagttgaagcactggagtgacgctggaaccccttggctccaccttctgtctggggagaagggaaagcccggggcttgagaagggcagagcccccccgagctcaggagggatcctgcggggtcttcttgttctggggtcccctggctgctgccatggaggcagcgacagctcaggaaagtgggccgcattggccaggcctcggctgcctcccatagcgaaaaaaattcacgggaacaacagaaacaaggggtgccctagttccctctctgcaggcgggtggggactgggtgagagcccaggggcctccaaacgcaggcggcagagacgtgagcagtgcttggctctgtctcctagacaacgggcatcaggaccaggacaggacatgagcgtgacagggagagcggggaggtgcctaggccgggagtgggaacccagcaccggccagaaggggctgccgggcggtacagaggccaatgcattggaggctgagggtagctgcgacctctggggcaggggacactgctgtgtggagcccagggtgggcgcccacatgggtgcctggccgcggtgtgtctgcctttcttgtctctgtttctagaagactgaaggacagtgctttgtctgcatgaaccagaactcagcctccaaaactggacacagaaatagccaagaggccacactgcccagaggccaggcctggtgagctaggggagatgccggcaccccccaaccctggggctgttccctggctcaggatggtgtctcggggctaggattatggtcaggagtccatcggggcctcaagcacctcctgggaggaatcacccaccttgcccagatcccccaccccctcc

SEQ ID NO: 243768 - DNA, 806 bp, Homo Sapiens
agcacgtctgagaatcgtggaaaaggtggagcgattagaatgaatcaaatggctatagcatgtggatctcgagctcatttagaaaaagaatcaattgctcagcgttcttacttccgtactcttctcatgtatgggttccactttctggtgtggttcctttgtgtcaaaggaatcagggacacacagtgtgggttcaaattatttactcgagaagcagcttcacggacgttttcatctctacacgttgaacgatgggcatttgatgtagaactactgtacatagcacagttctttaaaattccaatagcagaaattgctgtcaactggacagaaattgaaggttctaaattagttccattctggagctggctacaaatgggtaaagacctactttttatacgacttcgatatttgactggtgcctggaggcttgagcaaactcggaaaatgaattaggttgtttgcagtcttcagttgtgttcttatgcttcagtgtcacatttcatttcatttgaaactaaaattttaagtaaagctgaaataaacttcttgtcattgaaaagacaaacacgaaagaaagaccacaagaaggagcaaccgccaacacaaacacaaccggccaccgcaaagccacacaacgaaagcaacaaaaaccctttgggggccgccctcggcccttcaaaaatttttcaaaaccatttcttttgggcggggcgggccccggtaggataagggaaacgtggcccaaagtttgttttcctaaggaaaaacccggggacaagaaaaagggcttggaaattcccccc

SEQ ID NO: 243769 - DNA, 331 bp, Homo Sapiens
tcggggaaatcaacacttggcctttctgtcttgttcctcactctgtactctacccaggtcttcattcttaaacctttcatatcttttgattcttgcctaagtagaggtttatgggagctgttgggctggagctttcaaagcttgcagtaggctgatcttacttctctacctgtattttacctgttctccctaggtgatgaaactaggagggcccatggctccttctgctacatggggcacaaaacatgcttcagaacgttccgctttgatgctattattagaattttccaaacaccgcttgtttgtagcttcacagggacttggagagagg

SEQ ID NO: 243770 - DNA, 508 bp, Homo Sapiens
tagtactggaagtcctagccagggcaatcaggcaaatgaaagaaataaagggaacccaagttggaaaagacgatgtcaaactctctctgccaatgataaatgaattcagtaaagtctcaatttaccaaatcagtttacacaaatcagtagcactgctatacacaaaaaacgaccaagctgagaatcaaatcaagacctcaacccattttacagtaactacaaaaaataaaatacctagaaatacacttaaccaaagagatgaaagatctctactaggagatatatatatctctgtcccaaaatccaggctcagcagaaggatcaaagccaacacttcaccaaagaggaacacacccctaggaaagccaacatttgacttttgacctgagctgctaagataaactgggccaaatttctatttattaggaattcctatttggaagcccagtcgtgcttgtaggctctggatctgaggtgctatgaatcagacagagccagtgacccgatt

SEQ ID NO: 243771 - DNA, 343 bp, Homo Sapiens
aatgtatgtttctcaaatagaatcactgaaaatgggaggtaagcgacggcaaggctgtggggaaaccgcgccccctgtactgctcatggggatgtaaagagcagccacctcggaaacccatttggaggttcctctgactgttactcagagtcaccccatgacctcaaccacctaaaattaggggtttttagcagggaagaaatgcatctgtgtgtgagaaaatgggaattagggagggtaaggaagagctggtcaatgggagcaggtggccagctgggcaatcatgaagggtgaggtgtctctcatctcattgaccagatgctgtgatctgtcgattctcaga

SEQ ID NO: 243772 - DNA, 572 bp, Homo Sapiens
gaggcttaagtttaccttgcgtttatatatgatttgccacatctttgcagaagagggatcctcatgctggggttaatagtatatgtcagtgtatcactgttcgcttatttagctttgtatatataaatttataggcaaagcaatggaatatgtgcaggttctaccgtaagagcagcataaggaggcgggtatcccaagtgaagttgtttgatatggtctacttcttttttggaatttcctgacccttaattaaagaattggatttgcaagtttgaaaactggaaaagccagagatgggatgccataatagtatacagcccttgtgttggatgtataccccatcccagatttgagtgtgtgttgattatttttttgtcttccacttttctattatgtgtaaatcacttttatttctgcagacattttcctctcagataggatgacattttgttttgtattatatttgtctttcctcatgaatgcactggataatatgttaaatgctctatgttaagatctcttgatatctggtggttttgtggtaatttgggggtgcggtaaggcggagatgt

SEQ ID NO: 243773 - DNA, 447 bp, Homo Sapiens
tggttcagtcggtccatgaggtgtggaccctcgaggtgtgcagcagcacactgcgtccatccggacttctcggactcgcggcggtttggacactcgggcgtgtgcatgcacacgcggaaggtccataccagtgagaagcatcagcaccgggaacttgtctgagaatcgcagtgttgtcatccccccacccgactacttggaatgcttgtccatgggggcagctgccgacaggagagcagattcggccaggacgacatccacctttaaggccccagcgtccatgcccgagaccgcggctcctaacgatgccaacgggactgcaaaggccgccttttctcagcggagaaaacccctttgccactgtgaaactccgcccgactgtgacgaatgatcgctcggcacccatcattcgatgagaggacagccaaggactctcccgggcctctc

SEQ ID NO: 243774 - DNA, 660 bp, Homo Sapiens
acatgtagtgacatgtggacattcagcacaggtgagcttctcaagtgagagccatgtgtccccaaaagaaaggagggtttatccataagactttggtctccctttcaacactgtggtgggaagtactctgttaccaccccaagttggcatagctcgattactttaagttctccaagtcacgaacagcacatagaaaatgcagcaaactcaggtcaagacaatagagagatatgctgagaacttaattactcaagccttaatcaggcaccagatgccaagaaaccttcactctcttacttacaactacaatccactaatttatctgtagaattgttgtagttggtactcttcacattcacttactccttagcaaagattgctcttgaatggaaaggttgcagaaagagccaaagccaatttggaagaagtgagaaacttacaggtttgaggaatggtgaagtcagcgaaggatctagcctccttagatgatgaacaggcaaagtcagagaaggaaccacagtgagagaattggcagatgcccctaatataatcacacaactctagacactacacacagacactactaaatattcatgctattatacccattcaagtaactggatatttaattcattctatgtaaggcggagatggggtccg

SEQ ID NO: 243775 - DNA, 593 bp, Homo Sapiens
gtgtgtcactccccacgtgtggctctgcccagcatccagctgtctacacccagatctgcaaatacatgtcctggatcaataaagtcatacgctccaactgatccagatgctacgctccagctgatccagatgttatgctcctgctgatccagatgcccagaggctccatcgtccatcctcttcctccccagtcggctgaactctccccttgtctgcactgttcaaacctctgccgccctccacacctctaaacatctcccctctcacctcattcccccacctatccccattctctgcctgtactgaagctgaaatgcaggaagtggtggcaaaggtttattccagagaagccaggaagccggtcatcacccagcctctgagagcagttactggggtcacccaacctgacttcctctgccactccctgctgtgtgactttgggcaagccaagtgccctctctgaacctcagtttcctcatctgcaaaatgggaacaatgacgtgcctacctcttagacatgttgtgaggagactatgatataacatgtgtatgtaaatcttcatggtgattgtcatgtaagcggagatgtcacg

SEQ ID NO: 243776 - DNA, 806 bp, Homo Sapiens
tatacatgaaacctaaaccctaacctgtgctattcaccttggcacacagccagacccacagcctacaaacaccacaccatactgcaatgctggggaccaaagccaggctctgtgggcccaggtcagccagcagctccctcgggaaccccaggcacacggagttgcttcccctcttgagggtttgatgacgtcatcaaaccctacccaaataaagtataggcgatagaaattgaaacctggcgcaatagatatagtaccgcaagggtttgatgactcatcaaaccctctccaccttactaccagacaaccttagccaaaccatttacccaaataaagtataggcgatagaaattgaaacctggcgcaatagatatagtaccgcaagggaaagatgaaaaattataaccaagcataatatagcaaggactaacccctataccttctgcataatgaattaactagaaataactttgcaaggagagccaaagctaagacccccgaaaccagacgagctaccttagaacagctaaaagagcacacccgtctatgtagcagaatagtgggaagatttataggtagaggcgacgaacctaccgagcctggtgatagctggttgtcctcgatagaatcttagttcaactttcaatttgcccacagaaccctctaaatccccttgtaaatttaactgttagtccaaagaggaacagctctttggacactaggaaaaaaccttgtagagagagtaaaaaatttaacacccatagtaggcctaaaagcagccaccaattaagaaagcgttcaagctc

SEQ ID NO: 243777 - DNA, 542 bp, Homo Sapiens
acccagtgagcagacgatgatgtgtgagactgatgagacaattgtcgctacaaccacaacctagatcaggctgacacagacaacaatggggagggagacgcctgtgctgcagacattgatggagacggtaaggtgctgcctgatcagagggcccgcgggagacagggacatgcacagctttccaaacgtacttctgtctagtcctggctattagtatgcactttggtggaaacatccaaggctggagagcccagctcttatttgtcccttgttctcttcaggtatcctcaatgaacgggacaactgccagtacgtctactatgtggaccagagagacactgatgtggatggggttggagatcagtggatccgtgtccagaacggtcgtgacacagagagggaggacggagaggcaagcaggtggtgcctcggaggaagaactagtggggctcaggcctgggccccccgagaagccactcccatcggatttcaagagcactcctccattgggaaggccctgccatgtctgcgctgggtgcgag

SEQ ID NO: 243778 - DNA, 754 bp, Homo Sapiens
gaaattgtatcgctaactccaagcagaagttgctcagatttcccaactcctctcctggactcagaagacagaagagagactgggttattcctcccatcgagctgcccagaaaatgaaaaaggcccatttcctaaaaacctggttcagatcaaatccaacaaagacaaagaaggcaaggttttctacagcatcactggccaaggagctgacacaccccctgttggtgtctttattattgaaagagaaacaggatggctgaaggtgacagagcctctggatagagaacgcattgccacatacactctcttctctcacgctgtgtcatccaacgggaatgcagttgaggatccaatggagattttgatcacggtaaccgatcagaatgacaacaagcccgaattcacccaggaggtctttaaggggtctgtcatggaaggtgctcttccaggaacctctgtgatggaggtcacagccacagacgcggacgatgatgtgaacacctacaatgccgccatcgcttacaccatcctcagccaagatcctgagctccctgacaaaaatatgttcaccattaacaggaacacaggagtcatcagtgtggtcaccactgggctggaccgagagagtttccctacgataccctggtggttcaagctgctgaccttaaggagggtaagcaccagcaacagcggtcagtcacgacacacgattcctccgatcttcaatccccacgtacagggtcaggtgcctgaga

SEQ ID NO: 243779 - DNA, 296 bp, Homo Sapiens
gaacattagggacaacctgcccccaggctgctacaatacccaggctcttgagcaacagtgaagctgccataaagatttctcaactgaggttcttgggatacagatctcagggctcgggagccatgtcatgtgagtgggtgggatggggacatttgaacatgtttaatgggtatgctcgggtcaactgacctgaccccattcctgattccatggcccaggtggttgtcttaattgcaccatactccttgcttcctgatgctgggcaatgaggcagatagcactgggtgtgagaatga

SEQ ID NO: 243780 - DNA, 1032 bp, Homo Sapiens
ccggtgtgtgggttaagatttggagcctgtggcatgtgtgagaaaaaagtctgaaatgctccagcttttcccagcgtatttaaaaggagaggatctgtttggcctgaccgtctctgcagtggcacgcatagcggaatcacttcctggggttgaggcatgtgaaaattataccttccgatacggccgaaatcctctcatggaacttcctcttgccgttaaccccacaggttgtgcccgttctgaacctaaaatgagtgcccatgtcaagaggcctcacaccttaaacagcaccagcacctcaaagtcatttcagagcacagtcactggagaactgaacgcaccttatagtaaacagtttgttcactccaagtcatcgcagtaccggaagatgaaaactgaatggaaatccaatgtgtatctggcacggtctcggattcaggggctgggcctgtatgctgctcgagacattgagaaacacaccatggtcattgagtacatcgggactatcattcgaaacgaagtagccaacaggaaagagaagctttatgagtctcagaaccgtggtgtgtacatgttccgcatggatgacgaccatgtgattgacgcgacgctcactggagggcccgcataggtatatcaaccattcgtgtgcaccttattgtgtggtctgaagtggtgacttttgagagaggacacgatgattatcatcagctccagtcggagatatccagaataggagaagagctctgctatgactataagtttgactttgaagatgaccagcacaagattccgtgtcactgtggagctgtgaactgccggaagtggatgaactgaaatgcattccttgctagctcagcgggcggcttgtccctaggaagaggcgattcaacacaccattggaattttgcagacagaaagagatttttgttttctgttttatgactttttgaaaaagcttctgggagttctgatttcctcagtcctttaggttaaagcagcgccaggaggaagctgatgtcgattcttgat

SEQ ID NO: 243781 - DNA, 222 bp, Homo Sapiens
aatctatgttgccctagcacctaaagatctgcaccccaaaccaatgtcaccataaagagggcacgaagaagagtgggtgtgatcccaacggggttttgtaactgaagaagcccagtgtgagcttctcatcttttcatatacctctaacccccggtactcgttgaatcattgaggtatctcaattgagattgccgagggtaccgagctgattgtatcatgtct

SEQ ID NO: 243782 - DNA, 397 bp, Homo Sapiens
cgactctagagtatcccaaatctctcattgcgggacaaacactggtgcagaagaagccgaccatgtatcctgagtggaagtcgacgttcgatgcccacatctatgaggggcgcgtcatccagattgtgctaatgcgggcagcagaggagccagtgtctgaggtgaccgtgggtgtgtcggtgctggccgagcgctgcaagaagaacaatggcaaggctgagttctggctggacctgcagcctcaggccaaggtgttgatgtctgttcagtatttcctggaggacgtggatttgcaaacagtctatgcgcagtgaggacgaggccaagttcccgacgatgaaccgccgcggagccatcaaacaggccaaaatccactacatcttcagaatccaaatca

SEQ ID NO: 243783 - DNA, 157 bp, Homo Sapiens
cttattataaagtgaaagaaggaagatacgtagaatatccatggaatggttccatcctgccaacgcgatatgaacatctggtccagagcttcaagaagataacaaatgtatttcatctctaggcctctgtcaacttttcaaattttctaccactgtt

SEQ ID NO: 243784 - DNA, 1269 bp, Homo Sapiens
  misc_feature (721)..(721): n is a, c, g, or t
  misc_feature (726)..(823): n is a, c, g, or t
  misc_feature (958)..(967): n is a, c, g, or t
  misc_feature (1177)..(1222): n is a, c, g, or t
ctggggtgtattgatacctgccagtttcttcatttctgaattgagtttcttttcttgatgttggtttccttcatatcacctcaaggtttagatttgtgaaggaataagcatgatggaaataatagtcttgaaaggagatatgttgtatataatcaggaggaagaggaaggaaggacttacccattttgatattttgctgtaggtggccagttttgtttctcatagggaaatctgacccacctgtcatgttggctcctaaggaactgctgttgtaagcggctcatcaagagttgaacttcacgtagccttgttgggaatatggaaaaggaagaaagccacaggactgcccattcagtcttgggaagattgggatgattctgcacaagcaaaaatgactgaagtttatgtatagacacacctctaccaatccatcttcagctgactgaatgttgtatgatagcccttctccaaagcagaggtagaatgttcaggtttcaccatggattttctacttatttcgtttttggaatcaccttacagattccaggtcccttttgtatatattctttattcttttgcttttttaaaaaataattttgtttcatatttaaagcacttgtattagtcaatgtttcgtgttccgcattatttgaaccatttgcccttacagaaagagaaatacttgtttgtgttttaaataaaactgatgtaggaaagtccncaccnnnnnnnnnnnnnnnnnnnnnnnnnnnnnnnnnnnnnnnnnnnnnnnnnnnnnnnnnnnnnnnnnnnnnnnnnnnnnnnnnnnnnnnnnnnnnnnnnncctttgcggcccccccggcccttaaaaaatttttcaaaccttttctttggggcggcggccccatagggaaaggaaactgggcataactggttcccaagaaacccggggtcagaaaaaggggctggattctccccnnnnnnnnnnccccggggggcaacgaagcttttgaaaaaacccaaaagggaattccggggggctttaccggggtttaaccaccgggattcccagccggatctcttttattaattttaccccccgcccttgcccttctcttccaacaaatgggggtgaaaataattaaaacccttctcgccccaaatggcgaaacccctcccaaaagcgcggatgtgtaannnnnnnnnnnnnnnnnnnnnnnnnnnnnnnnnnnnnnnnnnnnnntttggcatatattttatctcgccccctgggggaaaaaaccggggcgg

SEQ ID NO: 243785 - DNA, 699 bp, Homo Sapiens
gaccctggacttcgtacaagagggaaaaaatgagcttatcaagctgccaatatttatctatgggctgtagcagtacactgaattgtactgtgccatggatattgagatgctctgggggtgtattgtatacctgccagttttcttcatttctgaattgagttttcttttcttgatgttggtttccttcatatcacctcaaggtttagatttgtgaaggaataagcatgatggaaataatagtcttgaaaggagatatgttgtatataatcaggaggaagaggaaggaaggacttacccattttgatattttgctgtaggtggccagttttgtttctcatagggaaatctgacccacctgtcatgttggctcctaaggaactgctgttgtaagcggctcatcaagagttgaacttcacgtagccttgttgggaatatggaaaaggaagaaagccacaggactgcccattcagtcttgggaagattgggatgattctgcacaagcaaaaatgactgaagtttatgtatagacacacctctaccaatccatcttcagctgactgaatgttgtatgatagcccttctccaaagcagaggtagaatgttcaggtttcaccatggattttctacttatttcgttttgggaatcaggttacagattccaggtcccttttgtttatattctttattctttggcttttt

SEQ ID NO: 243786 - DNA, 710 bp, Homo Sapiens
taaccattgcatttttggccacagtatggatctaacatgctttaggactgcactagttctaaagaaaacaatcaaccagaaccattgcacttatttttgtcaagtgcaactcctgtacattcaaaggcctggcatcgcattcccaaagatgatgaattgtcagaagaacaaataagtcattaccttatggaatttggaggcacccccaagcattttgctgaagccaaggaatttgtgaaacaatgtagtcccatcataagggcagatctgaacattgttagaagttgcacctctaacgtaccatctaaggctgttctttcctgtgacttgacatgttttgttggatctgaagacatagcaaaggacatggaagcctggaaagatgtaaccagtggaaatgctaaaatttaccagcttccagggggtcacttttatcttctggatcctgcgaacgagaaattaatcaagaactacataatcaagtgtctagaagtatcatcgatatccaatttttagatattttccctttcacttttaaaataatcaaagtaatatcatactcttctcagttattcagatatagctcagttttattcagattggaaattacacattttctactgtcagggagattcgttacataaatatatttacgtatctggggacaagtcaagccagtaaagatacttctgcagctctagtcgagtcag

SEQ ID NO: 243787 - DNA, 814 bp, Homo Sapiens
ggacacatttctccactactaagtctgtagtcgtttatcatcaatgaagaaccaaaaacctccacagcaaaggaaagtcaaagcatatgcttattgtacactcctcagattttatttttaaaaggagttttcattttccttatggaacctcaggattttacaagcaatgctctcctcagtttcaccagtactgtgtccagtactatattgctatattcacagtaaaacggactttaatttctgagtgatcagtctatgttttaagtttctgatgaaactaacatacaccttagtcaaaaaccacaacaatccctcaatctgtttgctgtgttattgttcttgtgtgtttttctgaggcttgggtaatgaaagtacttccccactccattgtaatctgcgtttgcatctaaagtaattcattaatgtacaggagtagatgaggcctggcacacatagcagaaggtaatggttctataggtgtatcttctgtaatgcactttgggctagagaaatagaaaaatcacacgtaacaaaaacaaataacttttttgagcacacgggtgtcgcgtgagtaggaccggcatacatgtagctatcatccttccccattttaacatgctcagctgctgctgcattctggggatttagcttcatcccaataatctacaactgacacttgcatctttatttaaaaacaagtggtcttgatagcaaagatgttggctaatcatgtatatattggcattagatgttttgtgtcctttcaaaattcagcattatccttattagagtgtaatatacactctgtatgacg

SEQ ID NO: 243788 - DNA, 279 bp, Homo Sapiens
ggtgggattgaagatcggaggattatcgttggtgtcagtgactgtgatcacagctgttgctgttgtgcttaacccctcacaaggctgaggcaggagaatcacttgagtccaggagtttgaggctacagtgagctatgactggtaccacagcactgcagcctgggtgaaacagtgagattccagctttacaaaaataggtgagttcatacctggcttgaagaaaggggaacagggatgagaaccagcaggaggcaatcctgaatgcgaccaaagagtcag

SEQ ID NO: 243789 - DNA, 528 bp, Homo Sapiens
tactacaacagctgctaaacataaccaagaaatttcagtgactaactgggccaaatgagagatgtaataaattttctattttcctacggaacttaaataatgttttaaattcaccaagcaaggaggtaagttcatctgaccattttccttacaatctaatgtagtaatcattaaactgtcaacggacatactgctgcaatatttgatgcagtaatttgaaatagcattttagtaaaaatcacatccagatacatttcctctccaaagaaaagcagctttaacagaagcctttacagctttaataaaattattggctcgctctaattccatttcaggagggttgtgaggaaaccataaatatatagaattgaagcagaggtactggtttaagtttaattccagaaagtattttcaaattatcaatagcctggtttgcattgtaaatagtaaatgtgctaatgccatgcttatttagaaatcattttaaactgcatttattgataactaaattagaactcaaggggatcc

SEQ ID NO: 243790 - DNA, 710 bp, Homo Sapiens
  misc_feature (70)..(79): n is a, c, g, or t
ttcgggcaactttggaggaaaaggcttcattttatgtgttgaatctgaaattctcaccgaagacaaagtnnnnnnnnnngtctctcagatttacccatctcactccttaaaaagaagagcttgattccttggcaacaaggaacaaatgttcctcagaatcccaagttatctcccacttcccagttctgaagttacatgccaggtagatctagttagatgccagtactattgtttctcaccatagcatcatagttcagaatgagactggctgggttcaaatcccgactccctcactttctagctgtgggccctgttattagctcactaaactcttggagaagaagtgctaaagatagaagcctgggtctctgaatgactgtgtggagccaagaccccaccttcccacccaatatatgcaaatgtaactggagtgccttaagtccttcagatgtggggtagtttgcactgtatgtagctagcatactcctgcctcggtttccctaacatagaactgttttgagcatcaaatgacttaagagtgatgggaaagcttagttgctccccactccaactccagatattgactctaataagggtagtcccctaatatctgtgacttttatcatgagccggatatagctatgactccccaggaattctcccgtgaactcttcttgaatatttttcagcctgagccctgcttgtatgat

SEQ ID NO: 243791 - DNA, 688 bp, Homo Sapiens
  misc_feature (191)..(201): n is a, c, g, or t
  misc_feature (384)..(433): n is a, c, g, or t
tgtgatacgtacaagagctgaacatggtggaaggtcgatcagcatttgggggttgatatttgctaatgaaaagagccaagcaccaggcaagcatagtctcacgcacatttatttcaggggcaaacttttggagggaaaaggctctcatttttatgtgttgaatctgaaaattctcacctgaagacaaagtnnnnnnnnnnngtctctcagatttacccatctcactccttaaaaagaagagcttgattccttggcaacaaggaacaaatgttcctcagaatcccaagttatctcccacttcccagttctgaagttacatgccaggtagatctagttagatgccagtactattgtttctcaccatagcatcatagttcagaatgnnnnnnnnnnnnnnnnnnnnnnnnnnnnnnnnnnnnnnnnnnnnnnnnnnggttattagctcactaaactcttggagaagaagtgctaaagatagaagcctgggtctctgaatgactgtgtggagccaagaccccaccttcccacccaatatatgaaaatgtaactggagtgccttaagtccttcagatgtggggtagtttgcactgtatgtagctagcatactcctgcctcggtttccctaacatagaactgttttgagcatcaaatgacttaagagtgatgggaaagcttagttgcccccatc

SEQ ID NO: 243792 - DNA, 944 bp, Homo Sapiens
  misc_feature (448)..(756): n is a, c, g, or t
gtctacaagagatgactgtcattctctgataagaggaaggagttacacctggtttgtgaacatatttatcttaataaatcacaggtagttgttagagctcacccttttctttcatccaggagaatccagaagtgtcaatgtttctctggcaggagcccggcctgcaggttgggtgagaaactcacgaataggactctgacatgtgtgttcaactctcccttggaatgtctcacttttatttcagcacaattcccatgttcacctctgaggtgtaaggtggagtgggtagcctcctgcttggtgtgctaataaccaaaacagattaccaatcaccttccctttgttttccttggcatgctgaaaaaggcatacaaaaatactaatatgagcatcagagaaataaataaactcagaaaatacaagaagcagctgggcgcggtggctcatnnnnnnnnnnnnnnnnnnnnnnnnnnnnnnnnnnnnnnnnnnnnnnnnnnnnnnnnnnnnnnnnnnnnnnnnnnnnnnnnnnnnnnnnnnnnnnnnnnnnnnnnnnnnnnnnnnnnnnnnnnnnnnnnnnnnnnnnnnnnnnnnnnnnnnnnnnnnnnnnnnnnnnnnnnnnnnnnnnnnnnnnnnnnnnnnnnnnnnnnnnnnnnnnnnnnnnnnnnnnnnnnnnnnnnnnnnnnnnnnnnnnnnnnnnnnnnnnnnnnnnnnnnnnnnnnnnnnnnnnnnnnnnnnnnnnnnnnnnnnnnnnnnnnncttagaacttgggtaatttttaaggtatagattttagattttagcaaaaatgtcttgcttctaggactggttttatcttatgccctttcttgagaattctaatgtctagtctcagaggacagtgaacactcacatatattagtcagacctaactattagcatgtctctcgcagctcttgtcgagtcat

SEQ ID NO: 243793 - DNA, 438 bp, Homo Sapiens
  misc_feature (111)..(194): n is a, c, g, or t
tttcacacgatgatcaacgatatatgaaagcgtcctgactatatctgtgatgaaattgccaaaatggtgagcaccagatgacttgaagtaagcaccgtgccgttggataannnnnnnnnnnnnnnnnnnnnnnnnnnnnnnnnnnnnnnnnnnnnnnnnnnnnnnnnnnnnnnnnnnnnnnnnnnnnnnnnnnntggtgtatgcctgtaatgacattgcaatgaaatacaaagactcacattatttacttttcctatacggtccactttagtttttcaatcctttctgtatacactaaactctgccattatcagatggttcagcctttctgaatctaaactcacactccgttgtacttctccttcacctgatttgcctctctcgatctcacctcctcacaagtttaatcagcttccactagagaagtgcttttcttga

SEQ ID NO: 243794 - DNA, 400 bp, Homo Sapiens
ggcgagcagttctgaagtgaaaacagaaggtctatgcccggacagtgccacagaggaggaagacactgtggaactcactgagtttggtatgcagaatgttgaaattcctcatcttcctcaagattttgaagttgcaaaatataacaccttggagaaagtgggaatggagggaggccaggaagctgtggtggtggagcttcagtgttcgcgggactccagggactgtcctttcctgatatcctcacacttcctcctggatgatggcataggagaactagaagacagtttgctatgaaagaaaaccgtctgaagactgcacgtgaatatctcttgagaaacttacgattgatagaacatgaagagacaacggagtttctagctaagagaacatttcacactc

SEQ ID NO: 243795 - DNA, 816 bp, Homo Sapiens
cctaaattgtggcacaaacaacctcctgtcagagccagcctcctgccaggaagaggggtaggagactagaggccgtgtgtgcagccttgccctgaaggctagggtgacaatttggaggctgtccaaacatcctggcctctagagctggcctgtctatttgaaatgccggctctgatgctaatcggcgaccctcaggcaagttacttaaccttacatgcctcagttttctcatctggaaaatgagaaccctaggtttagggttgttagaaaagttaaatgagttaagacaagtgcctgggacacagtagcctcttgtgtgtgtttatcattatgtcctcagcaggtcgtagaagcagcttctcaggtgtgaggctggcgcgattatctggagtgggttgggttttctaggatggaccccctgctgcattttcctcattcatccaccagggcttaatggggaatcaaggaatccatgtgtaactgtataataactgtagccacactccaatgaccacctactagttgtccctggcactgcttatacatatgtccatcaaatcaatcctatgaagtagatactgtcttcattttatagatcagagacaacttggggttcagagaggctgatgtgattttccccgggtcacagagagtcccagattcaggcacaactcttgtattccaagacacaaccactacatgtccaaaggctgcccagagccaccgggcacggcaaattgtgacatatccctaaagaggctgagcacctggtcaggatctgatggctgacagtgtgtccagatgcagagctggagt

SEQ ID NO: 243796 - DNA, 1183 bp, Homo Sapiens
tagcagatcactgacatgtacattattccacttcttcagtaattctgttcacactgtgattttctttattgtgttggtgcactatttatattatcattataaactcaggatattcagaccaacaggattgtgttgctgctgaaagtctgagcagtgtattaccgtccccagcccccctcccacatggtcacatgttcacttgcttttccttccatctgttggtatttgtagagctgagagcatctctggacacatggaagggagccagggattcctgtgatacagattttgaaccagcagagtacttaggttttcttcatgtcctaagggtttgatccagaacccctggtgcttcccctgtagaatactgtacttcatttaacagaatgattgatttttctttcaatcagcatgttcaccaaaaaatagaaaagtacttctaaggttaaatatagtatttaaaagttagttggacatttgatcagggaattttctacacacattaggcaaatgtatgcttttcatcctctgggcttacctctctcctctgcaatcctggaagcattgtgcatagttctttcattgtaagccgctatttaaattcccacaatgcaaaactgttagaccagtaattgtgctactgaaattgtcacaaaacgttattccttgatttggtttttaaattttgcttttgtgtgtgtgtctttaaacaggtaatgtgtatttaagtgttgtctaaacagttgatttttactttagaaaagatcatcttcaactgtttattgacttctgagttatatagttcatgccctgccaaggcattgttcgactccatgatactaaaacataatgaaagaaacaaactccagtatggagaagagaaagtttaattatttggttccatctagaaaagcaacaacttaaaggaatccttcactaggattgtcttatcacctttattagataaatcatgaagtgtccctgtgaaattgaagtgaaactatctctgtaggacttaagagaatagctaaaaggtgtgacttgccttattgaactgatactggcatatctgactgtaagcagtaggttgaagatatcattttatgaatgtggagaattctacattgaaacagagaatatcctgggaatgaagattatcaaatgtagctgctcgttacttggc

SEQ ID NO: 243797 - DNA, 457 bp, Homo Sapiens
ttgatatgagttggagtgaagacctgtaaggcaggcccattcagagctatggtgcttgctggtgcctgccaccttcaagttctggacctgggcatgacatcctttcttttaatgatgccatggcaacttagagattgcatttttattaaagcatttcctaccagcaaagcaaatgttgggaaagtatttactttttcggtttcaaagtgatagaaaagtgtggcttgggcattgaaagaggtaaaattctctagatttattagtcctaattcaatcctacttttcgaacaccaaaaatgatgcgcatcaatgtattttatcttattttctcaatctcctctctctttcctccacccataataagagaatgttcctactcacacttcagctgggtcacatccatccctccattcatccttcacatccatctttccatccattacttacaactacttca

SEQ ID NO: 243798 - DNA, 1036 bp, Homo Sapiens
ggtgcttcacactgtcttccccgtggttccaagactgctgaaccggatgtttgaccgaattttcggacaagcaaacaccacgctgaagcgatggctcttggactttgcctccaagaggaaagaagcagagcttcgcagcggcatcatcagaaacaacagcctgtgggaccggctgatcttccacaaagtacagtcgagcctgggcggaagagtccggctgatggtgacaggagccgccccggtgtctgccactgtgctgacgttcctcagagcagccctgggctgtcagttttatgaaggatacggacagacagagtgcactgccgggtgctgcctaaccatgcctggagactggaccgcaggccatgttggggcccggatgccgtgcaatttgataaaacttgttgatgtggaagaaatgaattacatggctgccgagggcgagggcgaggtgtgtgtgaaagggccaaatgtatttcagggctacttgaaggacccagcgaaaacagcagaagctttggacaaagacggctggttacacacaggggacattggaaaatggttaccaaatggcaccttgaaaattatcgaccggaaaaagcacatatttaagctggcacaaggagaatacatagcccctgaaaagattgaaaatatctacatgcgaagtgagcctgttgctcaggtgtttgtccacggagaaagcctgcaggcatttctcattgcaattgtggtaccagatgttgagacattatgttcctgggcccaaaagagaggatttgaagggtcgtttgaggaactgtgcagaaataaggatgtcaaaaaagctatcctcgaagatatggtgagacttgggaaggattctggtctgaaaccatttgaacaggtcaaaggcatcacattgcaccctgaattattttctatcgacaatggccttctgactccaaccatgaaggcgaaaaggccagagctgcggaactatttcaggtcgcagatagatgacctctattccactcttcatggatttacgtgttcc

SEQ ID NO: 243799 - DNA, 826 bp, Homo Sapiens
  misc_feature (161)..(224): n is a, c, g, or t
  misc_feature (234)..(341): n is a, c, g, or t
  misc_feature (613)..(663): n is a, c, g, or t
ggatggaagaacaaaggaaggcagcttgtgcggagaaactgaaacgattggatgagagcttggcatcctggaaaaacaaccatctccagaggaaattagggaaagggagcgagaaaaagaacgggagcgtgagaaagaacttgaaaaagaacaagaacagnnnnnnnnnnnnnnnnnnnnnnnnnnnnnnnnnnnnnnnnnnnnnnnnnnnnnnnnnnnnnnnnaaggagcagnnnnnnnnnnnnnnnnnnnnnnnnnnnnnnnnnnnnnnnnnnnnnnnnnnnnnnnnnnnnnnnnnnnnnnnnnnnnnnnnnnnnnnnnnnnnnnnnnnnnnnnnnnnngaatgtgagctggagaaggaaagggtaaaattagaggacgaaaattgaacccagagaacctaatttagagcccatggtagaaaaacaagaaagtgaaaacagctgtaataaagaggaggaacccgttttcactagacaagacagcaatcgcagtgaaaaggaagccacaccagtggtgcatgaaaccgaaccagaatcagggtctcaacctcggccggctgtattatctggctatttcaaacagtttcagaagtctttacctccacgattcnnnnnnnnnnnnnnnnnnnnnnnnnnnnnnnnnnnnnnnnnnnnnnnnnnncaaggtgtacttccacagactgttccttcacaaccgtccagtagtactgtccctcctccaccacacagacctctttatcagcctatgcagcctcatcctcagcatttggcttctatgggtttggatccaaggtggtatcaacggtacggagctcgattgtatc

SEQ ID NO: 243800 - DNA, 782 bp, Homo Sapiens
gaagcaatttttatatactttttattatttagcaatacatgtttatcatagaaatttaagaacctaagtaatacaaagaaagtaaggattacctttaattaagaacctaagtaatacaaagaaagtaaggattacctttaatcaataaacaaagataaacttttggagggagcatataccattccagtcactaagtaaggttttaatattcagattccagaattctgatcaatcaatggctatgtttcacacttctttaaattaaaaaattttctatctttacatattttagtgactgaattaccatggcgtaattgagagtttggatttattatggtacattccgatttctatttaatacttaaggtacctgattaaaattttagcctatttggttaaatactaacaatacaggttgctattactcttgtcttactaccaattagacatttctcagaatgctaaagcaagaaggaaccttaaaaacttatctggccgcgcccagtggctcatgcctgtaatcccagcactttggaggacaaggcgggcggatcacgaggtcaggaattttgtaaagggtgcccaaagaaaagtcagtcccatcccagaacgggcaatagctgtagaaagagccaatcgttttttgaagtatttggtagttaccacagcagccacttggtataagaaagcagaacccaaaccgggtagaagtcccatagtcacacaagaaaaggatactgtgtggcccagctgctgatctagatatccaccagtgacacgac

SEQ ID NO: 243801 - DNA, 565 bp, Homo Sapiens
acgcccaggaccttcaggtttctgaactgcagagaccagcctgaccctgctctggaagacaccgttgtccatatttgaccgctaccgcctcacgaacattttccacgccggccagtgggtgggagtgcagcttccaagaaacaccacttcctatgtcctgagaggcctggaaccaggacaggagtacaatgtcctcctgacagccgagaaaggcagacacaagagcaagcccgcacgtgtgaaggcatccactgaacaagcccctgagctggaaagcctcaccgtgtctgaggttggctgggatggcctcagactcaactggaccgcagctgaccatgcctatgagcactttgtcattcaggtgcaggaggtcaacaaggtggaggcaagctcggaacctcacgttgcctggcagccttcgggctgtggacatcccgggcctcaaggctgctacgccttatacagtctccatctatggggtgatccagggctatagaacaccagtgctctctgctgaggcctccacaggggaactcccatttgggagaggtctgtgccagagttg

SEQ ID NO: 243802 - DNA, 463 bp, Homo Sapiens
cattggatttctcaatacaacaatagaaacaaagtaaaatggagcaacaatatttttaaagtcctgaaggaaaattacctcctacctaaacgtataaagtatcaatcaaacatgagacatgcaaggtctcaaaaattttacctccacacaaacttcctctagaagctaccaaaggatgtgctgcagcaaaacaagttagtactcaataaaatggaaaacatggaatccagaaaacagctgagcgcaggaaagaagttagtcccaagacagctaggaaccagagggcagatctgaaggtaactcaatggataggctgagagttgccttcaagatttaggatagtactgtattttttaacctgaggaacagtatatccaggtgagtatggaccaaattacatgtttttctttagcatgtgtgcttataccccagctttccaatccatgctcatttctcttcccct

SEQ ID NO: 243803 - DNA, 291 bp, Homo Sapiens
tggtgtaatatcatttgtcttgtaaaagtcctctgtggtgggttttatcattttttattattttatttcatgaaggactgaactgaggctcagaggttaataatgccccacaggtcatgtagtaaattgtagaggcaggatcccaactgatatcttttcgcctcctatgctcgtgttcttttctagtaactcatgccaccttcctcatagacaaggttattttgttcccaagcttactaacttcctcgtcatatcaatacatcctccactcatctcatacattggaccgcc

SEQ ID NO: 243804 - DNA, 728 bp, Homo Sapiens
gattttgaaagatggatttttgaaggcatccaaacccaggaaagagcatccaaagtgtggattcgtaatggaaccggccagcagactagcctgccgactggaatgtgggtttcagaggcaaataatgaaagttaagattagagagagtgaaaggctgggagcacactcagagggtgttgatagctgtcccagaatagattggacttaattgggtgtgcactggaaacttgaaggttttgaaacaccagagccgagttgaaaattaagggaaaatcatgtgtggtttagagtggaaacaccaagaaaaagctacaaggctactgctgtggcctaggttctatgtaaaaaagggttgggaagggaactgaaaggacagctgcaagagacaacaggaaataagctgcaaagctggagtgagaaggctggagtgaggcagaggaggggtcaatgaaaacaagtacaactgctatggtttattgagcaccagcgtcatttcacttaaccctaacagcccttcagggtgtgcactagtccatttcaaagacgcaattcagagagatgagccagaacctatccctgctgtgtgtctccacaaagctctccaactttcccttttgtccacatcactgtgcagagctccggtttatgagggtgtcacagagggccccaccttacctatatggtccatgactctctcctgggacctctaagtgactgaggatgagctg

SEQ ID NO: 243805 - DNA, 563 bp, Homo Sapiens
agacataggtttgccccataaggagaaagctcagcttgtgtccttgcagacactgcttgagcatctactgtgtacatgtcactaaattcagttgatgagccttcctatgaggaaggacgcttgtgagaaacccatgcaaacaatgaactcttaggaatgagttgctcatgaaacagccagagatgaggccttctcccaaggccttctcatttgaggggattcctcaagactcaaccccacaggcccccactgtaggaaacaagccagagaaagcagcattcagagaatgggggacagagaaggggaaagatatgatcccaaatgcagtacaaagttggcgtctggttctgacacaaaccagatactgaagcactcacggtcaggtcagcaacctcctttgatggacccccaaaagctgactgaccaggcaaactgctttcaaggaatgaaagagtggagggtagggcttgtagcaaacaagccagtttcagtcactctgttcccccaggagaacaacctttagcacctgaacactaagaatgactccattctcagaacttccc

SEQ ID NO: 243806 - DNA, 333 bp, Homo Sapiens
ttcaatttctacactatttcattactcaaaatatcagaaactggacaaagactaaaatcaaatcccattttaaatttttcattgatataagtaatagagcaggagttttactgagtcaatagttataggaaatcagatcaatatcaatgaagtatatcagtgttttccgtaagtccacaacatgttttcctgaagactaccagtaggattccacttgtcaaattgccttctttttgtttctattcctcttgacttaatatacaactatccctggaatacctttctacacctctgagacacagcaccttttgtattacatgtgtagaaattgaa

SEQ ID NO: 243807 - DNA, 771 bp, Homo Sapiens
acacttgatggaaggataaattgctgaaaatctccctgcaacaacgagcattctgatacagtagcgtcttgtgaaacgatctgtgccaaagctggtggcagaggacgtcccgctgctcttcagcctcctgtcggacgtgttccctggagtccagtatcacaggggtgagatgactgcccttcgagaggagctgaagaaagtgtgtcaggagatgtatttgacatatggagatggagaagaagttggtggaatgtgggttgaaaaggttctccagctctatcagatcacccagatcaatcatggcctgatgatggtggggccctcgggaagtgggaagagcatggcctggcgtgtcctgctgaaggcattggagagactcgagggtgtggaaggtgtggcccatatcatcgaccccaaggccatcagcaaagaccacctctacggaatcctggaccccaacaccagggaatggacagatgggctcttcacacacgtgctgagaaagatcatcgacagcgtgagaggcgagctgcagaagcgccagtggatcgtcttcgatggcgatgtggatccagagtgggttgagaacttgaacgcagtgatggatgacaataagctcctaactttgcccaatggagagcgcctcagtcttccacccaatgtgagaataatgtttgaggtacaggacttgaaatacgcgaccttggccacagtgtcgcgctgcggcatggtctgtttcagtgaggatctgctgagcaccgacatgattcc

SEQ ID NO: 243808 - DNA, 354 bp, Homo Sapiens
gctttgaagagtgtgctggtgagtgcaggcaatgtgaagagagagagaatccagaagataaagagggagaaagaggaacgaggggaagcagttgatgaaggagaaattgctgaaaatctccctgaacaagagattctgatacagagcgtctgtgagacgatggtgccaaagctggtggcagcggacatcccgctgctcttccagcctccctgtcggacgtgttcccctggagtccagtatcactggggtgagatgactgccctgtcgagacggagtctgcagaaagtgtgctcaggagatgtatttgacatatggagatggagcagaagttggtggaactggcggtacggagct

SEQ ID NO: 243809 - DNA, 325 bp, Homo Sapiens
gcttgaatttgcaactgaatgggatgtattcaaaacatctacagagaaatgagcaaattcttgaatttgcaactgaatggatgatgtagcgcatgtgaacacagtgatggatcttggaaggaagtgatcttttggctgagaaagctgatagaagagaatttgttagtctgttgaagaaaatgttgctgattgatgcagatttaagaattactccagctgagatcctggaaccatccttttgttaatatgaaacatcgtctagatttccctgcatagcaacatggtaaagtcctgttttcatatatggatatgcgtaagtcccacg

SEQ ID NO: 243810 - DNA, 293 bp, Homo Sapiens
  misc_feature (69)..(80): n is a, c, g, or t
cacagtatacaaaaggaactaacctgcaccaagtgcacatgtatccccttaaactttaggatatatatnnnnnnnnnnnngaatgattcagtgtagttgtatgctagactatattatatgggattatcggcagtttaccagttggttctttattagtactcctgatgtcttaaaccaaaatgaataattgtttatcttttctccaagtgtctcatctgttcagtaacatatcacgtttttctcctacagtctctgcatagtactgttttttgaacgtgctttggtttgtatca

SEQ ID NO: 243811 - DNA, 706 bp, Homo Sapiens
ctttgatgagcagtttgactctcttttttagaactgcaattgacattgggcgcttagagtctaatgtggaaaaggaatatcttcacatgataactagacagaagaattctgagagacttctttgtgatgtatgtgttcatctcacagatttgaactttcttttgattgagcagtttggagacactctttttgtagaatctgcaagtggacatttcgagtgctttgtggcctgtggtagaaaacgaaatatcttcacataaaatctagacagaagcaatctgagaaacttctttgtgatgtgcgcattcatctcccagagttgaacctttcttttgttggaccagctttaaaatactctttttgtagaatctgcaagtggacatttcgagcgtcttgagtctatggtggaaaatgaaatatcttcacataaaaactagacagaagcattctgagaaacttgtttgtgatgtgtttgttcatctcacagatttgaacctttcctttgattgagcagtttagaaacactctatttgtagaatctgcaagtggatatttggagcacgttgtggcctacagtagaaagggaaatatcttcacataaaatctacacagaagctatctgagaaacttctttgggatgtgtgcattcatctctgatgatgacaccttcctgtgattgacggtgtcctggtcacctctgtctcct

SEQ ID NO: 243812 - DNA, 839 bp, Homo Sapiens
tctttaatggcagtgaaattttgtactgaacatcactgaagtaaatggtccactgggctgggcctttggactttttggttatatggcctctgcagtaaaggtgttttgctataactggatttgacctcttccatgtaagaagatctaaatttttaatgcaaagtatttttttgctacgttcttcatggccgttggcactgctcaacttgttctcatccttatgattgacagttcacactggaatcaaaggtgaattcatgggagtagaggtgagatatcgttaggcaagtcttcttgtaaggagcctcaagcattgcttcaatatcaatatcgtctgccattttctctaaacgcctgttccggccttcgggcgcctgtggtgctcgtgttcgggaagagattgctctgagttgaatttttctttaattgagttttatgacccaggatatggttctatcttggtgaatagtttatggacacttgaaagtaacgtgtattctgttgttgggtaaagtgttctataaatgtcaattggatcctcttagttgatgacattcttcagttcttctatatcttcgctgattatatttacagtagtctgtcaatactgggtgtggatactgaaatcccatctacaattatggatttttaaatttcttcttaattctatcagtttttatttatgtagcttaagctttgttgtttggtgcatacaaaagtaaggatcattatgtcttctttagattgatcctttcatcaataaataatgcccctctttatccctagtaattttctttgctttgaagtctactgcatctgatattaatacactcctgatt

SEQ ID NO: 243813 - DNA, 1277 bp, Homo Sapiens
taaccaaatatattttttaacttacattaacaaacatttgggcaaaaatcatattggtaatgagtgtttaaaattaaagcacacattatctctgcagactcttccaacaaagagaaactagaatgaagtctgaaaaacagaatcaagtaagacagcatgttatatagtgacactgaatgttatttaacttgtagttactatcaatatatttatgcgttaaacagctagttctctcaagtgtagaggacaagaacttgtgtcagttatcttttgaatccataaatcttagctggcattagttttctatgtaatcacctacctagagagagttgtaaattatatgttaacatgttatctggttggcagcaaacactaaagccaataaaggaaaaacagtaaatgtttcgaaagcagagaaaagcaaccaaacatattgttatgaactaaaagctttccctttaagatgcatacttgtcttactggatgaagaaaattgagggtacatgtaccttatactgtcaaggttgtttaaacatgataaggttaatcgccatctacttcaagttttagaaaaggaaacaagaagctgaaaacagctgctctgactttaatatctgactatatctttgatctgtttgaaggtcatccaagtgttttttaggaatatatttattttaggttgtctgagactactattttttagactcctgaaagttgttcacatcaatgtgaagacaaattttaaatgaaaatgaagaatgaaattatgtcttgaatcatatattaagaagtaaaaataatagtgatcaggcagaaaagaaaaatggaacatctaaaaatgtatgtgctaactatatcatccagtgtgcagtgttgtgtatttttctaagcatgacaacattgatgtgccttttcagtgtaacagcaaatactgttagtgaacattgtcaatttatgtcattttgttaagagatatgactggagtgtgcagtgtggaatgtctctaatactacttgagaatcctgcagttctataatcataaacaaaaattacttagtttcgttaagctaagattgtgtttgtgttaacttcgacatcaaggagcaaagaactttagaacagactcctcaatcttgtgactttcttattctctaggaaagtaacacttcgtttcatgaagcgttttctgtggggcttcgattatttcaagtctggtttctaagtgcagtgtgtttgaagcaaacgaacttcctactcacgtatttggcattggcact

SEQ ID NO: 243814 - DNA, 841 bp, Homo Sapiens
  misc_feature (337)..(507): n is a, c, g, or t
ctcgataagggccaaaggtaatttctcttttacagagccacctgagctgaagattcccttgagtacaagtactgtcctgtggtttcatggcctttcttccatttgtggttcttgcgaagtggaatttaaatgacatcttatcaagatggataaaccctagtttcccagtgctggaatatagaaaatggatggacaagtaaatcccactcagcacccatagtccaggcatggggacctcaacacacctgagccccagacatcacctttcattctggacctaccatgaaagacttctgaatccaggaagagagactgactgggcaacatgttattcagnnnnnnnnnnnnnnnnnnnnnnnnnnnnnnnnnnnnnnnnnnnnnnnnnnnnnnnnnnnnnnnnnnnnnnnnnnnnnnnnnnnnnnnnnnnnnnnnnnnnnnnnnnnnnnnnnnnnnnnnnnnnnnnnnnnnnnnnnnnnnnnnnnnnnnnnnnnnnnnnnnnnnnnnnnncagaggggtgacagcgaaacgaagtgacctcacaatgactcaagctgccacttactgttgattgtgacgaaatgccagctgaggcacatgccttgggagctaagtggttgctgcacttgaccactatgaagactggtgtgggaagggttgctttggatgcacttgagcagggctccccaacccctgagccatggagccgtaaggagccacacagcagggggtgggaccatccagttacaggaaaacaagcttaacatgcccactgattctacattatgctcctacctcccgcagcctctccagcccagactttctcctactcatatcgatatca

SEQ ID NO: 243815 - DNA, 269 bp, Homo Sapiens
ttggaggaagccatggcctctaaggtacagtggatctcacccaagattgtaatgacaatataattccaggatgacaaccttgaggcaggcctagaaagccatcagtctgtattagaaccagaagtcagatgctctgtgaagaatctctttcaggaggacatggatttcttctataaattgtatgactgagaagctgagtggtcttgttacaacggccaagacatgtatgttctttgtgataaggttcatcctacactgactcctgtata

SEQ ID NO: 243816 - DNA, 2515 bp, Homo Sapiens
atagacttttttcagataacatcttctgagtcataaccagcctggcagtatgatggcctagatgcagagaaaacagctccttggtgaattgataagtaaaggcagaaaagattatatgtcatacctccattggggaataagcataaccctgagattcttactactgatgagaacattatctgcatatgccaaaaaattttaagcaaatgaaagctaccaatttaaagttacggaatctaccattttaaagttaattgcttgtcaagctataaccacaaaaataatgaattgatgagaaatacaatgaagaggcaatgtccatctcaaaatactgcttttacaaaagcagaataaaagcgaaaagaaatgaaaatgttacactacattaatcctggaataaaagaagccgaaataaatgagagatgagttgggatcaagtggattgaggaggctgtgctgtgtgccaatgtttcgtttgcctcagacaggtatctcttcgttatcagaagagttgcttcatttcatctgggagcagaaaacagcaggcagctgttaacagataagtttaacttgcatctgcagtattgcatgttagggataagtgcttatttttaagagctgtggagttcttaaatatcaaccatggcactttctcctgaccccttccctaggggatttcaggattgagaaatttttccatcgagcctttttaaaattgtaggacttgttcctgtgggcttcagtgatgggatagtacacttcactcagaggcatttgcatctttaaataatttcttaaaagcctctaaagtgatcagtgccttgatgccaactaaggaaatttgtttagcattgaatctctgaaggctctatgaaaggaatagcatgatgtgctgttagaatcagatgttactgctaaaatttacatgttgtgatgtaaattgtgtagaaaaccattaaatcattcaaaataataaactatttttattagagaatgtatacttttagaaagctgtctccttatttaaataaaatagtgtttgtctgtagttcagtgttggggcaatcttgggggggattcttctctaatctttcagaaactttgtctgcgaacactctttaatggaccagatcaggatttgagcggaagaacgaatgtaactttaaggcaggaaagacaaattttattcttcataaagtgatgagcatataataattccaggcacatggcaatagaggccctctaaataaggaataaataacctcttagacaggtgggagattatgatcagagtaaaaggtaattacacattttatttccagaaagtcaggggtctataaattgacagtgattagagtaatactttttcacatttccaaagtttgcatgttaactttaaatgcttacaatcttagagtggtaggcaatgttttacactattgaccttatatagggaagggagggggtgcctgtggggttttaaagaattttcctttgcagaggcatttcatccttcatgaagccattcaggattttgaattgcatatgagtgcttggctcttccttctgttctagtgagtgtatgagaccttgcagtgagtttatcagcatactcaaaatttttttcctggaatttggagggatgggaggagggggtggggcttacttgttgtagctttattttcttttacagacttcacagagaatgcagttgtcttgacttcaggtctgtctgttctgttggcaagtaaatgcagtactgttctgatcccgctgctattagaatgcattgtgaaacgactggagtatgattaaaagttgtgttccccaatgcttggagtagtgattgttgaaggaaaaaatccagctgagtgataaaggctgagtgttgaggaaatttctgcagttttaagcagtcgtatttgtgattgaagctgagtacattttgctggtgtatttttaggtaaaatgctttttgttcatttctggtggtgggaggggactgaagcctttagtcttttccagatgcaaccttaaaatcagtgacaagaaacattccaaacaagcaacagtcttcaagaaattaaactggcaagtggaaatgtttaaacagttcagtgatctttagtgcattgtttatgtgtgggtttctctctcccctcccttggtcttaattcttacatgcaggaacactcagcagacacacgtatgcgaagggccagagaagccagacccagtaagaaaaaatagcctatttactttaaataaaccaaacattccattttaaatgtggggattgggaaccactagttctttcagatggtattcttcagactatagaaggagcttccagttgaattcaccagtggacaaaatgaggaaaacaggtgaacaagctttttctgtatttacatacaaagtcagatcagttatgggacaatagtattgaatagatttcagctttatgctggagtaactggcatgtgagcaaactgtgttggcgtggggtagagat

SEQ ID NO: 243817 - DNA, 600 bp, Homo Sapiens
cctattggaagttcatagcaaacagacaggcaaatatctgaagataccatacatcaactagtggtttaaacactttgaagaaaaaacatggaaagtatttacatggaccagtttctttatacaaatgctaaaacatgaaaaacacccaaaaccagatagagcgttaccatcaaggtatgaatctagtaatacaaataaaactacaaaaggtacaaagaacatgtagctataggaaataatagtgtaaatagcagtatataaactggcccatgtaaaatacaaaaatattcactgaagtcaggttttctataaaacagtgtttattagaggtattttactatgaatcaggcatataatctgaatgtagaaacttttagaaatattaacagcattcagtcagtgccatgcacttgtgtttccaattatttttttaaagctgctttgttttgactcatgtgaaatagttaaggcctacattcttatatacattatccatcttacataggttaacaattttacactaaaacacagtttaaattaaaaacgattttgaaaaattacatctatatttaatccatacaaagtgtatgttgactaatc

SEQ ID NO: 243818 - DNA, 642 bp, Homo Sapiens
cagccgggctggtcctgctgcgagccggcggccggagtggggcggcggcatgtaccttccacattgagtattcagaaagaagtgatctgaactctgaccattctttatggatacattaagtcaaatataagagtctgactacttgacacactggctcgagcaaacatgaacgttggagttgcccacagtgaagtgaatccaaatacccgtgtcatgaacagccggggtatgtggctgacatatgcattgggagttggcttgcttcatattgtcttactcagcattcccttcttcagtgttcctgttgcttggactttaacaaatattatacataatctggggatgtacgtatttttgcatgcagtgaaaggaacacctttcgaaactcctgaccagggtaaagcaaggctcctaactcattgggaacaactggactatggagtacagtttacatcttcacggaagtttttcacaatttctccaataattctatattttctggcaagtttctatacgaagtatgatccaactcacttcatcctaaacacagcttctctcctgagtgtactaattcccaaaatgccacaactacatggtgttcggatctttggaattaataagtattgaaatgttttgaaactg

SEQ ID NO: 243819 - DNA, 523 bp, Homo Sapiens
aacatcaatcggacgtcagcaccaaactcctgagcttcacggtactcacgggcctccagtttagactggtacacaagactagtccctgttagctgtgtctgcccaatgtgaccatggagaagtggctggcagcagacgaaagggatgcctagaagagcaagtcggtttcttggctctcagtttggtcaagactgtattggggggacaggccatcaccccagttctcagcctcagggctgggactggccctgccaacatcccagctcacctgcctggctcgcaggcaggtggactcaggacccaccaggaggcggagcctgagccacgaaatgacggggagaactgatggagagggctgggcccagctcatcgtgatgacacagtacaggagctggtcaaagggacacagcactgttccctgctctgcctgccccatgcttgggactccactcccagaagaagacacacgtaacatagtcttaaatactaaagaagcctcaaacactatgtgatatgtcggcac

SEQ ID NO: 243820 - DNA, 602 bp, Homo Sapiens
cctggaccggaggagatagcaggagacgtcgcctttgccttaactttggtcttcattcaatgtgtgatcaatgctgtgtttgccaagatctggtggatcgtacccggagctggctctatgctgcctgttctatctcctatctgggtgccatggtctccagcaattcagcactacagtttgtcaactaccccactcaggtccttggtaaatcctgcaagccaatcccagtcatgctccttggggtgaccctcttgaagaagaagtacccgttggccaagtacctgtgtgtgctgttaattgtggctggagtggcccttttcatgtacaaacccaagaaagttgttgggatagaagaacacacagtcggctatggagagctactcttgctattatcgctgaccctggatggactgactggtgtttcccaggaccacatgcgggctcattacctaacaggctccaaccacatgatgctgaacatcaacctttggtcgacattgctgctgggaatgggaatcctgttcactgggagctctgggagttcttgagctttgctaaagtacctgccatcatctatacatcctgctatctcctcgggccgc

SEQ ID NO: 243821 - DNA, 2085 bp, Homo Sapiens
  misc_feature (40)..(40): n is a, c, g, or t
  misc_feature (50)..(50): n is a, c, g, or t
  misc_feature (61)..(61): n is a, c, g, or t
  misc_feature (67)..(67): n is a, c, g, or t
  misc_feature (79)..(79): n is a, c, g, or t
  misc_feature (1422)..(1422): n is a, c, g, or t
  misc_feature (1652)..(1697): n is a, c, g, or t
tcaatgcaatcaagaggtcccaatctttggtgttcacttnaagaccactnggtgaacttgnttcagnccaccaaagggnagaacttaggttcttcccccccttgtgcgaaatcaaaattcataaaatggagcaaaaggagaatgtgcccccaggtcccgaggtctgcatcacccatcagaaggggaaaagatttctgcaaatgagaatagcctggcagtccgttccacccctgccgaagatgactccccaggtgactcccaggttaagagtgaggttcaacagcctgtccatcccaagccactaagtccagattccagagcctccagtctttctgaaagttctcctcccaaagcaatgaagaagtttcaggcacctgcaagagagacctgcgtggaatgtcagaagacagtctatccaatggagcgtctcttggccaaccagcaggtgtttcacattcagctgcttccgttgctcctattgcaacaacaaactcagtctaggaacatatgcatctttacatggaagaatctattgtaagcctcacttcaatcaactctttaaatctaagggcaactatgatgaaggctttgggcacagaccacacaaggatctatgggcaagcaaaaatgaaaacgaagagatttcggagagaccagcccagctggcaaatgcaagggagacccctcacagcccaggggtaggagatgcccctatggctaaggtgggtgtcctggctgcaagtatggaagccaaggcctcctctcagcaggagaaggaagacaagccagctgaaaccaagaagctgaggatcgcctggccaccccccactgaacttggaagttcaggaagtggcttggaggaagggatccaaatgtcgaagcccaaatgggctcctgaagacgaaatcaggaaggccgaagttcctgaggatgtcgatctagatctgaagaagctaagacgatcttcttcactgaaggaaagaagccgcccattcactgtagcagcttcatttcaaagcacctctgtcaagagcccaaaaactgtgtccccacctatcaggaaaggctggagcatgtcagagcagagtgaagagtctgtgggtggaagagttgcagaaaggaaacaagtggaaaatgccaaggcttctaagaagaatgggaatgtgggaaaaacaacctggcaaaacaaagaatctaaaggagagacagggaagacgaagtaaggtaggtcatagtttggagatggagaatgagaatcttgtagaagatggtgcagactccgatgaagatgataacagcttcctcaaacaacaatctccacaagaacccaagtctctgaattggtcgagttttgtagacaacacctttgctgaaagaattcactactcagaatcagaaatcccaggatgtggaactctgggnaggggagaaagtggtcaaaagagcttctctgtggaagaacggataaaagagaaatcggtattatgatgaggatgaggatgaagagtgacaaatagcaatgatgctgggccttaaattcatgttagtgttagcgagccactgccctttgtccaaatgtgatgcacataagcaggtatcccagcatgaaatgtaatttacttggaagtaactttggaaaagaattccttctnnnnnnnnnnnnnnnnnnnnnnnnnnnnnnnnnnnnnnnnnnnnnntactagagataactttacttaaattcttcattttagcagtgatgatatgcataagtgctgtaaggcttgtaactggggaaatattccacctgataatagcccagattctactgtattccccaaaggcaatattaaggtagacagatgattagtagtatattgttacacactattttggaattagagaacatacagaaggaatttaggggcttaaacattacgactgaatgcactttagtataaagggcacagtttgtatatttttaaatgaatacccatttaattttttagtatttacctgttaagagattatttagtctttacattttttaggtaatttcttgctgtgatatatatgaggattactactttatgtcctgctttctgt

SEQ ID NO: 243822 - DNA, 616 bp, Homo Sapiens
attgttaattttctgaggaagattttccatagttttctgatcaaccacactggcagaaatagataactagttctaatttccaaaaggtaagtaatagatagttaccacctgagtttctgcttctgcaaccttttttcactaggaattaaatgtatgtcacagcattattttttggacagacacttggtcattgtgtcaccccttggtgatgagtaaattttattgaaaatatacttgctgtttgattgacacagttctataaacttttcacaagaaaagacagtcttttggtgccatagactatatttctcattttgactctgactgttttatcaatgtgtgtctctggtcctaagcctgagtgattataaatgaattagcgtaaacccatgcctctaaaggaaaagcatctcccagcaggcacctggctagctgaaggccagcagtaccaatcctcctgcctgaagaatagcagtgtagggtcatatcagaaaacatggcccttttcctatgttggatatgtttttctaagatcagtttccacctaacaagtaattttttaattgaaaagcttttatttctaaggctgtctcatgtctttaataaatacgggaat

SEQ ID NO: 243823 - DNA, 647 bp, Homo Sapiens
ttgggcgtcactgcaatcaaagacctggtggacgatgtggctcgccataaaatggataaggaaatcaacaataggacgtgtgaagtcattaaggatggcaggttcaaagttgctaagtggaaagaaattcaagttggagacgtcattcgtctgaaaaaaaatgattttgttccagctgacattctcctgctgtctagctctgagcctaacagcctctgctatgtggaaacagcagaactggacggagaaaccaatttaaaatttaagatgtcacttgaaatcacagaccagtacctccaaagagaagatacattggctacatttgatggttttattgaatgtgaagaacccaataaccgactagataagtttacaggaacactattttggagaaacacaagttttcctttggatgctgataaaattttgttacgtggctgtgtaattaggaacaccgatttctgccacggcttagtcatttttgcaggtgctgacactaaaataatgaagaatagtgggaaaaccagatttaaaagaactaaaattgattacttgatgaactacatggttacacgatctttgttgttcttattctgctttctgctggtctgcctatcggccatgcttacttgggaagccacggtggc

SEQ ID NO: 243824 - DNA, 582 bp, Homo Sapiens
gtaattacataggggactatatgatagaagatacgatgttcatgtacaactattatctactatggagtttatatcactttcaagtgcctctgcaaactgttttttagcagggagaaaataagaataaaaatgggaaaatggaaatcccaagatctgattcctttaaagatgctgctatagaagtagccactgccaggtctgcatctcctggtgcaatcagataatccatctatctagattggatagatacttgaggaggaataattcaaggtaatttccgttacaccactatccatgttttctcaagggaaaaacatgtatttgcttcttttgattaacatgttagtggctgcaactaaaacatctagtggtcggccgagcagaggttttcgtgctggttttacaaaatcagtacagcgggccacctctcagcatcagcttcgcctggatttacaagtaaactcttcagtatggctgaacagggtatgtgggtgtgtgtatattggtagctgtatggaaactggattgctctaataatatacacattcattcctgcattgaggtgctgatcctgtacgatat

SEQ ID NO: 243825 - DNA, 1358 bp, Homo Sapiens
cctgcccagtctgtgaaagctacagagcaccaaccagcagaagcctgtggacaccaagtacggtgtacagaaagccagtggctcctttctcccttcctcttggcctccagattttgaatggttccttgttcttttctattggtccaatcctgacgttctaaaagggcatacagtggagacgtctgctctgaaattcctcatcccttagttggaagctgattgggtatcttggtgctgcctgtattggtcccttctgaccactctcctgcctccagagaaagctctgcttcaccctggaagctggtacctttacctcctcctctgggagttggctgcatggccagcactgccgacttgatgggagcagtttgccctcattctcctgtttcaggtttgcttcccttctcagtgaccctggtgagcatccgcctttcctgttcttggatgaattgatgggagtggggctattctgtgccttctacctctttcttctctacgttgtttctaaggatctgttgctgcggaacccaaagatgtgctcctgtctctgcactggcgcattggcatggtagatgccacaatgtatgtgcacggcctttctcagagacattagttctgaggccctttgtggggaggttagggggatggtaatagaaaaagactattttatttcctggcagtcacgggtaaggaggattaggaatgagtattccattcctaggtgtcatcagatgaccttgaccaccacaataccaggccctcttggatggacttatagaaagttagagaagaccttgttgaaaccgctgctaaacttgccacaggagcgatgtgttttctctgagtgcccctcacttacatgtttatctttgtttgtagaggctatgtttaggatattttgcctgcatcagaatgggtgcatcatctttcttaatggcctaactatcgggaaatttgagtgtcagtaactgtggtagactcagaaattcgtctttgtcttgcctctggttcctgggatccagtgatctctactggcccagggcttcagctcttggttaatttaggttcatggggaaccctctgaccatctgaatggcatgtcatagctgctaactggagcttctgtggaatgaagtgctagactgaaggactaccagaataaaacagggtctacaaatggggagaacttgtttaatagatgaggaaaccaaggctcagaggggcaaagtcacctgcatggtagcacatagtgatagggtagcgatataaatttatcatataaaccaggacatctcggaataaaaggggcctgttagtcatttgttgggtatagccgtgcttcctacgaacaagtgaga

SEQ ID NO: 243826 - DNA, 763 bp, Homo Sapiens
cccataatattttatacagcatcgagtctaagaatattttatgcatttaatccataccaatgcactacggaagcttttattaaacggagtcactattgcccagacagtaaatggtttacaaatgtacaataacgtatgtttctaaataatgcagaagtggcaaagtattattcctattctcatctgactttaattttcaatttatttttcattgccttcataattttttatttcatgagtctaagaaacaaacaccagttttccttttcctttcaataacatagttctatacctagaaatctgatgttcatttatcttccctttaaagttgtgtaaatcctgggaaagaaatcgctgtgcagtgttctcccagaaaccaggcttctgcttgaaagagcaaagtttaaaagtctagtcacaagtagcccatatctggtctacttcaaaaagtttccatttatactaccaccttaaaaatttcctcaagcataaaacatgtttataaagttacaaatttgaatgtaactaaagatacatagacattttattattacactttcatgtactgcttgataaattatgtatcagttaaaaacactaaattatctcaaggtgcattcaatatctgtagggtagttcaccaaaacacactcgcccaaaatatatattctatattctcgtggaaaataaccccgctttgataatgaccactgttataaactcctattctgattgatatctttttaaacactgcatagtataa

SEQ ID NO: 243827 - DNA, 501 bp, Homo Sapiens
agttcacagtgttctgagaaggaagcaaggtcaaaagaatgacctaccaaggccagcaagcctgcgtttcctccccatcctttctcccggcttctcttttcttttgcccctctcctgcctgggatgcagattctcccctagagaaagagcaggctcctgccccaaggattggctgtcccctgacactggggaagcacacgtacagcgcaccttgatggagcctagtgaactgagcaaccctggtgtggtttcctccgccagctgcttgagtaggtggggtcaggcctaaggaaggtgagcacccagccactgccttgccttgccagccgtagggagcctactcagactctctgagcattaggctcattgtccatgagaaaaggaatcatagtacctgccttggaaatggatctcctaaactttaaagagactatatgtgtaagtgcctcgcatgcattaggtacatagatgacatctgccgtttggtacggattacgcgcg

SEQ ID NO: 243828 - DNA, 690 bp, Homo Sapiens
tagagatcccgccgtcatccgtaccagtcttgaatagaaactgccctgaattgtggaagggttaagtgtaatggaattaagtttggaaacaaacccatttaggtttgaattgtgattctaccacttcatcttgactgcctcgccaagcctcaaatttccttgtttgtcaaatggaaacaagcctcagggtggtaatattaaatgagataatgtttgtgaaaattggcccttagtttcttgctctcagtgaatgcaacagatatgtttctgatgcttctctgtcatcaaggatcccccagaagaggcagaactgttgctacagaacctgccaagtagatggtcccagagactgcgtggtgctcattgctgcagctgggcactttgctggtgctatatttcaatggtgtgagagggtgctgcatgggtggtaagtgatggagtggatcctgttagccagggagcaccagctggtctccagtactgagtctgtgctgtctacagaagagaagtggtgacacacaaaacttttcacctgctatacggttcgggccaagcggggcacagcccagtgggcttcgggatgcccgaggtgggccatcacactctgctggagccaacctgaggcgctacaatgaagccacactatataaggtgagttaagccttttagatctggtgtacggactatccg

SEQ ID NO: 243829 - DNA, 688 bp, Homo Sapiens
  misc_feature (515)..(523): n is a, c, g, or t
atagtggctcacgtctataatccccaccctttgggaagctgagttgggaggatcgcttgaggtgaggagttcaagatcagtctggcaacatagcaagacttgtctctaaaaaaattttttaaataaagaaaaatgaagtctatactgcttaacagtcgtttgttccaggataatattactaagtttctcttgcagtgaattggaaaggtaagtaatagcttgaaacaaagcctagcttccatggtttactggcttttaggtatctagtatgtatttatcccaacagggctataggatttccaggtaatatcctaatatggccttaaagtgtatcaaccatcttgttaaggaagaaatcaagttgcttttatgcatgttatgttatatgccctcacaggcctctggtgactagcctagtgtctgtccagcaggccaagctgttattaaaataaaaatattagctacaatttttgagtactgattttgggccaagtattgtgctgtcataatttcannnnnnnnnacttcagcaccatagaaccatcactctgaaagtgcattaccaaacaaaaaaagctgagtctcttacatttctaaacaaaaatcagtgcacatctgggtgcagagcaactgacagagccagtgttgaagtttgctttcttgtttgacacatgcgaacctgtacggt

SEQ ID NO: 243830 - DNA, 1446 bp, Homo Sapiens
  misc_feature (1383)..(1401): n is a, c, g, or t
cgggctttgtcccgcaaatcatgcacctttgcgtgagcagggtgccattgcacgactagttcagttgcttgttcgtgcacatcaggatacccagcgccgtacgtccatgggtgggacacagcagcaatttgtggagggggtccgcatggaagaaatagttgaaggttgtaccggagcccttcacatcctagctcgggatgttcacaaccgaattgttatcagaggactaaataccattccattgtttgtgcagctgctttattctcccattgaaaacatccaaagagtagctgcaggggtcctctgtgaacttgctcaggacaaggaagctgcagaagctattgaagctgagggagccacagctcctctgacagagttacttcactctaggaatgaaggtgtggcgacatatgcagctgctgttttgttccgaatgtctgaggacaagccacaagattacaagaaacggctttcagttgagctgaccagctctctcttcagaacagagccaatggcttggaatgagactgctgatcttggacttgatattggtgcccagggagaaccccttggatatcgccaggatgatcctagctatcgttcttttcactctggtggatatggccaggatgccttgggtatggaccccatgatggaacatgagatgggtggccaccaccctggtgctgactatccagttgatgggctgccagatctggggcatgcccaggacctcatggatgggctgcctccaggtgacagcaatcagctggcctggtttgatactgacctgtaaatcatcctttaggtaagaagttttataaagccagtttgggtaaaatacttttactctgcctacagaacttcagaaagacttggttggtagggtgggagtggtttaggctatttgtaaatctgccacaaaaacaggtatatactttgaaaggagatgtcttggaacattggaatgttctcagatttctggttgttatgtgatcatgtgtggaagttattaactttaaatgtttttttgccacagcttttgcaacttgatactcaaatgagtaacatttgctgttttaaacatgtatagcagcctttgctctcgttatacagctgtgattgtgctgaacttgcattgtggttggcctgtagagttgctgagagggctcgaggggtgggctgtgattctcagaaagtgcctgacacactaaccaagctgagtttcctatggggacaattgaagttaactttttgttctggtcctttttggttcgaggagtaacaatacaaatggattttgggagtgactcaagaagtgaagaatgcacaagaatggatcacaagatggatttatctaatccctagccttgcttgttaaannnnnnnnnnnnnnnnnnnaagaatatctgtaatgtacggataacgagatcctctagagcgcta

SEQ ID NO: 243831 - DNA, 176 bp, Homo Sapiens
tgtttttattcaggtttcccctatccaagacaaaaataagtaccacttagaactctaaccaggtgatgttttgaaatattatggcaaagtacagagcctattctttattagcaatttggtaagcatttattcaactgaaatgtttaatttatcccattgctcatggttttcctctt

SEQ ID NO: 243832 - DNA, 1267 bp, Homo Sapiens
  misc_feature (198)..(210): n is a, c, g, or t
  misc_feature (334)..(358): n is a, c, g, or t
  misc_feature (514)..(585): n is a, c, g, or t
  misc_feature (994)..(1007): n is a, c, g, or t
cccaacggcggccggagttattttaatgccggacagggggtgagccaaaggggtgtgtgaaaagtccgcttgggcgaattttcagggtttgcgtccatgtaccctgttggtggggagggggtttaccacagtttcggggggaggagacgctaaaaggagaatatcaaaccacgttctcttggaaaaaagtggtccaannnnnnnnnnnnntataatttggggatagggagcctcgctttttggaattcccggggtgaaaaggatccaaggaaaggggccttaagagactcccaatttgggttttgtttcacaggcccttcgggtttggcccgcnnnnnnnnnnnnnnnnnnnnnnnnnaattcaaagccccttgtcacaattcccagggttttccttgggaacgcggtaagggcccaggggcacctttgccttatgtggcccggcccgcccaaacgaaatgttttggaaaattttttgggggccgaaggcgggccgacaaatttttgtgtttannnnnnnnnnnnnnnnnnnnnnnnnnnnnnnnnnnnnnnnnnnnnnnnnnnnnnnnnnnnnnnnnnnnnnnnaggataagtaaaattattgcatttaatgtcattttcatgaaatgaaaatcatcaaattccttaatgttgtatcaaacgtaaacaataccagttcaaattagagggaatgtatgtcaacaccaacttttgacaaaaataagaaagctaaagccctacaatttatctaatttaggtcaggcaaccatggaaacaaaagaatattaaaattatttattttatcattatgcacattgaaggaaatcataacagacagtacagttcttttccaccataaaattatatacacccatttatttagctagaaacactagcttgagaggtactgatatattccatttgtgatactttctgtacagcaaacaaatgtcttatatttggagcatgttgaagaaaacattgtctcaagtcnnnnnnnnnnnnnngagtctcaatcactaagagttcaaggtactttgggagaatcgtggtgtcctggatggcctgatcaatgtattaaaatcaagcagtatgtcttcttaaaatactcttaaatccatacaaatgttgcttgggttgtggagctgagatttctcctactggcatgataaaatttgaacatgtgttatgaaagtttcacaccaattttgtttgttccttcttcattagccgtgtacggatacgtcgggatcctctagaacagcag

SEQ ID NO: 243833 - DNA, 287 bp, Homo Sapiens
  misc_feature (65)..(65): n is a, c, g, or t
  misc_feature (77)..(77): n is a, c, g, or t
  misc_feature (84)..(84): n is a, c, g, or t
  misc_feature (104)..(104): n is a, c, g, or t
cggttgtagttgttctattgcatttacttttgaaagatagttgttagaaggttagttgtttttcnaggtaaaaaaangaaatcntgatgtcaaaatgcaaattntatgttgcaggatgcttcactgagtccctctcaacgtggtttaaaactacactcaacagtagttgtttattactagttggaaattccagggcacacaaatgaatgtccacttgtagaatcagttgactttccatgtcatggctaccactgtttagtaggtaatttactatagaactactacaa

SEQ ID NO: 243834 - DNA, 793 bp, Homo Sapiens
ctatcacattatcatagtattagtccaggttcctccagagaggatcgtgtggtgtgggaccttccggtttccagacaaagggttttggagtaccgtggtgtagtcgccgcatcgttctttgcatttcgagctctgtgccatgttctgtgttcggcatttaccgtggatgaatatcccctaggtgtttatcctgctctgtggccctgttctgtggaatattcctattggatcagttacagttttttagccagatatttctagaacggttatggtggttctgaaatggctagtctttcgggcgcgctgggataatgtgaagaatcgttgatttcgtaggtaggggtcacgagattttgtattggtactgcgttctgtgttttaaaccttggcttaagatttctgaatagtcggtaaaatacatttttctcccagggaaatctaaacagttgactatgcggacaaaaatgatgtttcaggctattttaataaatgtttaaaatttccctttaaaaacatttctttactaatggctcagtcatctacgcagtctatcgacgtttttcacagtattgttttaaacatcaagaaaggcttgacatattcgtagcaaaaacgctctggatgatgccttttccacttaaatagaatgtttttgcaaactcgaaattaaacaacattacatcctgcatgaagttactggttatgtagattagggaaagatcattagccagatgtgtgtgacgtgcttacattgttttctcctttgccctacagtatatactagacatacttg

SEQ ID NO: 243835 - DNA, 1050 bp, Homo Sapiens
  misc_feature (128)..(138): n is a, c, g, or t
  misc_feature (156)..(164): n is a, c, g, or t
  misc_feature (296)..(305): n is a, c, g, or t
  misc_feature (368)..(490): n is a, c, g, or t
  misc_feature (496)..(501): n is a, c, g, or t
  misc_feature (507)..(516): n is a, c, g, or t
  misc_feature (518)..(623): n is a, c, g, or t
tttttccccccaggtggcaacacaaattgttggggcccccatttggcccacattttgttcaaccccacctttttccccaagggggggccaattttttctgccgccaggggtttataaaaatgttccannnnnnnnnnnataaagggtggtcccacnnnnnnnnnaaaaaataaaataaacaaattgcccccaaatccggtgtaagaaaatccccacaagaaccccccaaaaagcctccaggcgaggtttttcaaaacaatttttagagtcccgccgggattttctttttaattggnnnnnnnnnncgccctttgggccccccggggggtttttgtgtggggacctttcggggccgcctccgcggcccnnnnnnnnnnnnnnnnnnnnnnnnnnnnnnnnnnnnnnnnnnnnnnnnnnnnnnnnnnnnnnnnnnnnnnnnnnnnnnnnnnnnnnnnnnnnnnnnnnnnnnnnnnnnnnnnnnnnnnnnnnntttttnnnnnntttttnnnnnnnnnntnnnnnnnnnnnnnnnnnnnnnnnnnnnnnnnnnnnnnnnnnnnnnnnnnnnnnnnnnnnnnnnnnnnnnnnnnnnnnnnnnnnnnnnnnnnnnnnnnnnnnnnnnngtaacatcttttatttgtatacaattataaattacaaacttgttttattaggttttttaaaatttatttttcgtcaacttagtcccttttatttaccagcagtttgctctgacagaataaattacaaactattgttttgtttaatccctttaaccatcatgtcaggcacacaggttggagaatattagctcccattttatggacagagtggaaacactgtacccatatttagtgtaagacagagctgggatataagccttgggcttccatagtcacaactgcttttttgcataactttgtaatacatcattttaaagtaatctgatttcacaatgttttacagtataggagtaacatctatagcatctcttcttggcaggttacctctggagagaaccaatctaattacctcatacgctggcactta

SEQ ID NO: 243836 - DNA, 628 bp, Homo Sapiens
ctcctgtccatgtaggcaataaataacttttcttacgtacaagaaatggaaaggatttaactgagttgaagtaaattaatataatttaaaaaatacattatttgtaaagtcagtcagttgacaggagccatgaagcaacatagacatatgaaacatgcataaagacaaggaaacatggaagagttttatatgaccaggatgctgcatagatcttagtctaaacatccagctttagcatagggtgctctttaaaaacattaggctgggtgcggtggctcacacctgtaatcccagcacggcactttgggaggctttttgatgcagaatattgatttataaaatactgtatctttactgtcccttcagagttcggctaaagaaacgtgcttttaggttttaaaaacagtcccgataattgcatcctccagtggtcctacttaaactgaatacaaggtattgtcttctttttcacagcaagaccacacaacacagaggtgttggatgaaaacagcaagcccttttcaatgcagcagtccatagaatacctctgtcagaatcaaagactaagcttaagagttcctcgcatatatcttgtgtcacaggatctacatgatggtgactgtactga

SEQ ID NO: 243837 - DNA, 164 bp, Homo Sapiens
tcttcctcctgctggtggcggctcccagatgggtcctgtcccagctgcagctgcaggagtcgggcccaggactggtgaagccttcggagaccctgtccctcaattgcactgtctctggtggctccatcagcaatactaattactactggggctggatccgccag

SEQ ID NO: 243838 - DNA, 358 bp, Homo Sapiens
ccgtctcttcagcatccccgaccagccccaaggtcttcccgctgagcctcgacagcaccccccaagatgggaacgtggtcgtcgcatgcctggtccagggcttcttcccccaggagccactcagtgtgacctggagcgaaaggatcagaacgtgaccgccagaaacttcccacctagccaggatgcctccggggacctgtacaccacgagcagccagctgaccctgccggccacacagtgcccagacggcaagtccgtgacatgccacgtgaagcactacacgaatcccagccaggatgtgactgtgccctgcccagtttcccccaccttcccccattgcttgccacccccgactgtt

SEQ ID NO: 243839 - DNA, 570 bp, Homo Sapiens
  misc_feature (407)..(407): n is a, c, g, or t
  misc_feature (414)..(414): n is a, c, g, or t
  misc_feature (440)..(440): n is a, c, g, or t
  misc_feature (461)..(461): n is a, c, g, or t
  misc_feature (475)..(475): n is a, c, g, or t
  misc_feature (487)..(487): n is a, c, g, or t
  misc_feature (497)..(497): n is a, c, g, or t
  misc_feature (553)..(553): n is a, c, g, or t
gtgttttattgtgcgagactcataagttggggatgtctaggaccgtgcgctattgacttctggggccaggggaccatggtcaccgtctcttcagcatccccgaccagccccaaggtcttcccgctgagcctctgcagcacccagccagatgggaacgtggtcatcgcctgcctggtccagggcttcttcccccaggagccactcagtgtgacctggagcgaaagtattcagggcgtgaccgccagaaacttcccacccagccaggatgcctccggggacctgtacaccacgagcagccagctgaccctgccggccacacagtgcctagccggcaagtccgtgacatgccacgtgaagcactacacgaatcccagccaggatgtgactgttgccctgcccagtttccntcaattncacttaccccattttgccttcaattncacttaccccattttgccttnatggttgccaaccngaattttattgnaacgaacggncttggagggacttgtttttaggtttagaagggaacttgaagttgaaattgaacggntttagagattgcttagg

SEQ ID NO: 243840 - DNA, 542 bp, Homo Sapiens
  misc_feature (420)..(420): n is a, c, g, or t
  misc_feature (479)..(479): n is a, c, g, or t
  misc_feature (511)..(511): n is a, c, g, or t
  misc_feature (525)..(525): n is a, c, g, or t
gagagttcatttttactatgacagtggtgtttattcctactactttgactactggggccagggaatgctggtcaccgtctcctcagcatccccgaccagccccaaggtcttcccgctgagcctctgcagcacccagccagatgggaacgtggtcatcgcctgcctggtccagggcttcttcccccaggagccactcagtgtgacctggagcgaaaggtagcagggcgtgaccgccagaaacttcccacccagccaggatgcctccggggacctgtacaccacgagcagccagctgaccctgccggccacacagtgcctagccggcaagtccgtgacatgccacgtgaagcactacacgaatcccagccagggatgtgactgtgccctgcccagtttccctcaactccaccttaccccatnttccctcaattccaccttaccccattttccctcatggttgccacccccggattgttcantggcaaccgaccgggcctttggagggacttgnttttttagggtttnagaaggggaaccttaag

SEQ ID NO: 243841 - DNA, 539 bp, Homo Sapiens
  misc_feature (420)..(420): n is a, c, g, or t
  misc_feature (448)..(448): n is a, c, g, or t
  misc_feature (480)..(480): n is a, c, g, or t
  misc_feature (492)..(492): n is a, c, g, or t
  misc_feature (498)..(498): n is a, c, g, or t
  misc_feature (505)..(505): n is a, c, g, or t
  misc_feature (511)..(511): n is a, c, g, or t
  misc_feature (526)..(526): n is a, c, g, or t
tgaaaagcgacgacacggccgtctattattgtgttagagatggtagaggctggtcctttgacctctggggccagggagcccgtggtcacccgtctcttcagcatccccgaccagccccaaggtcttcccgctgagcctcgacagcaccccccaagatgggaacgtggtcgtcgcatgcctggtccagggcttcttcccccaggagccactcagtgtgacctggagcgaaagtatcagaacgtgaccgccagaaacttcccacctagccaggatgcctccggggacctgtacaccacgagcagccagctgaccctgccggccacacagtgcccagacggcaagtccgtgacatgccacgtgaagcactacacgaatcccagccagggtgtgactgttgccctgcccagtttccccaccttnccccattgcttgccacccccgactgttnggttgcaacgaccgggcctttgaaggaactgntttttaggtttnagaagngaacttnaagtgnaaatttaacggcttnagagattgctttt

SEQ ID NO: 243842 - DNA, 570 bp, Homo Sapiens; identical to SEQ ID NO: 243839
  misc_feature (407)..(407): n is a, c, g, or t
  misc_feature (414)..(414): n is a, c, g, or t
  misc_feature (440)..(440): n is a, c, g, or t
  misc_feature (461)..(461): n is a, c, g, or t
  misc_feature (475)..(475): n is a, c, g, or t
  misc_feature (487)..(487): n is a, c, g, or t
  misc_feature (497)..(497): n is a, c, g, or t
  misc_feature (553)..(553): n is a, c, g, or t

SEQ ID NO: 243843 - DNA, 542 bp, Homo Sapiens; identical to SEQ ID NO: 243840
  misc_feature (420)..(420): n is a, c, g, or t
  misc_feature (479)..(479): n is a, c, g, or t
  misc_feature (511)..(511): n is a, c, g, or t
  misc_feature (525)..(525): n is a, c, g, or t

SEQ ID NO: 243844 - DNA, 941 bp, Homo Sapiens
ctcagcaccgggaataatgataccggcgaggcgtgtgatgctgactttggtaaggtgtggatgatgctaaccccccagggagcaggccccctccttggcttcattggctcccagggagtccccagtgagagtctgggaagatgacaacacacggggtgctggggtccctgccttgtcagaagctgtggggtatgaggggtctctagttgcatgttctgccttctgagagggagtgccagagggccagcaagaggttgggtggctggctgactcagggactccttcctgctgtgtgtttagattcttctctgactgcgtgctctggagtggagagcacagcagctcctcaaaagctgctgatcctggatgcgcgatcctacacgttagcagtggcccaccgggccaagggtggaggctgtgaatgtgaagagtactatcccaactgtgaggtcgtgttcatgggaatggccaacatccatgccatccggaacagctttcagtacctccgggctgtgtgtagccagatgccggatcctagcaactggttgtcggcactggagagtaccaaatggctgcagcacttgtcggtgatgctaaaagcagctgtgctggtggctaatacagtagaccgggaaggccggcctgtgctggtacactgctcagatggctgggaccgcacaccgcagatcgtagccctggccaaaatattactggacccatattacaggacgttggagggcttccaagtgttagtggagtctgactggctggattttgggcacaagtttggagatcgctgtggccaccaagagaatgtggaggaccataacgaacaatgccctgtgttcctccagtggcttgattctgttcatcagttgcttaagcagttcgcctgcctgtttgatttaatgaagcattcctggtaaactgtacgatttcac

SEQ ID NO: 243845 - DNA, 3659 bp, Homo Sapiens
  misc_feature (79)..(79): n is a, c, g, or t
  misc_feature (2688)..(2711): n is a, c, g, or t
  misc_feature (2762)..(2770): n is a, c, g, or t
  misc_feature (3029)..(3029): n is a, c, g, or t
  misc_feature (3065)..(3065): n is a, c, g, or t
  misc_feature (3094)..(3094): n is a, c, g, or t
  misc_feature (3123)..(3123): n is a, c, g, or t
  misc_feature (3181)..(3181): n is a, c, g, or t
  misc_feature (3200)..(3201): n is a, c, g, or t
  misc_feature (3223)..(3223): n is a, c, g, or t
  misc_feature (3309)..(3309): n is a, c, g, or t
  misc_feature (3317)..(3317): n is a, c, g, or t
  misc_feature (3355)..(3355): n is a, c, g, or t
  misc_feature (3427)..(3427): n is a, c, g, or t
  misc_feature (3439)..(3439): n is a, c, g, or t
  misc_feature (3445)..(3445): n is a, c, g, or t
  misc_feature (3458)..(3476): n is a, c, g, or t
  misc_feature (3481)..(3483): n is a, c, g, or t
  misc_feature (3537)..(3537): n is a, c, g, or t
  misc_feature (3562)..(3563): n is a, c, g, or t
tccaagccagttacacatcaggtcaacaaataacactgtgactccaccctcacaacctgtgcgaaagtctacctttgangcagccagtttcatggaaggaattgtcctggtcttgggtgtgcaggctgtaattttctttctttataaattctgcaaatctaaagaacgaaattaccacactctgtaaacagacccattgaattaataaggactggtgattcatttgtgtaactcactgaagccaaaatactatcttttaagatgtcccacatggaagacgctattccaggatctttaaatttccatggatgcatataggatgtttgggagcatcatccgtgaagaaaaaatcaattaaatcattgtgttcaacaggaatatttaaaatattctgcatgaatcctgtggctgtcttattttaaatagctgctgctgtgggattatattttttttccttaacatgccaaatataactttctgaaagtgatggaaaatgttgtcttgtgcagacaacatcatggctcttggcagtttaaatttagtaattttaatttagtgaacagaattgagaagaacgtgccaaatgagaatcaattaggtggatttttggctgtcatttcaaaagtggaataaatttattaatttagtagtactaaatggtatccttagattaaaattttgtgcttgataacagctgttttttctacattagaaataagatgccacacaaggaactacattccagatttaaagaaatgaaaggataccattagtgtgtataacagattattgttcatacttgtaaagcaccttatgtcattgagaatataaagaacagtgccttagaagacagtgaaaggtaagctctagcttaatgtctatgatttgttctttgacattaaggaaggtaaggattggtcagaggatgtaacttgatgtgagcagtagtaaacctgttttagatatcatactgttaatattttattgaaaatttatttcagagcggagaaacttaagctaaagtctgttatacagaattgaaagccttcgtatcttgaacctcccaacatttttcttatggctgttgaaaagtatagagctaaattgatttaattacactttcctttgtactttaaaaaaaagtatgctagcactattgtaccttgaaaggatttccaccagactgtcttgagtagtgacttctttggtgaggcaagaaggatatacattattttagaatcatttactatttaaatgagacaatcatattattttagaatcatttattttaaatgagacaatcattttaagttttaagataacagaagtgaccaatgtaatttcacaacacctaaggattttttggttgatcaggttactgtagatttttactgattgtcctggatgaatagactgtgctttttctttttctctcccttccttcttggtttcccatagtataataagcatgcatactttaacttctatagttttctcctttagagggtcgtcttcagttttagaggtttacttctcccttgcctttgactcattggactagtgcagaggctttaagtagtttaaaatgggcttttgcttttctaggtcattaacgttttttatttagtttctttagccaatagtggctgagtttcgcacttgattttcaatattttatagtaagaaatgacaaactgctttgtttcatttcataaacaaactctgcatttagataactattaaaggttgttaagatgaagatttactgtttctttgttactcgttggtacagctgtttgttttacttgcacatttgtacatatacttaatgttttcaagtgccttaattgtttaaaatctctggcttcaaagtttcttggggaaaggtcggtttacctcacattttttgtttccattagtaatattctaggtacctcacaaaatgtattatggtgccatggctgttagtttttagtgagtgctgtagattaattcgaaaataggcagaattccattcctcccaaggtgccaaaaattagctatactgatgtaattgtcatttacctgggtatgaattccctgacacacattcatgtcaacatatgtagcaaattttggaaaacataacaatttgaagcttctgtaattttgagcactgctctaacaacaagcataatataaaattagttagattttgcaagtctacaaatgagctcttgcaacagaactcacagcctttttacttttttcccctaactttagcaatgtagtatcttgagccattaatttttgggtttttttaaaatccagaaggtatatagaaaccttttcagatttttcatctgatttgttcttgcagatgttcttctatcaaataccttattttaccttacagatatttgttgcacaggcagatactgctgtatttagacatttctatttcagttcattaaaaactgcaaaaccaatctgtatcatgtaccaaactgacttaaaataaatctacatgtttattgcaaaaaaaccaccaaaacacaaagcaccaccacaaccccgaaagagcacgcaagaaaagaaaaacgagcaccatccattcccaccgcgaacccgccagaacacaaacgaacaatacaattagggccaacaccaccacacaaacgcgcaaaccacaaaataaccatcttggtnnnnnnnnnnnnnnnnnnnnnnnnaacaaaaaacttcaccataaaaaccctttttccttgtcgccgcaccctcgnnnnnnnnnatattgtgtgagacccgcacaagaagcggcgcctctctccgtctctcctcttcctcgcacaacagaggaaactcctcttcgccgcccccacacccaccaacacggcgcgccgcctcgaccgcgggacaccccccacccaccccactcacaaacataaacctcccgcgcccccgcccgcggggcgcccgagacgacacacacacacccaccccgtcgctgtgagtctttttttatctatgagaaaaccacacaaaacacnatcccaccgaccaccctagaggcgtcagggaggggntattcgtccttctccctggctatgcgganaccgcgcgccgtcgtaactccaacccacngcgcggcagcgggcccctgcctccccccctcacccaccaccacacagcgtcgacgcgngccggtcccccctccactnnccccctccctttctacgcgccnccgccctctactctcaaattccaaacgccggagactaattgctgagggcgtcccgcgcgcgcacgccgaggctgttttggtgtggngcgcgtgntgtggatgcatatgcagcgcgacgagaacacgggctgntccagtcgggggggaggaataaacagtaactacgtgatagatagagcgcagaactcaaccgcgcgcgccggncgcccctagatntgatgnatggaagccagannnnnnnnnnnnnnnnnnnaaccnnntcatgaggagggaggcagtcgacgcggatcgtacatcctacggtagcggtcagncccgccgcgcgggcgggtggtgttnntgttgatggtagattgtttgagtgatgtcgaccctgccggcggtgggaccgcgcgacacatcacttttcttcggcccccgccagagcggcacgaca

SEQ ID NO: 243846 - DNA, 460 bp, Homo Sapiens
ggtactgattttgtgggaatgtcaaatgagtgaacttaagtattctcttcctaatggtgcttattttaggaactatcagtgtttccttaaagagaaaatgaaaaaggaaggaaaaggctgaacgtcctttcatcatttagccaggacgttagtggggtgggtcatgacatccagcgcattttaagtgagaacatattgttgatttctctctttaaagttctgtattgtggtggttcttaggtaagtggacattataaaagtgctccaggagtttggtttctacagaaacttttgtcaccgtttgctctttcgtggtaaagggatagtgtctggagacacactctgatgacgtatgtacgtcagcacggttgatttggtggttttgttgaccgtggcatttatttgtgtgggtggttgtgttttcttttgaggagatcgacactttcaggtgtactgatgg

SEQ ID NO: 243847 - DNA, 910 bp, Homo Sapiens
cgagctcagtaccccgactagcccaaccatactctgtaaggaaaaaattgaattggaacgttcaagtccagtttgtgttcagtcatataactgggccagttgttaaccttacagtacgagtcatgtggccagaccttcaagtccaaggccttcagacactaaggatgggaaaatgggtatttttctttggagaaaagctggaaatataaacatggcatttttaggtaaagtttcttccactagttgaattttcatgcagatatttttccttaacgttggtgccagtcaagcaaagagtattatgatggaaaagaccagtccaagccccatcgctccggagtgggagccagtgttcttgctaattgtttctttctgcactaaccactcagatgtctaatttaattgttttgcagtcaaatactggatttgtaaccttcagggctgacatgctgcccagtttgcttcatcgggagaatagcaacaggtagacacatctcaaggctaaatctgctcatgtcgccactgctctcataatgacacacatgcagtaagaagacttttgtaaggggatttgagtacacccaaatgaaattgtgacaggatgtttgtatggttaacatctgatatcagaatgttaaaagtgccttctgtcttaaatctcaaaccaaatattttgtgtgttgaccttgggcaagaagaagtgtccttccctcctttcttcaccgtcaggtagaaaacctgcactctgcagaagggtcctgtgtgatcacttaatcctctggttgagaagcagcagtaatgtatttgcttccaacctgattaatcattttatgttgaaactagtcaatgagaccagtatctcttgagtgctttatttgccttctctttgaagggaggggacgggctctgc

SEQ ID NO: 243848 - DNA, 550 bp, Homo Sapiens
tctatttgtgaacttcttgagctgaaattttacgtgggctgagagatataccatttagggttttagtgcagcatctaactgtgattctgtccataaggatatgtaatatattttttcttaggttcactccttagctggctggtttagttgtaataccaaattcctaccataatccctgtctacaaaagttaggtttagattttagtttgcggaaaccttccctatatagagacagattaacttgttgatataaatttaatagagctagctcttggtaaatggtgaaaataatgagttttggttggttttatttggcagatgtttttagaaataaaagtacttagacctagtgcagcctctaggaaaagtcttgccttttcattagagaaaacaggaccaaggtttcagttttcaaacagctgttgttgaatgtgtagaacccagttccatctgttttggttcattgttacagaacttagtccagtcatttgggctaaaccaccaaacgcttagttcctttctcacaacactgtaccgatatccgcacgcc

SEQ ID NO: 243849 - DNA, 630 bp, Homo Sapiens
  misc_feature (15)..(15): n is a, c, g, or t
gccactctagtcagnggaaataggaaataaataagtatttatatgaagtggtaataagtgctgtggagagaagtaatgcaagtaaagaggataaggatgttggggagagagttgctattttctgttgggcagttagggaagaactcactaataaggtgacatttgagcagagaattgagagagtaagccttgagagcatcttgaagaagtgttcactcttctactgttcaactagttgtgtaaaccactagtggtcctctagtatccattgtctcctttctttatgtaaagaacctctaaattttctgttggcatatgaccactgaaaatgaagattagattttgtagctttccttacagctaggcttggtcatgtgattgatgtgtgcagttgccaggctgtgcccttaaaagaaagggtatgccttctccttcccttttccctccatctcactagttgggatgggacgtggcacacatggtggtaaattattttggaccttaaagatgaggactacttccttggagaaggcagaactactgaaggctaccgtggtagcctcagagtacttatatttggatggttatgtgagagaaaaaaataaactatcatgtgtaagcctgatatct

SEQ ID NO: 243850 - DNA, 644 bp, Homo Sapiens
gagaatgggttacgagttaagagaaacaaaacagtgaagtatacacgacacagtattggatatctaaatctggtatactcggggggatgttctcgaagaggtagaggctgcagccatgtttcaagttagtatcctaatataaaattacagcagtgggtatactaaagaaatatagctaaaaaatgtttgcatcttggcttgccgaggataataggtccaaatatacttgaccataaattctttagtaagatgaagctgtctctagttgttatcctcacagtgtcaacattgaaccatgacttctgagattcatctttaatgctgaatacgtacttgacttgctttttttcttcagttgaatttctagcatcccttttacccattcatttattggctcagcttgttaattctaatttgcctttgactgctcagacgtggcttgaaagacttgagcattgttctgatgttgagggaatatttgctttttctgtaatgactgcagatcagatgggagctcttttacaccggtacttgaggctcagctcatcaagagcttcgctatgatgtgtaccgaacacaggcttctagttgacgtgggagtggtagtaatgagctgcacttcctggaggacgtagccttgtaac

SEQ ID NO: 243851 - DNA, 535 bp, Homo Sapiens
aggtaactgtgctacagataaaaaatgcctaaggtgttgtactgcaaagatccagtctattcaatctccataactacagctgtgaaccataggacaggtgcccggcccagttaggactattggccaaggcttgtcactttctgaacatcagttttattagctctaaaatacgactggtcgctcgatctattagggtagctgtctacctttcatacagccttccatcctctgacacccatgcctgacacccatgccccgtcagtaacatgcttgaaggaggccatgcgcaagtgtcgttgtacaattggccccaccaggcagaaaatcaccagacaaggtgatttctcagcttcttttcagctctagttttatacatctcaagttggaaaggaactttcctcacattcatcatgttcccaaggtttctctttgagatgaatactgaagcttgaactctactaatgggttttcccagtttcactaaatttgaagagttgctctagcacaaattctctaatgtacaaattctctaacg

SEQ ID NO: 243852 - DNA, 555 bp, Homo Sapiens
tctctttacaaccaattgataaccaatcacatagttttatcagtgtatttagacactatcttgaaaatcagatttatatgctgtgtatcacataatgccttgcctttaacatttactttttttgtacactttttcagattatttctggaaacatatcaatataattacagtgtttgggggtgtctttaaatatattaggttatacattagtcagcattttaaagacatttcttcccaagtacgagaataggcatctttcattttcattttattttgtattacttaatcttttaagcaagccaaaatttattctcagggtcagctgtacactttattgaccagtacttgataatctctctgtatatgatgaatacatttttatacactaacattagcattaacgggtgatagttgccatggatataatggaattatggctggactttcttttgaaagataacttgatgtattctgtgtgtatggtttttccccagagttagtcatacagttcatttggatttcaggtactttaaactctggtgcacagagtgcatc

SEQ ID NO: 243853 - DNA, 551 bp, Homo Sapiens
tcttaaaatgagcaccctcaggactgttaggtaggagaggtgttagatttcaagtagatacaaataggtccagaaggtaaaatgaggacccaaggatagaagagcgacagtgatttcagctgagcctcagttccaagcacagaacttttcagaaacagaatgggttgcataatatgtccccttttaaaagacactttgcagacctggatgcctgtgtgttggcatggagcatagaggtttcctgtcctgggtaaacatgctgtgctggactaggttctctctgaaagtctctccctgcttcaggagtctagaattctaagtttcttctcaggagactccaaaatttactagaatgtcctgaaccacatctttcataatgttgctgactcaaagactcttgaaggctcctgaccacattattcgcaattctaactctcttgccaccccttccccatgacccatgtacaattacatgctctagatcttgctcctcatagatgacataagtctgaaatatcaacaccttgcagccctatatcagtgtgaaacga

SEQ ID NO: 243854 - DNA, 264 bp, Homo Sapiens
ggcgttatccgtacagtagaatactggtacatgagaagggagaggccatcactcaactgactttgcattgccctcctgggtctcttctctcagttgcctgctttttgttttcctttagtggatgattgcacagaatgtgtttttggccaagtgctacaaaatcaatgaagttcccaaaagtcttgtgcatttcttgagagcaatatgagaactgaggtgcctttttctcaaatgtgtacggataacggggacctctagatcacc

SEQ ID NO: 243855 - DNA, 562 bp, Homo Sapiens
cggaccggcataccgtacaagcgtgctgaataacgatatgttttctcagattttctgtcgtgcagtttaatttagcagtccatatcacatgcaaaagtagcaatgacctcataaaatacctcttcaaaatgcttaaattcatttcacacattaattttatctcagtcttgaagccaattcagtaggtgcattggaatcaagcctggctacctgcatgctgttccttttcttttgttcttttagccattttgctaagagacacagtcttctcatcacttcgtttctcctatttggttttactagttttaagatcagagttcactttcttcggactctgcctatattttcttacctgaacttttgcaagttttcaggtaaacctcagctcaggactgctatttagctcctcttaagaagattaaaagagaaaacaaaaaggcccttttaaaaatagtatacacttcttttaagtgaaaagccgagaatcttctctatagctaatttaagctatcggtaaccaagagggatgccaagaggctagggcctcagagagaacggtacg

SEQ ID NO: 243856 - DNA, 1081 bp, Homo Sapiens
aggacaagagaaaccaagcccagctacagtcagaagcacagatcctgtcacgacaaaggagactaaagcagtctcagaaatgtctactgaaataggaacaatgatctcggtatcatctgcagaatatggtactaatgcaaaggagtctgtaacagactatactacaccctcttcttctttgcctaacaccgtggctactaataatacaaagatggaggatactttggttaataatgtgcccctgcccaacacccttcccctccctaagagggagactatacaacagagctccagcctaacttcagttcctcccactactttcagcctcaccttcaagatggagtctgcacgcaaagcatgggagaattctccaaatgtaagggaaaaggggtctccagtaacttccacagcacctccaattgcaactggagtcagcagtagtgccagtggaccaagcactgctaattacaattcgttctcaagtgcatccatgccccagattcctgttgcttcagtcactcctacagcatcactatcaggagctggtacatacactacctcttctttgagcacaaaatctacaaccacatcggaccctccaaatatttgtaaagtgaaacctcagcagttacagacaagcagcctgccttctgcaagtcatttttcacagttaagctgtatgccttcccttattgcccagcagccacagaatccgcaagtttatgtgtctcagtctgcagcagctcaaatcccagccttctatatggacacaagtcatttattcaatacccaacatgcacgattggctccgccatccttggctcaacaacagggtttccaaccaggtctctctcagccaacttcagttcagcagattccaatccctatttatgcaccactgcaagggcagcatcaagcccaactgagtttgggggctggccttgctgtttcccaggctcaggaattgttcagctcctcacttcaaccatatagatctcagccagcttttatgcaagcagtcttatcccagccacctgctggtcctttctgtacggataaccgggatcctctagacaccaca

SEQ ID NO: 243857 - DNA, 691 bp, Homo Sapiens
gtgaacggatgagaagccatgggaattgagcccttgcattccatgatttactgtgccagatgcttgagctagtgaagccagctgttgatggcaaaataactctaagagatctgaagaggtgcagaatggctcacatcttctatgacactttctttaatctggagaaatacttagaccatgaacagagagatccctttgcggtccagaaggatgttgagaacgatgggcctgagccctcagactgggaccggtttgccgctgaggagtatgagacgcttgttgcagaggaatctgccccagcaccattccaggaaggctttgaagattatgaaacagatgaacctgcctctccctctgaatttggaaaccaaagccataaaatattaagtgccagccttccagagaaatgtggaaagcttccatccgtggatgaagaatagctgccggtgtctaccatgaaacgaagatgtgtattttaaatgtttctttcttgtgaagagatgttctcgtttgcatactgctttttaaagactttgatttctccacagtgtgtatcatctgcactaggaactttgtttttaagccataggtctggatacacatttaacttaggaggctcctcccatttgcctccaacctcttacggagctctcctcagaagtggtacggatcacgcgggatcctcagacgc

SEQ ID NO: 243858 - DNA, 290 bp, Homo Sapiens
ataaacaaaaatgttatatgttgaaagagtagatactttatttataaattacagtctgaaggttgatgctattttgggataatttgttttgctaattggataattctaacaatgcagaatacctagtcacgactgtcatcaaaaacattcacaatatgtttcattctatttttagtgactctgtttaaagagtttctgaaaggaaagaaattttttctatttttattatctttagcagtactgagtgtcatagctgaatattttacagactttctatgagattattttta

SEQ ID NO: 243859 - DNA, 584 bp, Homo Sapiens
tatctctaacattacaaaaggggaggagaccaatttctgccctttaagcgctcatctgcacaggaagcaaccagaaggaggaggtccctgagtcgctttaaaggcatcagttctgattaccgtactcattctggcatggccatcaaatgcaagaagtgtgaagaagaaatggatgctgttttaaaagaaggctcgtcctgacacagcacactgatcaccatctcactgtccctttcacaagcttactccgtctttgagcttcacagctgcagtttgggaagaacaggctagcccaggcctccaagagcatcccagagaggaagaccagccaatggaggtcctgagtgagagggacatttgccctaatgtttggtgaggtacctaacaatgcccctaaaccaaggatagcgagtggcagcaaagtggtatcacactggagcggaaacctattctgagcccgggagaggctaaacactcacatttaggacacatcttaagtacagcacatagtaaatccttaaacattaaaaattactcctctgtgtagttcgtactgctcgtgaatgcgacaaccaagtcaatac

SEQ ID NO: 243860 - DNA, 692 bp, Homo Sapiens
tccgtacaggaggagcagaccctgaacagttagaactatggaaatcgctatgctttgtgttgtcacaggagttaaaataggaataccctgcatacaataaatatttattggataaataactaagcctgatacccttttcaatgcgttatacagactctatcatcacaccactaatctaagttctcagaagttaaacattacaagacttcagaacaacataggcgtctttggctccatttaacagaagaaggaccatagtgatcatttaatctctatgagtctgtcttatcttctggaagaggggcctaacaccatttccttttgcaaaaaggtagctgccttgcttccagttctaccatcctctagcaacccatctttctcttatttgatgtctctgatcagctcctcttccagcacaaactggagaaaggggatcctttctgtttccttggaggcttctgaactcaattacaggtctgcattaaaaatgtatggagaaagctggtgatcagtttgtacatatggacaagttcaaggcagtatggtctacttctgggaaggcctggattccatttgctcctgatggaaaaaccctagtcccagcagtgtttagaatgaactggagaaggcagatgggtaccagattcaggaagaggtactgatagaccaagaccagttctttctgtttcaag

SEQ ID NO: 243861 - DNA, 1497 bp, Homo Sapiens
  misc_feature (301)..(314): n is a, c, g, or t
  misc_feature (786)..(786): n is a, c, g, or t
  misc_feature (798)..(798): n is a, c, g, or t
  misc_feature (1450)..(1450): n is a, c, g, or t
aaggcagactaaaacagttattttctataaaaatctggaagcaaagaatggggatggggagagctacgtggtagtatgtttttattaggagaataatgcaataaaatatgtaatgtcttttttataaagcaaaaaagacaataattgcatttatgagctcggcaggatctgttcttgtcatagccattgactatacatttgctactggtgattcagtttttaattttttagtcacaggaaatttttaactctactgtagatgcatgtccatgcattttctgtgttatggaaatccactgannnnnnnnnnnnnncaaatggtggtacttgcaatctgttttataattagtgctcccatttaaatctaatttataatttttattttaagcagcaaatgaaacaaaaatggccagttttaagattgtgttgcctgtaacacaaaatgttacgaaggtttaggaaagcctctttgatttttgtttggccttgcattgccttggtaaacgtaaaaggaaacagtacacttggagctaggaaaccaaagcaagctttgtgaaactggcacagtgatagagaattgctgtggagagttatagagcaaagggatgggtccttgaggcctgccagtgtgtaaaggtgttcaaataaagggctgtttctacaggtaacattaaatgtgaactcaacacttccagagtctttaaagggtttctatgtgtatcagtgtaatagtgttttaccaccaactgcctttctttgttcctagttactgtaacaaatatttgnatgatagaggtnttattaattttgtttatccagaccattaatttttatttgtttttgttctatgtaatcaaataaaatttgagtaacatggtaatgggtaaggattaatggcatgggttatttgggaccagaaaaaaagtgccatagaagaccaataactgtttagttgaggctagtctggaacctttcattagagcaatatttggttattgcacttcatttttatttactaagaaatgcaatttgggaatttttaatctgttatgctttgtttatcaaaccttgatttttaatgtaagacctttttataagaactaggctttaaaaacacccaacgcaacatttattttttcggccacaaagtggacggttgggaacctccccttttcacatttccttggccgaggttcccgaagctaaaggtagggcgcatccacctttttttagaaaaattatggtgggaaacctttacaacatatcttggcgaccctctccctgttccagagaaatggcttttaatcccaaattatggggggtgatatttatgggagacccgggccgaaataacggtgtttatacaaaatatagaacgtgttgtgttggaaaggtggggcgcaacacgcccccccttcttttttgtaacacgccccaaagactgtccccntttattggggggcatcagaaaaaagactttcttttctccgaaacgcc

SEQ ID NO: 243862 - DNA, 509 bp, Homo Sapiens
aatccgacacttatttaataagacgggatgtaaatttacaatgacaatgtgtattttaagaaagaaaatgacattattttgaatggtactttgtggaaagaggggagaataaagttatgctgtgtacatcatttgcagatcaccaaaaacactccgctgcccgtgaccgccggtgggtgtgtccccgctcccgtcgtcccgcccacctcaaaccccgcaggtgtgcctcccagcggattatttattgtagaaagtgtattcatttgctttataatgaaaaatacatttgcaaaggtatattgatacgcatttttatacaggcacataaaaattcaacttggcttgggagcagaatgcattgcattgtataaatgactctggcctgtgtgtactttgattttataacttgtaatcttttgtttacaatgaggggctttctgtaacttgttttaatttagaacactttggtagcaatagaaactttggatacatttttgtatggtacggat

SEQ ID NO: 243863 - DNA, 596 bp, Homo Sapiens
cggtacacgcacttcaccatgcactatataatttaatcttctcagtaagttcagttaccgagcctgcacttgtgggaaaatgggattcaaaccctgaatgttggctccacaacctgcacttttaactgtcaatcatattaagattaaatttaactgtcaggaaaatagaaaaatgcatcaaactagcaacctacagatacctgtaacacactactgggtcccaagtagtagtctaagatttaggtgaggagcagtttatgtccaagacaatctaacaccaagacaatggtgtaaaatatagaatgtcagtgagtcaatggttacattaattacaaagtttatgtgtcacttaatttggtttttcttccccattcaaatgaatcatcagattttggcatcctaggaacaggataaacgtggtcatattaattctcaggtaaggaggcctgcctagacatgacataaaagcaaatacagtgataacatgatctcagtgaagctatgactaaaaaagtctcaaatagaaacttcatggaatgagaaatggctctaccacgtccaatactagccagcttacacctaacaccctcccccct

SEQ ID NO: 243864 - DNA, 646 bp, Homo Sapiens
gtaccatctcattctgcttcttaagttttctgctctgtactacccataaatctaaagagttgcttctgattgctacatagtctctgtgtgtgggctgaattgtgcctcttaaaatggtattatgtcctaatccctgatacctgtgaacgtggccatatttggaaatagggtctttgaaaatgcaagttaagggaggtctttagggtggggcctaattcaataggactagtgtcctcataaaaagaggaaagtgccaatgtgaagacaaacacagagggagaatgctatgtgacaagaggcagagactgaagtgatgcagctgcaaaccaaggaataccaaggattaacagctactaccataatctacaaataggcaaggaaagattctacccagattctcaaagaatcatggtgctgctgctactttgattttaaacagaagtgtaagagaataaatttctgttgtttcaagctcccagtgtgtggcagtttgatatggtagcactagaaaagctagtatgagcactcacaaattttacttatctacattcagactgatatgtggaacacacaggctgtcaccaacttcctgccactacaaataatatggcaatgaatacccatgtacatatcctggtacggtatt

SEQ ID NO: 243865 - DNA, 319 bp, Homo Sapiens
gaaacttgtttttactacatttatatgtctgatacatatacggctttggagacaatcaagtaacaactgaaaatgtgaaagtaaccatatctgacaaaattcccttgaatttttatcctttgcttgcaacatttaagactcaaagtcactggtatattggattaagttttttcctgttaatgcaattatagaaatacatcggagacacaacaaatgtggccattacaggtttcataaaattacactgacttggctgttacttgatcttaggaaacagcacagtttaagataatgtatagccgggtcctctggtcagcct

SEQ ID NO: 243866 - DNA, 506 bp, Homo Sapiens
taaaagaaacctagaagttatttgttgtgctccttggggaagctaggcaaatcctttcaactgaaaaccatggtgacttccaagatctctgcccctccccatcgccatggtccacttcctcttctcactgttcctcttagaaaagatctgtggactccaccaccacgaaatggcggcaccttatttatggtcactttagagggtaggttttcttaatgggtctgcctgtcatgtttaacgtccttggctgggtccaaggcagatgcagtccaaactctcactaaaattgccgagccctttgtcttccagtgtctaaaatattaatgtcaatggaatcaggccagagtttgaattctagtctcttagcctttgtttcccctgtccataaaatgaatgggggtaattctttcctcctacagtttatttatatattcactaattcattcattcatccatccattcgttcattcggtttactgagtacctactatgtacgaatatccgct

SEQ ID NO: 243867 - DNA, 192 bp, Homo Sapiens
ccttctcatgagaatcatgtgcatggagggccaaaggagagacaagtgctcacaaggatatcatgagcacttatgaatgtacaaatgagtgctctccagtcagtgccatctttatattgttccggtttataggcaatgccttcatctttacctacagacacatgttgcctttctgtttcttttattgttttt

SEQ ID NO: 243868 - DNA, 462 bp, Homo Sapiens
gtacatagcgtttctcccgtacttttgtagcatttttcatactctaataatctgtaactcgtataatcttctcctttagaccaccctcaaataccttactttcagtcctcaaagcttagaacagtactctaagcactaacttaatggtggttgaggaaatgataaacaactattaaagaaatgaatgaataataaataggcctattcatgtactttatatttgcaaaaatctctctcaatctaaagtcatttcttaggtgacaatggtccacatgcaataccatccactgcaatatttatttaaaagggcctccattctaaagtaaccaccagaaaattcacatgttctagacggactgaggtcacaggttccaaatggagaacagggtgttagctgccctcactctagttaaagcatactgatgttctataataatctactggggtgccaatgacaatcac

SEQ ID NO: 243869 - DNA, 724 bp, Homo Sapiens
ggaaccagatttgttagaagctcagagcaacgcttcagattcagagaaaatgtcgcagagctgacacgatcatatcagcgtgtagatgtaacgacggaacacatgcagaacacataatttaatgtaacccatgactacttaccggagccctatcagcccttttaataacatcaggcctaattatatgattccactttaactctatactcttactatctctaggactattaaccaatactttgacaatataccaatggtgacgagacattattcgagaaagcactttccaaggccaccacacatcagttgtccaaaaaggcttacgatacggtataattttatttattatttccgaggttctgttcttcactggattcttttgagctttctaccactcaagcctagcaccaacacccgaattaggaggttgctgaccaccaacgggaattcacccactaaaccccctagaagtacccctactaaacacctcaatcctcctcgcctcaggagtatccattacctgagcccatcacagcctaatagaaggggaccgaaaacacataatccaaatagcttactggtcctcaccctgcacagtcggtgcttacgtaactgctcctccatagttttaatctgtactaactccccaaatactacctgctttcaactgtgatctacaaggtcataatctgccactgtattgctttcccttttctgtacggcg

SEQ ID NO: 243870 - DNA, 1723 bp, Homo Sapiens
ctttaagttagagatcggagccctaatctcccctcaatggatgccacaactagatacatccacatgattcattacaattacatcaataattataacattatttattttattccaactaaaaatctcaaactactcatacccagcaagcccagaatcaattgaactcaaaactcaaaaacatagcaccccttgagaaataaaatgaacgaaaatctatttgcctcttttattgcccccacgataataggactacctattgtcaccttaattattatattcccaagcttactattcccaacacccaaacgactcattaataaccgcacaatctcgatccaacaatgattaatccaactaacatccaaacaaataatagctattcacaaccaaaaaggccaaacctgatcactaatacttatatctctaattatattcatcggctcaacaaacatcctaggcctactaccacactcattcacacccaccacacaactatcaataaacctgggtatagcaatccccctatgatcagcaaccgtattcacaggattccgctataaaaccaaaacatcactagcccactttctaccacaaggaacacccgccctattaattcctatgctcgtaattattgaaactattagcctatttattcaaccagtagccctagccgtacgactgacagccaacattacagcagggcacctattaattcatctaattggaggggccacattagcactactcaacatcaacactataacagcttttatcacatttactatcctcattctattaactattcttgaatttgcagtagctctgatccaagcttatgtgtttacactgctagtaagcttatacctacacgacaatacataatgacccaccaaacacatgcataccacatagtaaacccaagcccatgaccacttaccggagccctatcagcccttttaataacatcaggcctaattatatgattccactttaactctatactcttactatctctaggactattaaccaatactttgacaatataccaatggtgacgagacattattcgagaaagcactttccaaggccaccacacatcagtcgtccaaaaaggcttacgatacggtataattttatttattatttccgaggttctgttcttcactggattcttttgagctttctaccactcaagcctagcaccaacacccgaattaggaggttgctgaccaccaacaggaattcacccactaaaccccctagaagtacccctactaaacacctcaatcctcctcgcctcaggagtatccattacctgagcccatcacagcctaatagaaggggaccgaaaacacataatccaagcactatccatcaccattgcactaggcgtatacttcaccctcctccaagcctcagaatattacgaagcaccattcacaatctccgacggagtgtatggatccactttctttgtggctacaggatttcacgggttgcacgtaatcatcggatctactttcctagcagtgtgcttactacgacaactaaaattccacttcacatccaaccaccacttcggctttgaagccgcagcctgatactgacacttcgtagatgtagtttgactattcctttacgtatctatctattgatgaggatcctactcttttagtattaagtagtacaattgacttccaatcaagcagtttcgtaactccga

SEQ ID NO: 243871 - DNA, 615 bp, Homo Sapiens
acttggaaaaccatttaggttgggagagggaacagttggggtgacctgaatgtttaggtaccaggagaaagatgaaggctccagaggcgaagctggacctgccaggtggcaattccatggggagagaggtgacacctttgctagcttggtggtcgggtccccgtcacaggtggaatattgttcggggcctgcaggccccgaacaatcaggccccgttctccatatgatacatacactcagaccccttcatcaaccgattctttaaatacctactactattcttaatcactataataatcctcgtaaccgccaacaacctcttccaactatttatcggatgagaaggcgtaggaattatatcattcctgctaattggatgatgacacggtcgaacagacgccaacacagctgcactacaagcaatcctatacaaccgcatcggagacattggatttgtcctatccatagcatgattcctaacccactcaaacgcatgagatcttcaacaaatctttatactaaacaatgaatgcccaaacataccattaatcggcctactcctagctgcagcaggaaaatcagctcaattcggactacatcattgttcggggcctg

SEQ ID NO: 243872 - DNA, 588 bp, Homo Sapiens
cctcccccttatactaatagctagccaatcttaccttatcaaaagaaaccacaacccgaaaaaaactatatattaccatactaatcttactacaactattcctaattataaccttcaccgccaccgaactaatcctattctatatcctattcgaagcaacaatagtacccacactaattatcatcacacgctgaggaaaccaaacagaacgactcaatgcaggactttatttcctattctataccctagcaggatccctacacactgctggtagcactagtttatatcctaaataccacaggctcactaaacttcttaattatccattactgatccgaccacaactccaagttccatcccggggaggccaacttcaagctgaagttaattaaacgcaataatcaaactgtcttggaacagtccatcgaaaccaccaaccatgtcgtgtccatcaccaccagtggccctggaactggtgacagtgattctgggatctcggtgagtgaaacccccatcatgaagcctggaaaaccaaaagcggatgccaagaaggtgcccaagacccgaggagatcacccccgagaacaa

SEQ ID NO: 243873 - DNA, 493 bp, Homo Sapiens
gaaagccttttcagggagctctaaccttctttcccatcacagaattcattctggagagaaaccctatgaatgtagtgactgtgggaaatccttccggcagcgatctcaacttgtagtgcatcggcggacacatactggagagaaaccttaggagtgcagtcattgtgggaaagctttcatccagaggtctcccctcatcatgcaccagaggacgcatgtcggtgggaagagctatcagtgtgacgtgtattaagccagcggttgtgactcattgaacatcagaggacatatcctggagaaaagccctacgaatgcattgattgtgggaaagccttcaatgatcgctcaacccttagtaaacacgagaggacacacactggaggcaaccctataaatgtgaccattgcgagaaagcctttagccaacggtgtctacttactaggcagcagagaattcatactggagagaagccctgtgaatgtacatatgtgaa

SEQ ID NO: 243874 - DNA, 208 bp, Homo Sapiens
taaaccattcaaatatccacccaagagtggtggcacgcttgggtggtagttttggaagcagtcagttgtgctaggacttatttaatatgttgtgaagagaagagtgtcttcttgaaagccttatgtgtccatcagctactaaatgtagaacttaaataagttgctcacatctgttcttttagtgttttgtggatatttgaatggttta

SEQ ID NO: 243875 - DNA, 548 bp, Homo Sapiens
tcgcctgaggatccccgtacagcagctatccaagcatacttccagatgggtcaatattctctcgagttgaagaagactatctctggaggataaaacaactaggatcacactctccagtagctcttctgaatacactgttctactttaacactaagtattttggcctgaaaacagtggaacaacacttaagactttcctttggcactgtgtttaggcattggaaaaaaatcctttaacgatggaaaacaaagcgtgtcttcgataccaagtgtcttccttgtgtggaacagataatgaagataaaattactactggaaaaagaaaacatgaagatgatgagccagtatttgaacaaattgaaaacacagccaatccttcctgatgtcctgtgaaaatgtttgaatgctacttgtctaaaagtccacagaatcttaatcagaggatggatgttttttatttgcaaccagaatgctctagttctacagatagccctgtctggtatacgtctacttcactggaccgaacacttggatagctgctgttttggg

SEQ ID NO: 243876 - DNA, 359 bp, Homo Sapiens
  misc_feature (132)..(191): n is a, c, g, or t
ttaaactggagattatttgcaagatatgagttactagcttattatactgaattacagtatccaattagtgctgtgtttgtttgtttgtttatttatttatttttgtgatggagtcttgctctgtcacccagnnnnnnnnnnnnnnnnnnnnnnnnnnnnnnnnnnnnnnnnnnnnnnnnnnnnnnnnnnnntaaaatcaagataacctcttgaatgtaatagctcatagcactttaatttggcaagccatttttcctgttttattataaatctatattaggatgtttgaatatgggtttgaaatatttcactacccgtgctggaaaaagggtgggttgatagccagcttgggagtgctt

SEQ ID NO: 243877 - DNA, 741 bp, Homo Sapiens
aggagataagcaggagcatgcatgaagagatgagtgtgttctaataagtctctgaaagccagtggctttatgacttttaaaaaaaattacaaaccaagaattttttaaagcagaagatgctatttgtgggggtttttctctcattatttggatggaatctctttggtcaaatgcacatttacagagagactctatgaacaagtacacaaatttttcaatttttacatatttttatattacttatcttctatccaaggaggtctacagagaaattaaagtctgccttatttgttacatttgggtataatgacaacagccaatttatagtgcaataaaatgtaattaattcaagtccttattatagactatttgaagcacaacctaatggaaaattgtagagaccttgctttaacattatctccagttaattaagtgttcatgtggtgcttggaaactgttgttttcctgaacatctaaagtgtgtagactgcattcttgctattattttattcttgtaatgtgaccttttcactgtgcaaagggagatttctagccaggcattgactattacaatttcattttggtggagtttagttttaggttttattgtatataaaatcctgcactgaatctgtgtctcctctgttacctacttttgctcagtgaaatttaagtttttaaatattttcagtatgtatttttactactgcaagttttgggtctttaaaacgtcaagtagca

SEQ ID NO: 243878 - DNA, 589 bp, Homo Sapiens
gagtacgccccataaagatctgtgacggcagccccagacctgcctggcatcctgacttctgttccagagcaaaggtcattcagccgcttgaatcagccttttccccccacccggtccccaactttgtttacccgataaggaaggtcagcattcaaagtcaagaagcgccatttatcttcccgtgcgctctacaaatagttccgtgagaaagatggccgggaactcgatcctgctggctgctgtctctattctctcggcctgtcagccaagttattttgctttgccagttggaaaggcaagattaaaataccaagttacgcccccagcagtcactgggtcaccagagtttgagagagtatttcgggcactacaaaactgtgtggagttttatcctatattcataattacattgtggatggctgggtggtatttcaacccagtttttgctacttgtctgggtctggtgtacatatatggccgtcacctatacttctggggatattcagaagctgctaaaaaacgggtcaccggtttccgactgagtctggggattttgcctgtgaccctcctagtgcccttggatagctgc

SEQ ID NO: 243879 - DNA, 483 bp, Homo Sapiens
  misc_feature (28)..(28): n is a, c, g, or t
agccaaatattgacattcacaacttcgntgggaacttttacccgagaagacagcgaccccccgatcagcgagagcctgagcatagagaacacgctgtgggctggcactgtggtcgcatcaggtactgttgtgggtgttgttctttacactggcagagaactccggagtgtcatgaatacctcaaatccccgaagtaagatcggcctgttcgacttggaagtgaactgcctcaccaagatcctctttggtgccctggtggtggtctcgctggtcatggttgcccttcagcactttgcaggccgttggtacctgcagatcatccgcttcctcctcttgttttccaacatcatccccattagtttgcgtgtgaacctggacatgggcaagatcgtgtacagctgggtgattcgaagggactcgaaaatccccgggaccgtggttcgctccagcacgattcctgagcagctgggcaggatttcgtac

SEQ ID NO: 243880 - DNA, 952 bp, Homo Sapiens
gtctgagcccgggggcggccgcggcgaggaccgctcggccggattggaagtgtcggtcgtgcagaatgtggtggacgtgtctgtgctgcagaagcacctgcgcaagctggtgccgctgctgctggaggactgcggcgaggctccggccgtgctggaggcggtgctggaggagaagagcgccctggagcagatgcgcaagttcctttcggacccgcaggtccacacggtgctggtggagcgctccacgctcaaagaggacgtcggtgatgaaggagaagaagaaaaagaattcatttcctataacatcaacatagacattcattatggggttaaatccaatagcttggcattcattaaacgtactcccgtgattgatgcagataaacccgtgtcttctcagctccgggtccttacactcagtgaagactcgccctacgaaactttgcattctttcattagcaatgcagtggctcctttttttaagtcctacattagagagtctggcaaggcagacagggatggtgataaaatggctccttcagttgaaaagaagattgcagaactcgaaatgggactccttcacttgcagcaaaatattgaaattccggagatcagcctgccgattcatccaatgatcacaaatgttgcaaaacagtgttatgagcgtggagaaaagccaaaagttacagactttggtgataaggttgaagacccaacatttcttaatcagttacaatctggagttaaccgctggatccgagaaattcagaaagtgaccaaactggatcgagatcctgcatcaggaactgccttacaggaaattagtttttggctaaacttggaacgtgcgttataccgcatccaggagaaacgggagagcccggaagttctcctgactctggatatcttgaaacatggcaagcgcttccatgccaccgtcagttttgacact

SEQ ID NO: 243881 - DNA, 822 bp, Homo Sapiens
tcggtccagtaatagctggagcagagtctgttgtccgggctgtgatccaccctgactatgatgccgccagccatgaccaggacatcatgctgttgcgcctggcacgcccagccaaactctctgaactcatccagccccttcccctggagagggactgctcagccaacaccaccagctgccacatcctgggctggggcaagacagcagatggtgatttccctgacaccatccagtgtgcatacatccacctggtgtcccgtgaggagtgtgagcatgcctaccctggccagatcacccagaacatgttgtgtgctggggatgagaagtacgggaaggattcctgccagggtgattctgggggtccgctggtatgtggagaccacctccgaggccttgtgtcatggggtaacatcccctgtggatcaaaggagaagccaggagtctacaccaacgtctgcagatacacgaactggatccaaaaaaccattcaggccaagtgaccctgacatgtgacatctacctcccgacctaccaccccactggctggttccagaacgtctctcacctagaccttgcctcccctcctctcctgcccagctctgaccctgatgcttaataaacgcagcgacgtgagggtcctgattctccctggttttaccccagctccatccttgcatcactggggaggacgtgatgagtgaggacttgggtcctcggtcttacccccaccactaagagaatacaggaaaatcccttctaggcatctcctctccccaacccttccacacgtttgatttcttcctgcttatctccgcgtatttc

SEQ ID NO: 243882 - DNA, 1058 bp, Homo Sapiens
tagataaagcagcatctggtatatttgtactgaggagacatctgggacatgaatcatgaatcttttggaaacagttgtaatcaccattattcatggaggaaggaggtcatagtgatttctgaattgccccacctgctggaccaaagagaccctaacaattttagagtacttaaactttattgggatgaaattagaaacatttaagcagaagccaatttctagcatatgaaaattagattttaatattcttaattcaacattaaagtttccatattttccacttatttaaaaaatctaaacaatgttctacttactcaacgtagagtgagaggtggttaaaatttggggaagaaattttatttccagtaagataatatgcttcagtgttatttttatttctccaacatgattgcttgtgtaatgacaattctacgtagttattatatcactaagcagagacttactaccgataattaaaaaatgttcaaaaccagattaataataatttattttgccaaataattcctaataagattctctggaaagtaaaataccatggaagttttataaatatgacttaacttatataaacccaataaagattgcgtttgcgatttaaaaatgtttagttggagtaccctttgtaaatgttcttatatgccccggggagcttggtgttccaatcttgcccataggataggctggtaactctttgggggaggacaatgtcagcaactccttttgccttgaatgctgaaggtagaactaaacacttgccatgcttacataaagctatattgagcagcaatggcacacagaactagatacaagcttatccctttgttttcattaagcttttagggctctagtataaatctccttaaaaaatacggatctatcttctgtttctttggtattccccacgtgcactgactattggatagaatacatagcaaactttaataaatggcaagctaaaagtatcttttacagatagctttggcacagaagtttatgggtgcaacctttttatgtacctactttcctgctattgccag

SEQ ID NO: 243883 - DNA, 612 bp, Homo Sapiens
  misc_feature (526)..(543): n is a, c, g, or t
atggagggaggaccgcagcaaagaatgctgcagccaccagaagctggaggagccaaagaacagattcttccccagagcctcttcgagcaggagcatggccctacagataccgataaaactgatattggacttcctggcctccagaactatgggaattaaatttattgtttcaagctatcaagtttgtgattatttgttactgctgccatagtaaattaatacaggagcatgcaggacagatctgtaatggcctgaactgaatttcaaggggtgtggaaaacagttactctttaacaccactccgtcttccccattagccatttggataagtcaaagatagccttagccatctcctatcttagttacttttctccttcaactgtattttgccattgtcgttgccattgcctctgcctaactgcaagccatcatcatctctcacatggactatgacgacctcctcatctccctgtatcttctctaatgcttctctcatatacatgctctcagcagccacctggtttcnnnnnnnnnnnnnnnnnncactaatcatgtcatttcctgcttgtcttcccgtcctttacaactgtcattcggtgattgtcttccatt

SEQ ID NO: 243884 - DNA, 561 bp, Homo Sapiens
tttgttctgctttgttggggtaaattatacaaatggaatgcatcctgtctcggccttgaaagaggttatatgacagtacaattataataaattcagtgtatgactttgggtacattctattataaacgaatttttttaaaggtgcagttagaagaaggtggaagaaaaaaagaagttgacactccgattttccacatcatctaactaaaatggatttaaactaactttctctaactattaaatctttcttaggtaagtacagttgtatcccagctctagagttaatgtgctgggtgggtttttacaaataaaaaatctaaaacctaaaatagttgtgttttatcttctgtcccaatccaaaacaaaacaaaacaatcatgtgatagtaactaatctctggagatacctgacaggcgtggtccagtagtgacgcgggtttgtcactttggtctttaggtgacattgacagctggtgtggcatatggatcacactgtggtcattgaagtataatgttgcttacttctgagaagtgatcatggggccttttttttgagacggaa

SEQ ID NO: 243885 - DNA, 691 bp, Homo Sapiens
agcaggtcttttaaaaagattttttggagaaaatctcactttctgatttctgtgctgactgacttacctactcttggctgattttttgactcctatagaatcacaaaagtgcttttctatgatcaaatatgaggactgaaataggaaaacaagagttctaaattagggttatactgctacacaggaaggcgttacttgatgtcaaacctcccaacaattcttactgaagctttaagacatttatgaattctcaaaaagaatgaaaataatgaatacttcatatggataaagccaaaataaagacgccacactaatgatatttttgcagcttgactaactaataaaaggtaatttaagtagcaagttactgttaagggcaacctgcctgttcaacagaagaacatctaagaggataagctaagcaaacatttaactcaggtttaatgatactgaatgaaaattttgcagagttgtcagttaaacttcttggtaaaaatattaaaatcaagtttgaaataggaagactgcaacatattctagctgtatcgaagtcgtttgcttcttgaatttcataaaaatcactgcccttggcaaattcatgtagggctctaaacagatccatcaagttccttgagtcacaaacggtctctaattcctggtctgcaatccatctaaatattcggatccatca

SEQ ID NO: 243886 - DNA, 201 bp, Homo Sapiens
gagaagttataaatttgccatctccctctgcacaacttacctttgggttatcaatactctggctgaccatcgtcatcgtgggactgactttggtggaagtccttggttacttatcattactgtgtttctgagaagttataaatttgccatctccctctgcacaacttacctttgtgtgtcttcctgaagactatcttcccg

SEQ ID NO: 243887 - DNA, 900 bp, Homo Sapiens
gaaatacgttttctaggtagagatagattgtgtaagggtacagttgtgaggataacagaaacatggcagattatttaaaatcatcctgaaagtggtgctttatctgatgaaagtgattgtaatccataggaaaatgtttcaacgtgcgcaagagttgcggcggcgagcagaggactaccacaaatgcaaaatccccccttctgcaagaaaggctctttgcaactgggtaagtttgcttgttttccttgcttttggacatagtctgccaggtcaggacatggatacatttttctccctacggctgtgtgctcaagccctgcagagggagatggcagagaggaaggctgcctacaagcatcacagtcccatccctgttggtaactgtgttgcgcaaaaacaccttcatccccacccagtggggcccccatctaatattctaagtgtcagaggttccgtatttgtaatagcaaatgggccctgactgtaaattagtgaagagtgaatgtaacttattacccacagggacaattccaaatgagggccttaaatgatgctcagctaagctggttcttgtgtggcctctgtaccttcaaaagctgccgagtcctatgattacacgcgatgggacttgtacacttgaagtgaaacacagttttaaaacttgctttgtttagaattcccacctcatttttccatggacaaaagtattctttatgtcctagtgcacttacaatttggtattacctgggagtgaaaagaaatattacagccatgcctaactgacttcttgaggtaagattgttctgtcagaaaaccctctcccagttcccctgcagctcttcaggaatccaaaactctccagagctctttgttctcatgggtgtgctttccgagggttcg

SEQ ID NO: 243888 - DNA, 869 bp, Homo Sapiens
caaccttggccaccaggggaaaccccctttctggtgaaaaacacaaaataaagcgggggtggtgggtgggccccgtgaatccagggtccttggaagtctcccgcggaagattggtttgaacctaaaagcaagggggccaaaatgtgcgccctgcaaatcagcgtggggtaacaaaagaaagggcccttcccgggtgaaaaaacaggtaaaaagagaaaggaaaaccgatgccagtactagcaactcctcttcctccgaaaaaatgaaaacaagaatgtaggaagggaaaggaattatacagcttaaactaatgaagcagaaaggacaaactcaattttgaacccactgaatttgccacaaatattgtagaaaatattctcaaggactttacagttgtctactttgattggcacatggttcatacaacagtatttgtgtcaaggcacatcttactgttttctggcggtcttcctctttccattgattttgtcatgatggttgattttcgttgtcaccttcctcttacggattttagctctaacttttgtttccacatgtctccgtagagtaatgacgtctttcaggccaattttatttcctcgaaaggaagaaactcttttctttgtgtgcatacaaatggacctcagcccttggtgagagtgaggagaggagaaggtgagaaacctgagggcaagaagctgttctttccctttccagggcaaactcatttccacactatgcggattccaacagagccataccttcctgtctacggcggttggacctccaggctctctgctgtacatccgtggatccatcatgtccatttcgagaccagaagatagtcttcaggagagacacctaggaaa

SEQ ID NO: 243889 - DNA, 818 bp, Homo Sapiens
tgaattacatttcaattttgtgaaacactcttttgtctacaaaatgcttctagtccaggaggcacaaccaagaactgggattaatgaagcattttgtttcatttacacaaatagtgatttacttttggagatccttgtcagttttattttctatttgatgaagtaagactgtggactcaatccagagccagatagtagggggaagccacagcatttccttttaactcagttcaatttttgtagtgagactgagcagttttaaatcctttgcgtgcatgcatacctcatcagtgattgtacataccttgcccactcctagagacagctgtgctcaccttttcctgcttatctcctaggagataagcaggatgctgattttcctacccgtggcccaggtctgtgccttccccatgccaaggactctaggtcaaatgtcaataaatatgaacctcgagaaagttctgaaggccatgacacctgccttgcctccctcttccattctcttaggcacagtaatagcttatttgccctataagaaccttccgagagcagcagaggcccttctactccctcttgactgtctcagcctctgggattgcagcctttgtagtgtgcttccttgcttcctatcagagggtgctgatccagaggctcagtaaccccatcaacttggtggccctggtgtctcacacttgtatccttctgccctcgagacctggcacagcagtatcccttgaagaaatcctgaggctttgtagagtgctccttgaccatgtttaataattcttccctctcctgcttatctagggatcctctag

SEQ ID NO: 243890 - DNA, 611 bp, Homo Sapiens
aggtgtctagaggatctcgaggagatagcaggaaataatgtatgtgtattaatgaatatacatttatgtgtctgcttattaaaaactcatgagttttgtactgatacttctgattctaatttaacaccacaggattaatttcgtggttttccttatttgttattttttccaatatgggtaacctgcctcttgtctgcagtgtatttacttactgttttttttgttgttgtgtcagtgtaatatacatgtagtttcagaagagctaattcataccctaggagaaacacattaactacattgcactgttctgcaattctttttgggttttgcctcatatatcagtcaagaaacagtttttcaaagttactgacgttcttttctttcccaccctctctgatctgtggactgatttgtactcttggtccattttttactgtttgagcgttctctccacagcctggttgattttaatggtttattttttcagtatgtgaaacgtggttttcagagtgtgagctttgtaaaaggatatacatggagaagtgttgttcgtacctcattcctaccaccccattcccgttcccagctgcttatctcctctcctgcttatc

SEQ ID NO: 243891 - DNA, 1038 bp, Homo Sapiens
  misc_feature (786)..(827): n is a, c, g, or t
  misc_feature (876)..(912): n is a, c, g, or t
ggtgttctagaggatctcaggagataagcagagaaggataggtacggagatgtaatttgatacaggaggcaatggaaaacacgaaagaaggaagtgacatgttgaaagattattttggagagtatttagcagaggagtagtgagtaggaaggcagaggtgtgagcaaaactagggcagactttaaagctgtgaaacccatccatacacttgcgtaatttaaataattaatgaaccagtaaggtttactgattcctattatatgctcatatacgaaaggagtataaaacatggaccttgtccatatgaaaaggggaggaaaggatatcacagggaaggaagcataatgagtaatgtcccaaaggacagagtgagattagttttgtgagtaaaataaattatactgtctaataaatatctgatacttcctataatctgtgttcttacagaaataataatagagtttaagacaatctttcaggcttatcagttatgaaactaacaatgatgggtttactctcactaaatataaaatacctgaatcctacatcctttcataacaacagttatcaagttaaagtcaggtaaagtgtggttacatgtggaaactggttccagagctggtctccaggcgtcggtggtcaccctccaactttctgctgtgggacccaggattctcagtgaaattctgcctggagtaccagcagggcaccatgctggtgtcgaagctgtcatgggaattccttacattgacaaactcaccaagtagcagatatcctgtctccctnnnnnnnnnnnnnnnnnnnnnnnnnnnnnnnnnnnnnnnnnntagtaccctctccaatatcatcgtcttttaaaggttaagtggtttaagnnnnnnnnnnnnnnnnnnnnnnnnnnnnnnnnnnnnncctgggagaatagagacagaatactgggccttggaatctaaaaacactactcctttactccttttctctcccattcctccacctcagcctggtgcacctttgcagccagatgtcctgctatctgct

SEQ ID NO: 243892 - DNA, 627 bp, Homo Sapiens
tggtgtttcaccgcagtcattcctgctgaagggccagtcaggttttatttccctagacatgccttcagtctttcatgactctgtcagaaggcctatcctcctcaaatccattagagcatacacaagcaaacactaggcagtggtgggctgtggagaagctagcttggaaactggtctagatctttagaaggctgagaatccctgtgctggaaagcagagatgcctctatcaagtgccttcctacacactcagtaattcctactagaatccctgctagactctcttctaggaatagaaatatattaataggttataaacagggatttcccttagaatgatagtttttccaagaaacttgcttagaagatcactattaagaaagagaaagggaatctaatatttctgttgaaatgtgcccgaaaaccagtactgaagaggctgaggtaccctttttcaaactgtaacagtcaaaatctacatttctaaaactaagaactatcctgatattaaattgaaactaataatcggcagcaccctttgttactttgatattccgtgtccttactcttaggaaaaaaaggtctacactagccttgatcctgctatatgagatcctctagaacacac

SEQ ID NO: 243893 - DNA, 695 bp, Homo Sapiens
gatttcctttagtatttcagaccatagtggccaggataactgaaccatggaagcaaaaccatggaaaagggaggactcttccaatgtctgtacagctggcatctattaatgcacctttatatccatttagcaaatcttttgagcatttactttgtgccagaatgcagagattagtgatggcagacacagtccttgccctaaaagcttacttactggagtaggtaaaatctgaagtgtttatatggtgtgataaagatcagtttgcagtgcctggggagccctttctcatatcagtgagttcattcttcagctggaggagtcattcacaacagaaatagaggggaggtttgcattccaagcaaagggacaacatatgcacgggaatgtagtcagctattgctagacggtaattccgcttgattagaacatcatggggcaggagtgtcgtgtatgaagttggacttgtgagcagaaacagactacagtacattacagtaccagtcatctgatgcctgtcatcttcctcatccaggtcccagcctaagtgtcacctcctcccaagaggctttactgattacaggaggtgctcttgcatctcctatagtgttgtcacttcttttacatagtcacgactagtttaagaatgcggctgaagctgttgcagatagaaagctctctaggggcgggcctgttat

SEQ ID NO: 243894 - DNA, 511 bp, Homo Sapiens
gtgatctagaggatctcagcaggtatggatgtacaaatctaaattcagtaaggtcagtccaggagaaaattggggagtagttagccatgggatcagatgggcgctttagggacactttggagatgaagtacagcactgagccctgagttcctgtgacagagaagcagcctgcaaagacgaaaggaggagctgttaggaagagcaaggcaacagaaaaggaagaaccagcatgctgattatgttcaggagagtgtttctacgctgaatttaattgccaagattaccaattctaaagaagaggaggactcttggacaagtttttagaagttggtttggagctggggtgagagcctggcctaatggagacagctctggattgggagtcacttagacctacattctggtctaggtttggctcccaaaaactgggaaggttagttaggtggccactcctctctcttcatggtctctctcagcttgaagacaatttacagtctttgactaagcatcc

SEQ ID NO: 243895 - DNA, 958 bp, Homo Sapiens
ggtgtctagaggatctcagcagctattcaagccaatggactagattcgaaggctctcggtggacccactgttcctctctgtttattaagctttttgaaggagagagatgagggcaggacatgtgacaacggtgcttttccttatgcttatatcgctctccaacagcatcctttccaaatctatagcgcttcaaagattccaggacagatcgggaagagccagtgtccatagaaacctggggttgttcagaagaacggtgttctctgtgtttgtgacggtgcctgtgtttgtgctcaaccatccaaccataggccatctcaggaggaacactggggtaggtactcatggaaaggaggggagtcctgctggttgtaagaaaggcctcctgtcgaagtagcttatgctttttcttatggtatttggcaggattgagaagtaaatgaccagcatgcatataggaaggaggtggaagtggcgtggtgaaagaaggagatggaggaggtggataaagagtgggaggataccttccatagtaacctaatcctatgggagcagctgtaaggggtgaaggagagtaaggcataccataagatggatagaatccagtactagaaagaggaaaactaaggctgtgcataaaaggcatttcaggcattgcctccctcatcttagggggtctccctcttttcttttttaagtcaggttttcgaatgtagtgcaaagggtctaaggggaaagaaggatgtgtatagaaactattaaagttgattcgaaagatagttggcagaagatctcgggggataaaatgatgacttcgatgagtgatccgaatttcacttaggcgacttattagttcctccagctctgcaataaagtctggatcctgtctatttcgaagctggggatatttctttttccgttttcgtttctgccttttcatcttgtcatagctgtactt

SEQ ID NO: 243896 - DNA, 640 bp, Homo Sapiens
  misc_feature (285)..(294): n is a, c, g, or t
tcggaccaggagatagcaggataatattacatctatatattcgaaaccctaccagataagattttaatctttgtttcagtaatcttacatattttaaagaactgaagagggggaaagtggtcttttgtattccgagccatttaccatgttcagtgctcctttatccccagagctccaggtttccctctggtagatttttcttcagcattaggaacctccttttgcatttcttttagagcagagctgctagcgataaatactgttttccttcatctgcgagtaccnnnnnnnnnnctctcattcctgaaggatatttttgctggatgtaaaattctgggttgacatgtcttctagcactttagagatagtatttcatgttcttctgtcccctgtggtttctgatgaggattccatgttctttccaattactgtttccatttttgtaatgtgttgtttttctctagctgttttcaagacacctgcttatctttagttttctgtaggttgattattgtgtgtctggacttggtttctttgattctatcctgtgtggggttctctgatcttcttgactgtaaatttatgggtatatagtaaaggttgcgttcactcactttgagacttttggccttttttcttc

SEQ ID NO: 243897 - DNA, 1119 bp, Homo Sapiens
  misc_feature (332)..(385): n is a, c, g, or t
aattgttactctatccctgcctgtaagaaaggttcctagttcccacagagattttaaatttgtgcagatcggcagtgaaagactctatccccacgcctagtgaactgagtggtggaaagaggctgcagaggccatggccatccattgtcatgaccaaacggttgccagcatctggctgccagtgggggatggatgcactggtccctgccctcaaggaaggcacagtctccttggaagatgacacacaaagaacagtttaacacattccaagctctagaaacatactgcttgtcctgccatctgctccctgtccctcccagcttggcagccgnnnnnnnnnnnnnnnnnnnnnnnnnnnnnnnnnnnnnnnnnnnnnnnnnnnnnnaagtcactgtggccaggagtgtcctggaaacagcttcatggagatgggaggaggacagatgtctggagaatcagggttggaccgtgaggataaaacttaaggacaggtataggaagagtatttgggacatttgagctaagggacatttccttttgtcttttgaagccaaaaagagctggccttggctggaaggttctggctaggaggagaggtctacagcatgcgaaggcactacaatggtatgttatgtattttatatacatccagcaaccccgccactccccaggaaagccacatcttcactccaagcatgcgttctgaccccaccttcctgaccgtggccagctggcccaggaagggtgcctgtaccaagttggtcctatcagagttcttcctgggatttttctagatggaactgagcgaagaagatactctatcccacttcagtgaaaacatcatgaggcttgaagcatggaagttgcctcacccccgtgtttcctgccaggtggaacaaagtgctgagagaatcaaaccagcaagcaaagagaagaggagcaagagatggaaagtgacctctagcatgcacatccctaagccccagctgattatatcagccggcaaactcctcttgtgacctaggctagtatgagtggaatcctgtcacttgtgacctaagcagtcctgacccagatacgccgggtctggctgaggcagccctacatttcctgctatct

SEQ ID NO: 243898 - DNA, 709 bp, Homo Sapiens
  misc_feature (380)..(425): n is a, c, g, or t
tctcaaataagttgaggttgattctctttaaataagttggtgatactgcttcccggtttattgaaatgctaccttagttgctgaagacagctcctactaacatacagtgataaaccagataaagggtggctttatatgatggtgcagtcataaatctaaccaggggtacctttattttatgaaatctcactgtgatatgatttgaagctagaaatggttcctagctctaataactgcagcctcacacagttcattcattcctctggagtggctcctcaacagcagatgcatccagagatccttatgtttttattcattcattaggaacactgcttggttatcttgagttgcccgtttaatagttttttgagtgtttattnnnnnnnnnnnnnnnnnnnnnnnnnnnnnnnnnnnnnnnnnnnnnntaccattatgactatttccatttgaaaccatcttcctcagaaattgaaattttagagccgctcttgctagcatgtgaaaccttttccttgcttattgccttttggcgggggcagtgaaggaggagcctggcctttccaaatgtgatcaaaaaaataaccgaactccagggctcattagtccttttatatacgccggtgtgaaatgatgggtatccgtgtgcctgtccagtttcctggtggttgacttgggcgaataaaaataagacattcctgctattcctctg

SEQ ID NO: 243899 - DNA, 621 bp, Homo Sapiens
  misc_feature (503)..(512): n is a, c, g, or t
  misc_feature (515)..(561): n is a, c, g, or t
ggcagatgacattatacctgattttaggaaatctcactttatttttgctaataagtagactaagtgctctgtgttctcagtcttccctttttttctgcccccattcttactttgtcccaggcaatgcagagaaagatggtgatattttaggccaggagtataccttgctataacctaagcatgccttctttattccagctcctatgttctgtgtatatcattaacattttcccagataaacacttaattctcttttcctctaggtgccatctcctcaagctacagacatgtccacatcttatatcccctttgcttctactgctctgattttgtggtaccagtactctctgccactgaacattttgaaatatttttgttttagatttgcaaaaaatgacatataggtcagtactcacatggatttttaagataaatcacctgtgtgataatattttgaatctgagacgaatacaacttttaaaaattgtttttaaaaatagacnnnnnnnnnnagnnnnnnnnnnnnnnnnnnnnnnnnnnnnnnnnnnnnnnnnnnnnnnntttctctcctgacaaagccctcaacagcctcccaggctatcagtatcctgctagttgtcg

SEQ ID NO: 243900 - DNA, 796 bp, Homo Sapiens
gcaggaaagattttcttaatgtttctctcgagcgtagtactataacaaaaacttaatgctaagaaacattttatatgctcctttggatatgcaatttaagtctagattatctattttgtctcccatgataactaatctgtttttagtatcagcagcatttggcaagtttattttttggatataaactgtggttcatctgttcactgtttctagaaaaaaatcattgccataagaaaaagtataaattagcaagaaaggagagtgacttgatttgcttttggaaaaagaaatgcttaattaattattctgtatttggccttattcgggcattaggaaatctagagatctaaagggttgaatgacaatagtgcccccgtttttagcagaccagccttaactctgggtttgaatcctaaggagattgccacagtgagacttaaggaaaggtttggttggcagatgagcaccaatgactgcagcgtggagtgacgcactgcatggtctgtttattctctaattccaatatgtcttttgcttccagaagcaagaaaagtttcttctctcccctccttcccacccttttttcaaaggcaccacaagtatagacagttgcactacatcaaatctttttttgacacttgtagaaaccagtacacttttagattagacagtatcttcttttaatattttgatttgttttcctttagtttgaaaagttgtataatacttaactgactgtaaagaagttttatatgtggtagcatacctttaatttatcctattaagactggtcctc

SEQ ID NO: 243901 - DNA, 498 bp, Homo Sapiens
cgatccccgacgatcgtgaaaggagggaaaagcagatggacttgaaaaagatccaagctcctattagaaaaggtatgaaaatctttatagtaaaattttttataaactaaagttgtaccttttaatatgtagtaaactctcatttatttggggttcgctcttggatctcatccatccattgtgttctctttaatgctgcctgccttttgaggcattcactgccctagacaatgccaccagagatagtgggggaaatgccagatgaaaccaactcttgctctcactagttgtcagcttctctggataagtgaccacagaagcaggagtcctcctgcttgggcatcattgggccagttccttctctttaaatcagatttgtaatggctcccaaattccatcacatcacatttaaattgcagacagtgttttgcacatcatgtatctgttttgtcccataatatgctttttactccctgatcccagttcctgcttatctct

SEQ ID NO: 243902 - DNA, 630 bp, Homo Sapiens
cggaggagatagcaggacagtagacttaaatccaaccttatcagtagatttaaatccaaccaggtcaaccatatctatattatgttaaatataagtggattaaatttgtctaattctcccttaacaccatcagtttttgcttcatgtatttggaagctttgttattagttgcaaaaacatttgtgcttgttatgacttcctgatgaattaacacttatcattgtaaaatatctttctttctagtcatacttcctgatgtgtagtttttaaataaacccgctcctgctttcctgtgcttacatatgtatgttatctcatttttcatccttttactattatatttctttatatttaaagtctctattaacagcacataattaggacttaaaaaactaatctgatgatctctggctcttatcagcgtttactgcatttgtacttaatgtaattttaaaaatgttattttaaaaaattgttatatttcagtagctttaggggtacaagtggttttcagttacatgatgaattgtatagcggaagtctgggattttagtgcttctgtcacctgaatagtgtacattgtacctattttcatcctcacctccctctcactcttcctgcttatctcct

SEQ ID NO: 243903 - DNA, 977 bp, Homo Sapiens
cttcagatggatatccttgccagatacaaagcctattgctacaacggcatgtgccagtattatgatgctcaatgtcaagtcatctttggctcaaaagccaaggctgcccccaaagattgtttcattgaagtgaattctaaaggtgacagatttggcaattgtggtttctctggcaatgaatacaagaagtgtgccactgggaatgctttgtgtggaaagcttcagtgtgagaatgtacaagagatacctgtatttggaattgtgcctgctattattcaaacgcctagtcgaggcaccaaatgttggggtgtggatttccagctaggatcagatgttccagatcctgggatggttaacgaaggcacaaaatgtggtgctggaaagatctgtagaaacttccagtgtgtagatgcttctgttctgaattatgactgtgatgttcagaaaaagtgtcatggacatggggtatgtaatagcaataagaattgtcactgtgaaaatggctgggctcccccaaattgtgagactaaaggatacggaggaagtgtggacagtgggcctacatacaatgaaatgaatactgcattgagggacggacttctggtcttcttcttcctaattgttccccttattgtctgtgctatttttatcttcatcaagagggatcaactgtggagaagctacttcagaaagaagagatcacaaacatatgagtcagatggcaaaaatcaagcaaacccttctagacagccggggagtgttcctcgacatgtttctccagtgacacctcccagagaagttcctatatatgcaaacagatttgcagtaccaacctatgcagccaagcaacctcagcagttcccatcaaggccacctccaccacaaccgaaagtatcatctcagggaaacttcattcctgcccgtcctgctcctgcacctccatttatatagttccctcacctatttttttaccttct

SEQ ID NO: 243904 - DNA, 648 bp, Homo Sapiens
ttgctgatacttgttctaatagaaacccagtctgctgtgtcttcaacatactggtattttcattacaaagtatggtaaatttttgagttgtttgtttctgttttgtaaagagaatccttattggacaccagtgaaggtgtctctgttttaatgatcagggtttttattccatcttttgcatttcttctatttctgaaggtttgtctcttggcatctttttttagtttcttaccataagagtttgacccgaacactgctcacttcacattggatgacaccatgttcttcctctttgaaaagaaaaggggaatgtgtcccactagtgaaaggaaaacttttcaacactatccctgctttaatctcagcaaactcagactattctgcttagccttcattagtcatctgggtgtgagtgtgtcttgttctgtttttctttttaataaaacttttaaaccatatatttagcctgtgaccaggggggccaaaccctaagatttctggtaaacctgaagggtggccctcctcagacaatttatctcccagcaatgaccctactacactcgcgtactgtgaatttgggaggaggtaaagttgacttctcctcgtgggcagttttccaatcaccttgtgagaagacactgacccact

SEQ ID NO: 243905 - DNA, 520 bp, Homo Sapiens
cccccagctcctggagatctggcatatcccgataagttagtcatgatggagcaaattgcacagagtttgaaagatgaacagaagaaggtaccttcagaagcttcattttcagatgttcacttagaagaaggagagtctaacagtctgacaaaatctggttcaacagaatccctcaatcctagaccacagaccacaatttctccagcagatcttcatggaatgtggtatcctacggttcgaagaactcttgtctgtctctccaaattatacagatgcatagatagggcagtgttccaaggattatcacaggaagcattgtctgcctgcattcagtccttacttggagcgtcagagtctatcagcaaaaacaagactcagattgatggacaacttttcttaattaagcaccttttgatacttcgtgaacaaattgctccatttcacactgaattcacctttaaggaaatttgtctggacctcaagaatactagagatgcagcattaaatcctgctatttctt

SEQ ID NO: 243906 - DNA, 328 bp, Homo Sapiens
tagcagagctcaccaaagtgatgttcacctttttatgacattcctttttcttagcttaagaaaagaaagctgctagatgagagtcttagttttcctgcataagacctcctttatgaatagaataaaagactgtcaaagtaggctgggcttgggcccaggctaatctatgaaggaagcaagctcgtgttccttacctatccttttggtgtccattggattgtgccccgaagtggcctttacccttgagccgtccccagccatggtgctcacacataggcttttgagctcccttggagctgtccagatcctgcttatctggtaccgagcc

SEQ ID NO: 243907 - DNA, 1758 bp, Homo Sapiens
  misc_feature (477)..(485): n is a, c, g, or t
  misc_feature (511)..(520): n is a, c, g, or t
  misc_feature (641)..(698): n is a, c, g, or t
  misc_feature (729)..(779): n is a, c, g, or t
  misc_feature (871)..(885): n is a, c, g, or t
ggagggggggccaaaaaatggcggacaatttgttgtggagcgcccggccgtttttttgcccccaggggggcgaaaatattatattaaggcccaagggtggtgacaacaggggggttgcggatgtcccccgcttgggcggagagttcacggggtgtctataacacagggcggcggttgtagggaggggggcgtttctcaccgtgttgtcgggccggaaaaagggggtatatagaaatgataattgtcccggcccaagtatcttctccaatattaaagttgtcccacggcgggccgcgggggcgcggtgaaaatttttggagaatatttgaggggcgtccgcccctttgtggagacaccccccggtgttggagaataaagaagtccccccacgataaagggggccctcctcccggaaagaattcctccctactcggggagaattttgtttttgaagggaacacagtctttcgggttttnnnnnnnnnggcggggcggtttgtttttttatttnnnnnnnnnnagttccccaagccgccttatgttctgtagccccaggggtttttccttaggggaaacccgggttattgccccagtgtgtcctctttccccttatgggggccgccccgggcccaacaagaaannnnnnnnnnnnnnnnnnnnnnnnnnnnnnnnnnnnnnnnnnnnnnnnnnnnnnnnnngagtgtgtttagctttgttttggaccttggnnnnnnnnnnnnnnnnnnnnnnnnnnnnnnnnnnnnnnnnnnnnnnnnnnnggaaaacgtagacttttaatcactgcttttatcaccaggttaagccatgcagttacaaagtagttagaaatttctgaagggtgttagagttnnnnnnnnnnnnnnngctgactcttacacatatattatctagcacttcatggggacactactgttcaaaaggccctggccaaataactcccaaatgaaacactcaacccaaggatgttttcagcccactgttagtgaagctgggtgcagaatgcaaagcctctaaaaggagaggatacaaagtcaggtgagtaggggccattggcaatgctcagagccagccagactccaaacagggagcccaagtggtttttttctgggacactctacttgaattattgtttaattagtcaaccatagatcttcaaaagagaacaattagttaacatgataaaaagtgactgcattctttggactgtatcataattatagtaagcaaattctgacagttttaatgaaaatagcctccaccattttgcaggtatgaagataacttaattatccacagggcttttaatgtctgctggacaatacatgaatgataagctataaatgacattgttttatgatataaaaatactagtttttttcatttattatttctataggcattcactgtttgagtcaaggttaggcttgttaagtgattaaaggcaattttattacagcagcatgtacttattctattctaaaagaataatattcataaacagaaacaggttttatatttgtttgcaacctgcaaaattgaattattttgctgatataaaatactaagaactcacttgaggaccatgccaccttctgaaaaggccacacacctacttcttaaatgtgttaaagttacagtgtgtcccagactcatccagaaaaaataagcaagcaactgactgctcttgactgttcctccccagcactagcactgattgtgttgggaaaagccacagag

SEQ ID NO: 243908 - DNA, 626 bp, Homo Sapiens
ccaaaatgaccactaacaaagacttcagggaggaaacagaaaaatgtaggtcacaagttttaaataaaaatggttaaaagataaaaatttacatgtaggaaaatcagtttccttatataagagaattcaaaacatctgctttatttcagagaccaaatttgttttctgagaggtagcaaattcacatcaaatgtggtgagaaaagggaggatgaactttatgtgctaccctcctaaatcttccaaaatctattaaggaaaaatccagttttctaatcaattagaattgccatttgctctggggtttcagacctttccaaagtcaagaaatggtaaaaacccagctgaagtgtcaacaaacatatatacagaaatactttcagaccatgaccctggcaattttacttgtcggtatttaccctaaagaactgaaagcagagtctcaaagatacacatgcatgcccatgttcatagcagcattacccacaatagccaaaaggtggatgcaaaccaaatggccatggatggaagactagataaaccaaacgtggcatatacatataatggaatattaatcacccttaaaaagcctatttgacaaatccacgagatctttcggtaccgact

SEQ ID NO: 243909 - DNA, 710 bp, Homo Sapiens
  misc_feature (99)..(120): n is a, c, g, or t
ggaggatcccgaggagatcatcttgcctcgatcaactcaccgccaacatgtaatttatctagagagcaaacttgccatgaaccctaaagctagaagtcnnnnnnnnnnnnnnnnnnnnnnggcatggatttgttcttgtttttggctcttataatattctcaaagccagaggatctttaccctctcttgctagttcaatcctactcttttctctggaatggaaagaaaatactgtataattccctgacgcacccctttagcttgggaatttacctgctctccatgtaacctatgccttgattttccttgaagtatagctatatatgcatatagctatgcaaatacttcactactatttgggatacatgggtatatgtaaaaggtctctgatgcagatacttctactttggtctccataatgggcatttctccagtttgatctcccctccttttaatttaaacctagtgttctccaaatatttttagcttttttacagtttgatctccaaacaatctagaggacaaagtggtggctcactgctgaaaaagccctgcatgcagtgtaaacctcctgcagccttgtcttcctagctctattaacattgttctttttcaccctttaatctttagacactcaaaaacactgttttaaccatttattcccctttgtggatgctaaatatatcttttttcttcccacgatgatctgg

SEQ ID NO: 243910 - DNA, 653 bp, Homo Sapiens
cacgttgtgtgaggaatgtggagtgtttactgtcccgttactccacctccgtggtatacatgtctccatgagaatctctttccattacctacacagacattcaggacagtggaggagtccgcatccctgaagctcgaggagacgatgcctggaaggtgtactttgatgagacagcccaagaaattgtggatgaatttgccatgcgttatggcattgagtccatatatcaggccatgacgcactttgcatgtttatcatccaagtacatgtgtcctggtgtgccagcagtgatgagcaccttactggccaacatcaacgcctactacgcccacacaactgcctctaccaatgtctctgcatctgatcgctttgcagcctccaactttgggaaagagagatttgtaaaactgctggaccagctacacaactcactgaggatcgacctctctacatacaggaataatttccctgctgggagtcctgaacggcttcaggacttaaaatccacagtggatttgctgaccagcattactttcttcagaatgaaggtacaagaactgcaaagccctccaagagccagccaggtggataaggattgtgtgacggcctgtttgaactccacatatgaatatctcttcaacaactgccacgat

SEQ ID NO: 243911 - DNA, 909 bp, Homo Sapiens
tcctggtggtgctgctgccggtcttccagaatttaaagagcttgcactaacaagtgcagaggactttttctatacatcacagggaggagacacttccatcgagggtgtggacgatgctgaggactttgagaagactcgacaagccttcacactcctcggagtgaaagagtcccatcagatgagcatttttaagataattgcttctatcttgcaccttggaagtgtggcgattcaggctgagcgtgatggtgattcctgtagtatatcaccccaggatgtatacctaagcaacttctgccgactgctaggggtggagcacagtcagatggagcactggctgtgtcatcgcaagctggtcaccacctcggagacctacgtcaagaccatgtccctgcagcaggtgatcaatgcgcgcaacgtcctggcgaagcacatctatgcccagttgttcggctggatttgtggagcacatcaacaaggccccccatcctgacgtccagcacacttttccatcggggaagttctcttcagagttgggcaggcacacaggctggatcatttcattgaacgtgagtggcccggccagcttcataagggcgatgtcattgcccagcctctgtggcttgtacttgctgtggcagacaatcttctccaccaagtgggatggggctggattgtccaacagggaaactagacccacctggatggtccatgacttggggaggtacaagtcataaacacagtgtgcagcagtgatgatccacaggggcgtgatgacagagcccccgcacaggtggtagtcctggaactgaaggctggcctgccagggccactgcgagagcaaggacatgtttccacccacgtatgcgtgagtctgtagccccttctatgatcacaggctgtctctca

SEQ ID NO: 243912 - DNA, 803 bp, Homo Sapiens
  misc_feature (610)..(619): n is a, c, g, or t
ctctcgaggatccctacggtcttagggagggaaaaaaatagacaattacgttgaaaatttattaaaacagaccagcttgaagtgagtttattcttgtctgtataatcaccaatgttatttccaaatgtccgtgaaattatctataatcctatctccttgcttgctttggtaggagtatagctaacaatatagccatcttttgccctcagtaagggctatcagcagttccaagctctgtgagattatttttgcccttcttttattcaactctagttgaataaagttacttccaatttgaaagctttagaagacccccccaaaactgttttggaagattgtctccctagagagtaagaacaaatggatagctctattccatttaaacctaatctctgacatcagaatagggatcatgctcagcaaatccaagagcaaggtcatttgtatccattgctctgacttcttcctagggtactcagtgccctactgccagctcagggtagagtggcagactttcctcctttctttcactctcagcagcattgaaactttgttcctgtagcattgcctgtgctaaagtgctattaaagggactttcttgggggccccnnnnnnnnnngcatacagggaagaaggccaagatctatagccactctttggacataagtgagacagaagtacttctaactggcaagataatgtctgttcctgccggattctgtcgttggcctctgaaggtaattatacagctgtccctatggagctgttccatctgtagaaacagaagagctgagtcccttgga

SEQ ID NO: 243913 - DNA, 552 bp, Homo Sapiens
gatctaacttggggtggctttgtcttcttcttttgccaattccactagttgtttgggtgaagagaaaggaagtacggaaaacatgcagaaagcacagaaaggaaaaccaaggttctcatgaatctccaactttaaatcctgaaacagtggcaataaatttatctgatgttgacttgagtaaatatatcaccactattgctggagtcatgacactaagtcaagttaaaggctttgttcgaaagaatggtgtcaatgaagccaaaatagatgagatcaagaatgacaatgtccaagacacagcagaacagaaagttcaactgcttcgtaattggcatcaacttcatggaaagaaagaagcgtatgacacattgattaaagatctcaaaaaagccaatctttgtactcttgcagagaaaattcagactatcatcctcaaggacattactagtgactcagaaaattcaaacttcagaaatgaaatccaaagcttggtctagagtgaaaaacaacaaattcagttctgagtatatgcaattagtgtttgagaagatt

SEQ ID NO: 243914 - DNA, 936 bp, Homo Sapiens
ttatgttttcttacccataagatcaaagcagactcatcagctccatatctgcattccactggggaaagagagagagaaaagagcagatttttaaaaaaagatatgactgagcattgctcagatcactgtggccacactttgctgaaagagatgctgggacatagaacctcttatctgggcagtcatgtgctgagttaaaactcagggattctgtgactacaagatgaaagacaatttggttgctgagatgcagttaatggcttctgttacatggagctcaatggacgtgcccaggaatgcttttggctgttattttgcagttaatacctcctgtaactaaagcatttgtttatgagttgacttgagagaagggctgatctcagagccgctttgagctaagttggattagtcacactaggaagttaattccacacctttcgtctaagtctcagtattgaggcctctccagttctcatgcaccctgatcttagggttagaatacttgaccctgatacctgcaccatgcttcatggttcctgagctctttctcctgtttcatttgagcctccaaactacatatttggtcatattgcctgcctaccccatggctgctgcagaaatattcatccaggttaaccttgatatacacagagatggtcttggagaattgtgaatgtatgtactgtattgtcatcaaggatactgtcccttatttgaaggcatctaaagagaaactgttttcagatccaagtgctcagatctaaagcctctgcaacaagtcaggtggtggtcatgtttcccttctagttttggctgacaggaagctcagttcagtaccataactacagaacctgtcatctgtattttttgttctcaccccgtttttgttattttgtttctggtttttatatgagtatgtgaggctggggcttaccc

SEQ ID NO: 243915 - DNA, 503 bp, Homo Sapiens
cttttctgtactggtatacttcattgttactatatgagagtaaaatttatgcctttttattcataacccagctgtggaccactgcctgaaaggtttgtacagatgcatgccacagtagatgtccacataataatattcatagttaccaatgcagttttgatatatcattggattctgtctttgagttgtaggttatttcttagctgcatgttttaaactgaatttgcatagagttgtatgttaatgtttcagttaagagaaaaacttaagatacatgagtcattacataatgggtatgaaatctttataatcacccttccaccctctatggtgtcagtacacatcacgtgtcatagatacttaaaatgtaaacgttaacacttctccttcctgctgagatgtttagagcctagtgccagacccattcatttccttttgattatttttgagactcagtactgcatggacctctagaagcttgtcaggtgcaacacgaataagga

SEQ ID NO: 243916 - DNA, 386 bp, Homo Sapiens
aatcaaattggtaaagacctaaaaccaaaacaaataaagaaacacaaaaccctcagtgctggagaagagtcagtgagaccagcactctcaaacactggaactggacgttcgtacagtctttacggaagacacttggtcaacgtacactcgtagacccttattctccacctttgacccagtaactctaatcttaggaagaacctactgacactaaaataaatccctaatgtagtacaagacttgaatttaccatgtatattatttatcacagattatgatagtgtattacctatcttacatgttccctaagtaccagatggcattaaattatagtctggcttggcacaacgatgtttttctttctttgataccgagtctctgttgcg

SEQ ID NO: 243917 - DNA, 774 bp, Homo Sapiens
tcatagtaaacaacttagataatttatttagaaagtagaaaataaaaagtatgattctaacatctatttagaatatgaacaaaattagaaatggttaaactacagaaaaaaaggcagagaaactgaagttggcttaatggttatccaatacaaacaagcaaaacccaagttaccttcatgcaaataagcattaaggaaaagaatacgggaatgtttacagaatgcgccatggcaaacatttttcaaatttacataagatactgtacataaatgaaaaaataaattaggtaatttacaagaaatgttttacagattacaataggctataacttagtttattatgaataaaatttatggcacatcatacatttttacatcacagattcagtgttaaaagaattcagacatgataaagcttagacttgacaagaatgatgtaatagaatgaggcaactgaaactgaaatggcatgtgtaagtaaaattaatccccaaattaaaggattccttagattgggacataataacatcttctgagtacactttggtcaataactggtcattaagataaacgccattcaattttagttaaaaaatcagttttttgctgtagtttaaataaaaagtaaaagcacacagtgtataaaaaataataaaaaccatcttaatattgcttacatcctaatactattagttatattcggggccagcagactaggatattggtgtaactactataaagataccttctgtatctacatgctgtaactaaact

SEQ ID NO: 243918 - DNA, 471 bp, Homo Sapiens
tcagcggtactacacagctatccaagtgcagtgaactccttttatataatagatgctatgaaaaccttttatgaccttcatcaactcaatcctaaggatatacaagttctgtggtttcagttaagcattccaataacaccttccaaaaacctggagtgtaagagctttgtttctttatggaactcccctgtgattgcagtaaattactgtattgtaaattctcagtgtggcacttacctgtaaatgcaatgaaacttttaattatttttctaaaggtgctgcactgcctatttttcctcttgttatgtaaatttttgtacacattgattgttatcttgactgacaaatattctatattgaactgaagtaaatcatttcagcttatagttcttaaaagcataaccctttaccccatttaattctagagtctagaacgcaaggatctcttggatagctgctgtatgttaggac

SEQ ID NO: 243919 - DNA, 645 bp, Homo Sapiens
cctgttaacaggctactattactgcgtgaaccggcaccgaaatacaatctagtcattgccctgagaataatcagatgagcgagccccgattggaaggaaaagacaagacgagcttccccaactggtaacctttccacaccccaatcttcatggaccagagatcttggatgttccttccacagttcaaaagacccctttcgtcacccaccctgggtatgacactggaaatggtattcagcttcctggcacttctggtcagcaacccagtgttgggcaacaaatgatctttgaggaacatggttttaggcggaccacaccgcccacaacggccacccccataaggcataggccaagaccatacccgccgaatgtaggacaagaagctctctctcagacaaccatctcatgggccccattccaggacacttctgagtacatcatttcatgtcatcctgttggcactgatgaagaacccttacagttcagggttcctggaacttctaccagtgccactctgacaggcctcaccagaggtgccacctacaacatcatagtggaggcactgaaagaccagcagaggcataaggttcgggaagaggttgttaccgtgggcaactctctcaacgaacggcttgaccctacacc

SEQ ID NO: 243920 - DNA, 842 bp, Homo Sapiens
  misc_feature (231)..(240): n is a, c, g, or t
  misc_feature (733)..(734): n is a, c, g, or t
  misc_feature (746)..(746): n is a, c, g, or t
gtcatttctgcctatttatttctgctttgttctcagtgatgtatatgcaacattttgttgaaagccacgatggacttacaagctttaatggactcgtaagccagcatgggcttgccaaaatttcttgtttaccagagcatcttcgtatctttccacagagctatttacatcctggactatataactttaaagaagttaaacgttattgcactactgttttccagactgggnnnnnnnnnntctctgcaagtgaaactgtatagagtttataaaatgactatggataggggactgttttcacttttagatcaaaatgggtttttaagtagaacctagggtttctaattgacttgatttctggaaatgaaaacccgcgcttttattatgggaagcttcttgaactgcatttactattgtgaagtttcaagtcccgctgtaaagatcatgttgttttgttttccccagggctttcactgtgatttactgcattgcaggctgtatgataaaacacacataatttaaagagagaaggctcttgattccttatgcaagtggaagagttgaaacttgattgaaggacttaaaacattcacaaccttaagccgaggtggggggatatggggattcaggcaattgtttacacacttttgataactgcaaaggatttacggcttggtgaaaaatgtgtactgtgggaaaaagataataaatttggaagacggaaaaaaatacnnacccacaacatnaaaaaataaatttccttggtccgggcccgcccttctcggccccctccgaagaaaagttttttcttaaaaaacccaatttctcttttttgggggccg

SEQ ID NO: 243921 - DNA, 1153 bp, Homo Sapiens
  misc_feature (209)..(241): n is a, c, g, or t
  misc_feature (974)..(974): n is a, c, g, or t
caagggtgtcatcctgtactcctgctgcggctcctgcctgggctgccttgccgtggcccttccctgcctgctgtcaccatccactgtttgacattccagctggtggccaagagattggtgtggaggcagaaagaggaaggagacagtgccaggaggaagacggaaggagtcccttagctctcttcattgtcccctttacttcctgctannnnnnnnnnnnnnnnnnnnnnnnnnnnnnnnnatgcctgtatttctggcaatatgacaggcctgcctacccaagatcagaactccaaaaccactcccacccctgaaggtcgggagggtctgagcagccctggtggctgcctgtgctcaggtcctcagctccatgggaaataaaaatggcaccctgaatctctaggattttgtcacttggagtcacagcaaagttctcttcctcttgtccccccgttgctgctccttggttatagaacatggtaaatatttattactttcagagaaagcagatattttatagaggaaatatgtttgaggtgagttgtttttcacttggagaaggcggagggctcttcctgggacggagacctcctcctccggagtttagttgagaatccgggctgctgctttgaggatcttcccaccatacagacagcgagatccaagaagagggctggccgggggcaaagtcacctcccagtgtggctgcactggaactgactaaaggctttaccttggatagttgcgtattcctggtgagagccttacatctcccacagtttctgcagagtgactgactccattctggcagcccaggaagtcctgggtgctaaatgtgatggccacatgtagtggttaggggatgttgtgtgtgtcccccaactgcctgggtactttttcctgatccctggggctgtcctggggagcttttcctcctgcttgggcctagctaccatctccctctaatcccaggntctctaccctgccctgggggtttaccagcttggattggctttctggtttgagcaaatcaaagctggggcgtatggattgactttaacccttccaggtattgcttaccttgaaataagtccaggtgccctagccctcaccccaacctatggattctgtccctttttccccagccttcggc

SEQ ID NO: 243922 - DNA, 2086 bp, Homo Sapiens
gtgcctgtttccctctcagcctggaggctggctggacatctcctagggtcactgtgcctctcagctagttggcgggggtgctggactggactcttgttcactttaccttctgccaaatgcagagagggaggccagtgtcaggctcggagtggcctggctcttagcactgaccgaccattgccatttctggcctcgctaggcccaggagaggagggaggcaagccagtcgggtttcctggagcaatgggtgtgccagccctcagcatgactctgccaagcatccagaccacaaatgcaggaatttggctgaggagcagctttaggtatggattgatgactaagtcaagctacttcctgagcttctctcagatttccaagagccagagatgaattgtgctgcatcttgccccaattcttaggatttcttttcctccgccactgcagtgattgttagaggtagttttcttgaattaatattaaatcacagttccagcccttgttattcttgtccttagtcctccagggggagctggggttgcagggcaacagtacagtcgcgcttacgacctggctagaacacaaggtcagatgataaacagaagcacaggaactcagcccatggccgcaagctggtcaaggcctgctcactgtaaacctggctctgtaccattgagtttaacaccattttattagaaattagtgtttgcttccatcacttatgctgagcaaccaaatattacagttatgtgataaaggaaaaattctttcctgcccaggacctgccgccattctttaggccgaccttggtcccctacccaatttcaataaaacccaatactggcctgtgttgttaacagcaggctgccaggtttctcagaaactgacaagaaaatctgaccttcatccatactttgtttacttacccctgggctgcttggagttgaaaaatgcacacagccaagagttgctttctgaatagggctggaaactttcaaagaaaacccccaaacttttaagtcacaaagtctgattaaagaagctaagatcatgtcagtgagttcaatgttagtattttccttaagaccaaggagagattttcagtcagagaagataaatgcccagtcccagactactgtgctttctcggcaaaaaagactgagacactgaggatgtgaatgtcaaagtagtaagcagggactaaaggggatggggaggtcaaaaggcaagcatcacaacacctcagtggggagctgggaatttgagtgttaaaggacctcaagagggcagctgagaaaataggccagtggtctcaggctgacgcattccagtctctgtgggaaagtcataaagccaaagcctgaatttggccaaagaagtggatttgtctttatcttgttacctcaatgagggctggaagaactagtagctgatcaccaaggtacctgacctgagagtcttagtgctgtttatacattcaagactgtgactaacataaaatgcctaattagaaagtcacatttcccctgtcccgccgtcatgtcacttcaggtccttgtgtctaaccctgggtctggcatttgcccataggctctgtggcatcagctatcataagagtagtcaagagagatgaacttgataacctgtgttctctccaaagagcagaaagtgggtactatacgtggctacgttgctttgttaggctggcagaacagtccctccctgacagcattcctttggaaaataattcagataagctgaattctggtttggccaagccaaacaaaaaggaatgaaaaccaaagccctaaagaggaactcacctcctggctagtgctttggcatctccatggctgagttacccaacaaggagtgaaggccttcagggtgcttcggttgctcctgtcatcccgcgctcagagacaccactgggcagaaccgccatcccagccagcaccaaccaagagcatagatggtgtggggcagggagtagatgtgtggccaagcatgtgccacctctgtaggggctgctgggagtttgctgtcctcagctgatgggcatgccaagcaaaaccatgcagtgcccacg

SEQ ID NO: 243923 - DNA, 611 bp, Homo Sapiens
gggaggtgagggacggcttacagaacactgagacggtcttaaaataggatattttgaataatcttgagtcgtgtgaccttgaggatgatgatcttatgcttgatgtggatctgcctgaggatgcacctcttgaaaatgtggagtgtgacaatatgaaccgctttgaccgaccagacagaaatgttcggcagcctcaggaaggtttttggaaaaggccaccccagaggtggagtggacaggagcattaccacctcagccaccctgaccactatcatcaccatggaaaaagtgacttgagcagaggctctccctatagagaatctcctttgggtcattttgaaagctatggagggatgccctttttccaggctcagaagatgtttgttgatgtaccagaaaatacagtgatactggatgagatgacccttcggcacatggttcaggattgcactgctgtaaaaactcagttactcaaactgaaacgtctcctgcatcagcatgatggaagtggttcattgcatgatattcaactgtcattgccatccagtccagaaccagaagatggtgataaagtatataagaatgaagatattaaatcgaaatggacaact

SEQ ID NO: 243924 - DNA, 1097 bp, Homo Sapiens
  misc_feature (382)..(392): n is a, c, g, or t
  misc_feature (548)..(564): n is a, c, g, or t
  misc_feature (566)..(654): n is a, c, g, or t
  misc_feature (888)..(900): n is a, c, g, or t
ggggtccgcatggaatctttcttatattttaccctttcctacatgtagccttgaatgtcctttccacaaatatgctcccacggctgggagcattttcttttcttttcgtcacctttgatttttgggattagattaataggggaaaaagtccctggctttaaagaaaacaaaagtagaattcttcaaaaataaatttcatactgggaacagaaaggaactaaatgcttcataaaacagggaaaaagaaattaagatcatcctagaaataaactaagataaaaataagtatactgacccttggttggtagataaaaagatgaccagtcttgtattgttttaaaattagataaacatggattaagcatgcaaagactctgttccnnnnnnnnnnncttggagacagggcctcacgctgtcacccaggctggagtgcagttgtgcaacatcatggctcaccgcagcctcaacctcctgggctcaaacagtcctcccaactcagactccagagtagctgggactacaggtgtgcgccaccacactcagctaannnnnnnnnnnnnnnnnannnnnnnnnnnnnnnnnnnnnnnnnnnnnnnnnnnnnnnnnnnnnnnnnnnnnnnnnnnnnnnnnnnnnnnnnnnnnnnnnnnnnnnnnagcatgagctactgcacctgccctctgttttctttggaaatctcttacctttcattagggtttctttcatagcaatttcctttgggttttttaagacttctacattgctttttcttttattatctgtgctccgtgaaccttatgaatgctgcttaaaaataatgtcaaaatatgttttagctgcctactcaggtaacgttttcttttgctctcatcttggtttccatatactannnnnnnnnnnnngtgagatttaatcaatgatctagtcagaagctacttcactggctaacagtgatcatgttcatgtgctagaaatgaacttgaaacacggaagtagtggttggtccagtttgaaagctcttattagtattcttcatcctggctgtaataatagccattatttgttatgcctttgttatgtagcagacactcttaaggaa

SEQ ID NO: 243925 - DNA, 551 bp, Homo Sapiens
  misc_feature (247)..(306): n is a, c, g, or t
tgtccgatgttattttccttagatcacgtactgtttcacgacaatgacactttattgccttttaatttttaatgatgacaaaaaatgttttaaagaatatgactttttataaaatggctgtaatcatttgtttacatttgatgcatgtcttttaaaatgcaatgtaagcatactttgtaaataggatttttagaattaaaaaagcatacttctaggatagctaactgtaaatcatgttgatcatgtnnnnnnnnnnnnnnnnnnnnnnnnnnnnnnnnnnnnnnnnnnnnnnnnnnnnnnnnnnnnctattttaagactgattttaatagggaatatatctctatttgagaatagacccttactaggaagaacgttttttcctcagtgcatttgtgctagaaattttcaagagtcgaatagtctttgccagtcattcagcagcaaattttcagcattaagctgttcctgttcagtaataaaaccggtcactgatgggaaaactgccaatatagaaaaataaaaatctcttttccactccattgtcgtatag

SEQ ID NO: 243926 - DNA, 749 bp, Homo Sapiens
aagtttatttccttaagttaaatcattgacatgttatcaccaggactgtttgttcagatgatgtcacctttgaaactgctgtgcctactaagggaatggacattaggtcattgaaccaataaactggaatttgctgggtaaaacttttcgtatctcaggctatttttccagctatggatgggatttatactcctcagggctgagatgtgcttgaaagcacactgctgtctacccactgccattacctgtaagttgctccactccaccttccatgctgttttgggaggagggtgaaagaaagggaggggaatttcactagaatcaaatcagtttcttacagttctatttgttcttccagtctttcagtcatgcaatgactatttattgagtgtttttgatgttgtaacttgtaatttaggagtatgacaacagactttaggttgtaaactctttgatctgggagtactgtaaatcgtcatgaggaggttatggaacacagcatatcccaaagttacttgactatggaacccttttattttctttgaacacttacgaatgatctcccacaactgcattccacagaacataggttaaaggaaaaggctaaaaggcatctaacaaactccatatccattttgtttttttctccaaatagaatcatttaaatgaaatccttttaaaactagtaatagataatttcttaatgcaattaattatagataagaagccaccagctgacataatctcta

SEQ ID NO: 243927 - DNA, 590 bp, Homo Sapiens
ctaaagtgttttgataaatttgatatgttttcagccattaattcttcggagttttctttctggaggacctctttctcttcttcctgcaggattacaatgatgtgttagatttttcttatttttctgtttgtcccggaggctctgttcatttgcaaaagcactcatttttctttattgttcaggttaggttggtatttttgttgtgttttcaagttcattgactttattctgagtgtctcaattttgttattgaaataacccattgaagctttttttctcctaatagttttgatgaatacattttttaatttttaagttaaaatcagtgtttagagcttccagatacttgctaagacttcccaattttccattcacttcaagagtgttatcctttcattcatggatcattgttgtaataactatttaaaagtatgtgtcagatgattgtaacatctgtgtcttctcagtattgttattcgaggattctctttgccaagtgaattaagattgtcctggttcttcatatgctgaatattttggggttgtactttgcattatgtgatgagacactgtgtctcggtgaaatctaa

SEQ ID NO: 243928 - DNA, 563 bp, Homo Sapiens
tatttccttgaggttagaatgtgtctgtgacacagcctcaggaggtcctgatggtggttctatacattgtagggagacatgagacatcaacaaatatatgtaaggtgtacattggttcgatctggaaaggtgggatgacccaaagtggggatgggggcatccaggtcataggtagatgagagacaaacgttgcattcttttgagtttctgataagccttccactgaaaacacaatttacaggaatagtcacttaggccttagtctcttagtgaaacaatatggcaaaggaagcaatcagataagcatttgtctcatggtgagcaaagagaggactttgagttctgtctgttctttgttcacaaggaatttccttgtggcctagtgatatttggggtcccaagatttattagtgagttccatttggcttagtggtttgggggtcctgagatttattttcctttttcaatagtttctactgaatgcatatgacttctccaccaccgtaaagtcaaaccctggtaaattggggaccatctgtatgttccgctttctccaagtgtct

SEQ ID NO: 243929 - DNA, 681 bp, Homo Sapiens
tatctctgtctgagcgaagagtgcgtgtttgatgtgtgtgactctgcggctgctcatctcccagcaaaccagaggaccagtcacaaacttaaccaacatccccaaacccgagttcacagatgtgggagagctgtataaccctgagtgtcatcgactgggccttcttatgattgttgttttaagattagctgaagatctctgaaacgctgaattttctgcactgagcgttttgacagaattcattgagagaacagagaacatgacaaatacttctagctcagcactgctccaactactgaagctgattttcaaggctacttaaaaaaatctgcagcgtacattaatggatttctgttgtgtttaaattctccacagattgtattgtaaatattttatgaagtagagcatatgtatatatttatatatacgtgcacatacattagtagcactacctttggaagtctcagctcttgcttttcgggactgaagccagttttgcatgataaaagtggccttgttacgggagataattgtgttctgttgggactttagacaaaactcacctgcaaaaaactgacaggcattaactactggaacttccaaataatgtgtttgctgatcgttttactcttcgcataaatattttaggaagtgtatgagatttgcctcgggacttttcta

SEQ ID NO: 243930 - DNA, 482 bp, Homo Sapiens
agctcacttttgctttatttcacaaggagggtgaacgcagtcaccacttgtgcagtaaaggaacaaagattagaagtttataaaaatttcggaggaggattttgaggtcatggagctatcttcttggaagcagggaagtcagtcacagacatcgatggaaaaaaatattagaagcaaaaggcctggggtgtcacttcaggaaagtaaccacttccaatctgaaaactgttcaatcccaatcccttaccacctgcagatacggcactgctctataggaaacacttaaaacattaaaaaactagccaactgtgaaataaactcttttaatactctttacaaaaagccgacttaggacaattcaaattcttagcagcagtagaatttgctgtaagtttaagatatatcactaatttaggagctattactgaaataacaatatttgctttaactctgaaagtgaaccctactcaagacagagtata

SEQ ID NO: 243931 - DNA, 181 bp, Homo Sapiens
ttttcttttttaatctttcagcagctgtttcctagtagatccttagtaattgagggcaaccggctggagccactctctggcattacctgaaggccacaaagtgaatgaggacaactgtcctgcatggaaaggggaagactcttttctgtctttcctgctcaagacagagataatggtaccg

SEQ ID NO: 243932 - DNA, 274 bp, Homo Sapiens
taagaattggatattttttaatgcaaattgttgtttttcttcatttgtctactttattaagctgtcctcaggccccaagaaacatactgtcccctcatttagaaacagactaactccgttttcctccactatcccctcccctggtccttgatctgtagatcctgttaagacaggaaaaacagtgttggtcaaagggtacacgctttcagttacaagatgaacaagttctgaatacgtaagatagaacatgggaggtgatgtggccgggtgcagt

SEQ ID NO: 243933 - DNA, 867 bp, Homo Sapiens
agaagcttatggtcttcttttcatcttgtatgtctgtgaaataccactatgagttgctgaactacattgatttgcccgtcttggccattcatgtaagtgatgatgatgagctcattgaaaacaggggtatgcttattaaatcctatagattgtaggattggaggtattgccctctcctggaaacattgttctgagtagtttgatcaccactagatgatggatcctgtgtgggggagcgctgctgggtgtggaggggtatgaggactttcgaagagtgcaagacaccatcctccttgaggggcttgcggaacagttggggaaataggacataggccaagggatgagctcgaaataaagtagggtaacagttccacaatttgggggttctactgctagtcttcctcaagattccagctctaatggatgtttttatttaattctagggaaagcaaaagcaaaataagcgtacaaccacattcttccagttctgcaatgcagattcgggaacactattgtgtacggatgtggcagcgagaggactagacattcctgaagtcgactggattgttcagtatgaccctccggatgaccctaaggtaactggcatctttggaatatcttcagaatgactctgcattaaaagttcacttattctcccagttccctgacggaaactgcattccacattcaaggtaaagatccctactatacagtgactgcagtatttctctggtattgaaaagtacttaaggcttttcagggctcaaacgggctgtgccagaggattgaaaaggatcagtgggacttaagttatgaaaatgagatccttggaatgattcttaagaacagcagatgcctaaggaaata

SEQ ID NO: 243934 - DNA, 856 bp, Homo Sapiens
  misc_feature (411)..(429): n is a, c, g, or t
  misc_feature (443)..(484): n is a, c, g, or t
agtcgacggtaccggacatatgcccgggaattcggccattacggccggagctaacaaactagaaaaggttatgttcatttttcaaaaagggaagtaagcaaacaagtattgccaactcttctatttatggatatcacacatatcagcaggagtaataaatttactcacagcacttgttttcaggacaacacttcattttcaggaaatctacttcctacagagccaaaatgccatttagcaataaataacacttgtcagcctcagagcatttaaggaaactagacaagtaaaattatcctctttgtaatttaatgaaaaggtacaacagaataatgcatgatgaactcacctaattatgaggtgggaggagcgaaatctaaatttcttttgctatagttatacatcaatttnnnnnnnnnnnnnnnnnnnggggggggcaatcnnnnnnnnnnnnnnnnnnnnnnnnnnnnnnnnnnnnnnnnnntttcattgtgtatcagtttccatgaaagacctgaataccaccttacctcaaattaagcatatgtgttacttcaagtaatacgttttgacataagatggttgaccaacggtgcttttcttcggcttgagtttcaccatctcttcattcaaactgcacttatagccagagatgcaatatatccccactactcaatactacctctgattgttacaacgaattttacagtctagtacttattacttgctgctatacacaagcaatgcaagaaaaaaacttactgggtaggtgattctaatcatctgcagttctttttgtacacttaattacagttaaagaagcaatctccttactgtgtttcagcatgactatgta

SEQ ID NO: 243935 - DNA, 447 bp, Homo Sapiens
ctatcgttttttcagggcctgaattttagaagccccaggctgatagctaagtattttttaaagatgggacttcctggatgcttttttatttccttggggcagggactgaggaaatggtgtttttggaaaactatagtagttggctttgtgcttctttgttgcaaccaaggatcccagggttgtagtactcttactaccttttaaaggtttaaaataacactttctagcactttacaacttgacagaacctttcctagacaatagagatcaaaagtagacacaaaatatttaccaaactctggagagctacttaagttactaagctcctcatagatagctttttatttgacaataaagtacttgatgtaggctttaagtacagctaaatagacactatagaactaagctgtgagtctagtctttgtgagcctcagaaaaacaagagtc

SEQ ID NO: 243936 - DNA, 425 bp, Homo Sapiens
attaatttgtcttgtagtaagatgaaatagacaataatacggaataatatcttaaatggaaatctttgttagtctctagagccttcattgcttgataaataggacatctaaactttagatataaatcagttgtcaatgagataaaattattgccagcaaatattttccttcaaagataagtaacttttgatatggcagttggtgaaatgaaagaatataatctgccttcttgttaaatggttgactattctgtagcttgtaggtagtacgtattagaaacttgtgtatgtgggaaatatttggcataatactgttttcagtatatagtagctattttttaaggaaattagtttcatacaagaaaaagattattataaaagtgatacttttgcatgaaatattagtggttgataactcctacatgg

SEQ ID NO: 243937 - DNA, 635 bp, Homo Sapiens
  misc_feature (520)..(520): n is a, c, g, or t
tctcataaatcttttaataacagtaaatgaagaaacattataacagtaagccccatggtgagggttccttttcattcaaggatcttcaacaacagaaacacctgagactaaaattcagaatgctaagtacaccaattaatgaccatttatttccaaaggcgactgcagataccatttcggtacaatcaaaaggttttacaagacagatgaaaacacattacaaaattgccccaagaggtgagcaaactggtgggggcacagagcacgcaagaaccagcctgactaaaatcctaatgcctgctgctgtttaggcgtgagtacaagagactgtggttccaaggagaagccatctgtgtgtggggttcagggcgagacagtcgacgggtctgcccagtcgcatacgcaatcccacgctgcggaactagaggaagtgacaggggttacgggaaagaggggcagagagcatcttgctagagctccctgacgagaaaccatttacatgagtcagccttatcacatntcctcttcacttacaatcaacacctaatatataatgcatagagattctcttaaacatagaacacataaatggtaccaccaataagaagagcaagagtatctcaaacactaacagc

SEQ ID NO: 243938 - DNA, 422 bp, Homo Sapiens
ctcctcttgggacatgggctcgacgacacaatccccatcactggtgcagtatggtgagaagatggaaagtgacttgaatctttaaagcattggagcattactgtcaagaggctagcagggggagggggtggagaatgtgtcctgaagtgaagaagaggggcagctagttggttaccttcccacatgtatttcccctaatcaaataagctgaattcaagaagttggggaataataaaatttgaggctatgtatttctcatcacatttagaggctgggcatggtagcttacacctgtaatcttagcactttgggaggttgaagtgggaggactgcctgagccttaggagttcaagaacagcctgagcgacatatcaagactccattctaacaaaattgtgttcaattagtctggagcggtggag

SEQ ID NO: 243939 - DNA, 822 bp, Homo Sapiens
  misc_feature (16)..(16): n is a, c, g, or t
  misc_feature (24)..(24): n is a, c, g, or t
  misc_feature (46)..(46): n is a, c, g, or t
  misc_feature (129)..(189): n is a, c, g, or t
  misc_feature (231)..(231): n is a, c, g, or t
  misc_feature (251)..(251): n is a, c, g, or t
gagcgtgtgtcctgancttccccnctgcaggaccgtccccaccttnctcatagccggcactgggagcagccgccagcagggaaatctggcctgagcacaaggatgctttagggagagatcacttcagtnnnnnnnnnnnnnnnnnnnnnnnnnnnnnnnnnnnnnnnnnnnnnnnnnnnnnnnnnnnnnggtgagtgcgtcttctgagtgggttctgttcagttgctaatnaggctcctccgctctggacncaacccttttatagattaatttctctgccaattaacttgtcattttcagtacatattttactattccacaccaaccataattacaacaagggatttttcttatgcactcctatgcatgtgaataacatgtggtgtaattctgcttcttacagaagtattactgaaggtattatttccaatattatttggtttattatgcggatctttttaatatatgcagtcccatcccttctgtgccactcaatgccatccagacatggtttttccctccaggggcctttctccagagggcacttcggctgcctctgcttcctctcattcgaggctcggctcttgctgacagaataggttccgttctgggcggtggttctcgagcctgccattcaaaaccaaagcaaattggagcatttctcacaacatggtattgaagttcctttttgttctcaaaagttgtgaccgtgttaagttgtactcccttagtcctgtaaggtatgttaagtgaatcgcagttacgctgtacttttattaatatttaacataattaaagatggaccctaagagtaagaacata

SEQ ID NO: 243940 - DNA, 558 bp, Homo Sapiens
  misc_feature (44)..(44): n is a, c, g, or t
cagtggcttgtttcaagaagccacttctgatctaagaatctacncagcatgcctaatcaaggagaagactgctattttttcttctattccacatgtaccaaaggcgacagctgcccattccgtcactgtgaagctgcaataggaaatgaaactgtttgcacattatggcaaggagggcgctgttttcgacaggtgtgcaggtttcggcacatggagattgataaaaaacgcagtgaaattccttgttattgggaaaatcagccaacaggatgtcaaaaattaaactgcgctttccatcacaatagaggacgatatgttgatggccttttcctacctccgagcaaaactgtgttgcccactgtgcctgagtcaccagaagaggaagtgaaggctagccaactttcagttcagcagaacaaattgtctgtccagtccaatccttcccctcagctgcggagcgttatgaaagtagaaagttccgaaaatgttcctagccccacgcatccaccagttgtaattaatgctgcagatgatgatgaagatgacgaagatggatct

SEQ ID NO: 243941 - DNA, 777 bp, Homo Sapiens
ggttcatttctacacctgatttagaccaaaagattcaaatctcctctttgtgaaatcccatctgcatttgattttttattattttatgttcccccgttagattgttttaagtgtttgcttttcatcttttatagatgtaatctgattttcaaaaatcattaacactttttaattagtatcgactaagactttttccccctggaatcgaggctgtgtgtccgtcatcccagcccccggttggagcctgctctttgaactccgctgcgctcctcagcagcttctgtcctcttctgtgagtcagtcagcgagtgcttgggatccgcatccagccgtgctgagcacacaacaggctgtgtgtggaaatggccaccaccattctccttccccaccccaccacaaaaagagaagctgtgtctttagacaaccctgaggtatctgtgttacaatcgttctgtgtttgatatttgtgtaaagtatgcatgcagtcttgtactgtgacctaagaacaaaactgtaactgcattagaaaccatgaaaaaattagatattgttttgtgacttttagacagtggtaaatatagaaccatgaattctggtcacattccatttctctccaacatgaaggatccaaaaatgtttttcaatgtgttctttgttccactggaaacttagagtcatgagtttatgagctgatttggtccccttcctctgcctttgttcactgtgagttctgatgtcttagtgatagttcttagacagctcagcgctctaacgagt

SEQ ID NO: 243942 - DNA, 543 bp, Homo Sapiens
ttttatttttatgggcaatataatctcaaatctgaaactactacttaagagtttttttaaaattatcttcaggatcaatttgtgtattagtttacttttgtttatctttttcatgctatagattttctcttcaaatgtctaatgacacttgatcgtcccttccttgagggatgaatggggaatgggagggtttcctgggaacttaggacacatggggctagcagcaagaagatctgatgggacatgctgactgaacatgaggggtgaggaagatgcaggggcctagagtaatcttcagactcctagatttttgacttgtaacatggtagggatgatattttcagttactgcaatagaaaatacagaaagataaataggtacattagaagaccaaaaaagaagagctaaggaaacaagttcacttttagaaatgtatgagaactagtggtactggagtagaggattccaggaagcaggtttggagttcataagagagccaaccatgcctgacctctcaaatctttaagagtaaaaacagtaata

SEQ ID NO: 243943 - DNA, 741 bp, Homo Sapiens
ggggggttgccctcgccccgaggccctggcctcaatctgccccctccaattggcggtgccggtcccccgctggggcttcccaagccaaagaagaggaaagagcccgtgaagatcgcggcgccggagttgcataagggagattcagattctgaggaagatgaacccacaaagaagaaaactatccttcagggatccagtgaggggactggtttgtctgccttgcttccccaacctaaaaacctgactgtgaaagagactaacaggttgctcctgccccatgccttctcccgcaaaccctcggatggctcccctgatactaagccctccagactggcttctaagaccaagacttcctctcttgcccctgttgtgggcaccacaaccaccactccgtcgccctctgctatcaaggctgctgccaagagtgctgccctgcaggtgacaaagcagatcacgcaggaagaagacgacagtgatgaggaagtagcccccgaaaactttttctccctccctgaaaaggctgagccacctggagttgagccatacccttaccccatccccactgtccctgaagagctgcctccaggcacggaaccagagccggctttccaggacgatgcagccaatgccccccttgaattcaagatgaagttgcgccgaatgaaccgcttcactgtggctgaactcaagcagctggtggctcggcccgatgtcgtggagatgcacgatgtgacagcgcgt

SEQ ID NO: 243944 - DNA, 590 bp, Homo Sapiens
tgagaagaccaacaaatgtactcctcacttactatgtaagttcatctagatctccacctcacctgtatcaaaagactgttctttcatcctgtgaggtttatactatttctggtttttaaccaaaagggaaatcatctggaagcaggatgcaaaaagctgttaccttctaatgacatttaaaaagcacagtctttgacctgtccaggagcaaggatttactccaaaattatactggaacagttttcagaattctcactgaagccatttagtggctaacccactgtgctccactctccctattccctggtccgcatatggcacaggaattattccttcttgttcctctgtattctaagaattcatgtgggtgtttcttatccttacattctgctggatacgtttacccctcttgtcttcctgcagtaccacacttctgtcccctaacctcctgaggctgttctctgtaagtcttttaagttttggttggactaaaggctgaagtgaaaatctccctgtaatcctcttcctccattatgcagtacacggacacctggctacagaccaggacgtggcttgtgttctgttccctt

SEQ ID NO: 243945 - DNA, 394 bp, Homo Sapiens
  misc_feature (285)..(296): n is a, c, g, or t
gcggtcattcgatcatcacacccttcaacttctactttccaaatacacacagtctcccccatctgtggttttgatttatgtggtttatatacaataagatattttgagagagaaagagactacattcatataactttttactataatacagtactataattgttctattttattattgttaaaataaaaattaaactttatcacaggtacatacatataggaaaaaacatagcacatataggaaaaaagagtgtatatagggttcagtactatctgcagttactnnnnnnnnnnnntcttgtaatgtatcccccccaaccactgatacaatgggattactgtatctaatttgtcagtgcctctctattcctcctgctttgactctaatttaggc

SEQ ID NO: 243946 - DNA, 331 bp, Homo Sapiens
ctttggcatgccaattacattttttggctccagaatttctgcttgattcttttaaattatttccatctctttgttaaacttatctaatagaattatgaattccttccctgtgttatcttgaatttctttgagtttcctcaacacagctattttgatttctttgtctggaaggtcacatatctctgtttctacaggattggcccctggtgtcttatttagttcatttggtgaggtcatgttttcctggatagtgttgatgctagcagatgttctttggtgtctgggcattgaagagttaggtattgattgtagttttcactgtatttattgt

SEQ ID NO: 243947 - DNA, 1144 bp, Homo Sapiens
gaagagagagctagggcagacatgcagtgaaatggttctggttaaaaatgtgcaataaaaatagattacaataagtagtgcaaagaactttacagaaatcaagcgaattagaaggcctgtaagagtaaggtttgctaaaacgtgaaacactgtaacacttttaaccactgagcattccacagtgaaatgttatttctatgctcttatttaatgtaatgtttctcctgtcatttttgaagttgagtttggagtagattggttgcttctgagaacacattctgccttcctgggaagtcggggtgtcatcctttcctctgtttgatgtgaggtagtttaaagatacaaggactttgtgtgaagctccagcatctgtgccccttgaattgcttaggtgcagacagttctaaagcaaggagctgcagcattctcatcatagatacgtgcagtatctttaatgagtatcttcatggtatgatagtgtgtgtcgtgagtgcgaagtaccaattaaggtgtcttaaatttggcgcatagaggagagaaggaaacctgaggagtagtgttcctcctgaatgaaggttcaggtcaccagccttctgtacactgcctttggttttagcagttctttgaaaagcaaacactttcatgtcctgtctattcattcagctggctgtgctgtgctgtggaccagctgtgtggatctctagcccagctacagcagaatacattttaccagcaaacctaaggatgacaaacactatccacatctgaaaactaccacatcatatcagggatcataaattatgcatatctatgaattttccaacaaattcctacttcctgattggattggttttgccgctgatgttaaggcagccagcttcttagttcaaaaagaattctgagtttttcaaacactagtctagaggtggacattgtcaggggttctggaatgggaccaggggaccttttggtgcagtgggtgcctgtaactcattagacgtactgaggctagcacttctgcagggtgcatatcctgattgttgtcatttgtaacaggtcacttccttttcactcagtttaaattggtgatggacgttgcttgattgagcttattactctctattttgagaagtaagaagtgcta

SEQ ID NO: 243948 - DNA, 514 bp, Homo Sapiens
tttattgattaaaaggataagaaatgatagccaaagaaaaagatacagaaaggaggcagcaacaattaatttcaactgtgtaaggagtaggatgagaagagactttcttgagattccaatgccaccattttaagaagctttgccataatgtacttaagatggatattttaagaggttaataatgatatagaaatgaaatggttatcatgactgccaccaaatatccattctcccattttcatttactaataaaaccctgacttgtttttcagggagtagggaggtatcccagctaaacactacttttctcccccctctggttatattttacaattgatggcatgttgcttaattggaggcttatttttctttcttagtggtataaaacatacgggtacattttacaactgataacatcttggagttgaggaaacccagttttctaattctctcaaaaaacttaatatggccaggtacggtggctcacacctgtaatcccagcaatttaggagct

SEQ ID NO: 243949 - DNA, 474 bp, Homo Sapiens
ccctagcaatcttccttacctagtctcagatcaatgaagcctgttcttgttttaaaggcctcccagcaaggagctcagcctgtctcctctccggctgaagcagttctatttttattccatgctgtttgatggctcatgtccaagccagtggctgtgctccaggtgccagactccctggcagcacccctattatgggacaaagctctgcctggtccaggcagcaacctggtcacagcctgatcacaggctggtcacagccctgtcacggacatctgtgcacacttcaatctgcccgttgtagggacagcctgcaggcctgcctgaacctggccaagccctgataacatgcaggaaccacatctgtgaaccatgtcacagactgtcaaattgtcaaacatttcacacctacagtgaatacaaagaaaggaaaaacaagccccacttttcccaccacccagttctcgtacaggaagg

SEQ ID NO: 243950 - DNA, 674 bp, Homo Sapiens
  misc_feature (282)..(298): n is a, c, g, or t
cctaaacttccttacaatgtcactgaaactggcatgcactgttctgataaacccatttcacactcagatggacacttccctgtttggaagtttatttctaatattacattccaggacgtcctcccttggtttcgccccattactctggttacccttctttagagcatgttaaatacttcttttacctcctgggtatcagtaaccttcacgtgagtgagagttatggtctttttcctgcccaagctccattcaagcaactcaacattcttaattcttgagagnnnnnnnnnnnnnnnnncacgaaactgttcttggtgacttttccttcacttcgggttctcctctttcccttccttccatctaggtgtccccagctgaacgtgtgtgttcaattttagaaggggcctgggatcaggaaaatgcttatcagcttagaggcaatatacgttagcctaaaacgccccactggctgaattacaaaagtagccacagcagtagcctggaatgagcctgacgttgaatgtcgtatttcaggcttcacgttgggatcgtatgcaatctacagttataaacccatcagaagtatggccatccatgccacgcttttctgaatggtatttattttacatgggcagtggatgggatttgataaccgttctctccagcaagtacag

SEQ ID NO: 243951 - DNA, 459 bp, Homo Sapiens
gacttcttacctacaactgcgtctcacgattttctttctcgactagatcagactcgctcttatttcttgtatcttaaaaccacagtctcttttccttccagctatttatgtcttcctttttattcatgccctcctgtttcatgtccttaaaagagttacctatactcactgtttccaaataaacatatccccttatctcttctgcagtcaggattttgcttctgtgccttcactgaaagtacacttatcaaagataacaataaatcttcattttactaaattatatggtctttttcagttcccatcttttttgacatcagttgcacatgtcgtttactcaatcattcagcaagtgctttttttaggacctaccattgcctgggctgttctaggtgctgaagaaagacactttccttgttttgcttctacttttctggctgctctcctcagtacaggaag

SEQ ID NO: 243952 - DNA, 1011 bp, Homo Sapiens
tatctcaaggtccatctttcagacctaattaaatgagatcttctcaagagtgaggcccatggcaaagattttttaaagtggctgtcagtgttgaaaacttacaggtctaaaagtaccaaggaattgaaaccatgcctcgaagcaattccaaccaaagaagctgattataccataaattttttcctctaatcctgggaaaacacgggggaagcaggcaccgattcagttttcatttttctttatccatcttcagttgcccatagtagagcttaaccgacatcaaatattggaagctttgcaaacacgctaccctaattgaaattatcactactttacatttagaaagctcttttaaaacaatagcttttacaacaatcccgcccatcttaagtttgcatagatgttcaagtcagctatttgttcaactaacagagtcaatagaatgtattagaaagtactttattaacaagttattataaaacaatattcattttatataccacaaataaactttttggtgcagataggaggaatatttgagtttttcccacctatttctaaaactgctagaatttctttttataagatcagtaccttcaattctagaatttaaacaaaactttttgctctaagaatgcatacataaaatacttcccctacaactgtactctatccttgacaaatccttattaagaggttcagtagtaactgtaggtatttaatgtcagaacaatctttcttcatttctcaggtttggaaatataacttcaagtatggaaaataacttttcccttaagaatacgagaattcacttagagacatctcctcaaatcagccaatcccactgcttcggctccttacatcaggactccatgtcaacctcagccccttcattcctgccctgaagtgttgcttctgtcagggtgtcttcacttaaatcttcaatgtctgccagatcaataggaggcaaaggattcctccagtactaggaaggtatgatgaatgctctaa

SEQ ID NO: 243953 - DNA, 642 bp, Homo Sapiens
  misc_feature (187)..(187): n is a, c, g, or t
  misc_feature (325)..(327): n is a, c, g, or t
  misc_feature (329)..(333): n is a, c, g, or t
  misc_feature (336)..(339): n is a, c, g, or t
  misc_feature (342)..(342): n is a, c, g, or t
  misc_feature (344)..(345): n is a, c, g, or t
  misc_feature (347)..(347): n is a, c, g, or t
  misc_feature (383)..(434): n is a, c, g, or t
  misc_feature (458)..(458): n is a, c, g, or t
  misc_feature (469)..(469): n is a, c, g, or t
  misc_feature (474)..(483): n is a, c, g, or t
  misc_feature (563)..(563): n is a, c, g, or t
gggagattgggatgtggattatgcttaacagtgagagctgaaatgagaccatttactttgtttaaaatgctgtactgtgcaagtttggaaatgtaaattaatttactgtatataatatcttgagtttgtttatacctccaagtttttacactgaagataaactagctttaattcaaaactttttttntctttataagggaataagctgttgagctaaacctgtatacttgtgctttttattttctggatgcacaatgaaagtttatacttgtatctcactgcatcatatctgattgcagaaattaaagcacaatttacaagcaannnannnnnacnnnncanannanaaaccaccaaaaacacacaacaccccaaaaacacannnnnnnnnnnnnnnnnnnnnnnnnnnnnnnnnnnnnnnnnnnnnnnnnnnnaccaaaacacccggcgaccccaanacaccccccanacacnnnnnnnnnnttttggggggcccgcccctcgggccctttaaaaaaattctttctaaaacccttctttgtgggggggcccgcggccccccncggggaggagggcaaccggggccaaaaagtggttgttcccaagaagaaaccccggggacaagaaaaaaggggggttggt

SEQ ID NO: 243954 - DNA, 644 bp, Homo Sapiens
gctcgtacccctacgacttccttactcaccacatgcgcagcacaccaattcatagaatagactcccctggatttaagccagcctctcaacaggtgtatagaaaggatccatatcccgaggaaatgatgaggcagaaccatgttttgaaacagccagccgttagtcacccagggcacaggccagacaaagagcctaatctgacctatgaaccccaactcccatacgtagagaaacaagccagcagagacctcgagcagcccacatacagatacgagtcctcaagctatacggaccagttttctcgaaactatgaacatcgtctgcgatacgaagatcgcgtccccatgtatgaagaacagtggtcatattatgatgacaaacagccctacccatctcggccaccttttgataatcagcactctcaagaccttgactccagacagcatcccgaagagtcctcagaacgagggtactttccacgttttgaagagccagcccctctgtcttacgacagcagaccacgctacgaacaggcacctagagcatccgccctgcggcacgaagagcagccagctcctgggtatgacacacatggtagactcagaccggaagcccagccccatccttcagcagggcccaagcct

SEQ ID NO: 243955 - DNA, 625 bp, Homo Sapiens
  misc_feature (516)..(516): n is a, c, g, or t
  misc_feature (525)..(525): n is a, c, g, or t
  misc_feature (555)..(555): n is a, c, g, or t
  misc_feature (573)..(573): n is a, c, g, or t
  misc_feature (586)..(586): n is a, c, g, or t
  misc_feature (599)..(599): n is a, c, g, or t
gatcgccagcaacaagcacgtagtgtagtgttcctgctaaatgagcataggttatccaaaccttgggaacagggagttatggaaacgtgcctatgacttcatcttggggtgtgtcctatgaagatcctttctggtctccacagtaggccagagttgggggctctggagctgtttccccaagagcatccacaagctggatctgagttttgtcactctaaaattaaacaagcaaaaaaagtgggaaaagggcatcccccattaggtttcaatactttgcacttctactaagcttgatagggcaggagtgcaatctacaattattttaaagtgaatttccttccattcaccattctttatcttttctttgaataagaaaaagtatctagcaaggatattacttgtgccttgaggctagcaattataggatagattcatctaaaatatggtattctgcattttggttttttttcttaagtgaataataccagtcttcaaagaaaacaagggtgaagaccnatttgcttncaataatcaaggaatgctttgtgtgttttnagggtagggggcctgatncaagtatgctttnggggggttttccngtatttagggggatccccggggattc

SEQ ID NO: 243956 - DNA, 1073 bp, Homo Sapiens
tcatcttctgatcctgaccagtggttcctgtatgtgcagcatccagttctctccgagacaaggtactcctggagtcctcttgaaatgccagtttctcttgccttgcaccacaatccagtagattagatgccttcacgtccagcacaccttctgcaagcttattactacagtccgtgtagacgatgtctaccataccttctgtggactcatcacaaccagacatcttgacaaaggctcctttcaaattgcatttctttggactaccacaaggtagtgagttattactgcctgagctgaccagcagatccttttggttgtggtttacctccccgtgaggctcggtgacagtctctctctggtcactacttagcatctccttggctgactgaccttcacttttgcattcatctggtctgttttggttactctgacagtcaaggacttcatctgccttctgatcgagtgtttcaactgattttacatttttaaaactggagaacataacagtaggagactggtccaacactttttcaggacctggaatgtttacagtctggtttagttcttgtatagcatgatcagagatgttatacttacaaaatacagtttctttggatacatcctgctcctttccttccagcccttcctcactgagtttgatgctactggaggtgtgaatggttttgtttgaaattccactatttaacaagcctgctaccattttgtttctgatcttatctcctggaaggttgccattcgtttctttcccatcaagttccctttcctgtgatgtgtaactcactttacagctgcttttttccacagagtgtcctgttccttggcagcagtgatcacggtgctgaaatgcattttcatattttgttatcaaagagttatcaacttgcaggctgattttgctggacttgaaagcagcagaagcagaacacatgttttcctgggatacattttttcttacacgatgacagctagagatatcctgagattgaacgctgtgacattctatgacagagaccacttgaggaaagccagctgcttctctcttatttgagcgc

SEQ ID NO: 243957 - DNA, 453 bp, Homo Sapiens
atccccccctacaccttcctgtacaggaagtcctacaaacaagatctccacggcttctcaggtctcccaagagaacaggttccccgtgttcctaagaattcatggaagtagttttgtaacatctactgtcaagcaggagcgattctttgtttgcatctatgccacctctttgcccaattgggagtcaccctaaggttcaaagccccaaacctataacaggaggacttggagctttcacaaaagtgatcatcaaacaggaacctggtgaagcccctcacgtgcccgcaacaggagctgcctgccagtcaccactcccgcagtatgtgactgtgaaagggggtcacatgatagctgtgtcccctcaaaaacaggtcataactcctggagaagggattgcccagtcagcaaaggttcagccctccaaggttgtcggggtaccagttgggtctgctt

SEQ ID NO: 243958 - DNA, 994 bp, Homo Sapiens
gcacaccttggtgtgggttactgggtgcaggatgaactgtcgctcggaggtgctggaggtgtcggtggaggggcggcaggtggaggaggccatgctggctgtgctgcacacggtgcttctgcaccgcagcacaggcaagttccactacaagaaggagggcacctactccattggcaccgtgggcacccaggatgttgactgtgacttcatcgacttcacttatgtgcgtgtctcttctgaggaactggatcgtgccctgcgcaaggttgttggggagttcaaggatgccctgcgccactctggtggcgatgggctggggcagatgtccttggagttctaccagaagcagaagtctcgctggcccttctcagacgagtgcatcccctgggaagtgtggacggtcaaggtgcatgtggtagccctggcacggagcaggagcggcagatctgccgggagaaggtgggtgagaaactctgcgagaagatcatcaacatcgtggaggtgatgaatcggcatgagtacttgcccaagatgcccacacagtcggaggtggataacgtgtttgacacaggcttgcgggacgtgcagccctacctgtacaagatctccttccagatcactgatgccctgggcacctcagtcaccaccaccatgcgcaggctcatcaaagacacccttgccctctgagcgtcgctggatctctgggagctccttgatggctcccagaccttggcttttgggaattgcacttttgggcctttgggctctggaacctgctctgggtcattggtgagacttggaaggggcagcccccgctggcttcttggttttgtggttgccagcctcaggtcatccttttagtctttgctgacggttcagtcctgcctctactgtctctccatagccctggtggggtcccccttctttctccactgtacagaagagccaccactgggatggggaataaagttgagaacgtaaggaagtgctaggg

SEQ ID NO: 243959 - DNA, 867 bp, Homo Sapiens
  misc_feature (372)..(383): n is a, c, g, or t
  misc_feature (546)..(556): n is a, c, g, or t
gtctatgttcgaatttattccaaacattctccctccggcggtggaatctgaactttctgaatatgctgctcaagatcagaaatttcaaagagaacttatacagaatggttttacaaggggtgaccagtcccggaagagagctggggatgagttggcttataatagctcgtcagcaagtgcaagttccagggggtacagatagtgaatgtattgaatatgctttccttcctgaaaagaggacacactggagctgcagagactgtattcagagcacagtgggggctgcacacactcaggagctctgtcaccaagctgttcatggaagaggatgttggacttcttacttggtttgtaattttaaaaccaaaactnnnnnnnnnnnncgttgctgctagacttgggggtgattttgaaatgggacaatcttttaatgagtttatctacagattctgtgaggaaaaagcatctcagaaagtgaccatttctaagtgaaatctgacagccaccaatcagcagcttcctccacaaatataagagcagaagaannnnnnnnnnnaagcacttgttttgttcatttgtggacttggcattttggtgtattggtttcacatgtcaggatctcttttgctttaaaaccaagcagatcattacagtacagtatttttcacccacaaccaaaacaaccccttttaaaagagttggtctttgtttagcattagaaagtcttgttaaaggaaaatgctaactctgcttttgctagaactttcccccatcagttcacaactttcttctactctgtgccttgagctttgtgcactttgcaactgtgtgaccatgttgtcaaactcctcctggagaagtggatgg

SEQ ID NO: 243960 - DNA, 486 bp, Homo Sapiens
aagcacgctgcaaagcctgggtaaaagctcaaccgcgttcttccagggccgctcttcagtttccagttggccgtgtgcaccgcctcctccgcaaaggcaactactccgaacgagtcggggccggcgctccacgtgtacctggcagcggtgctggaatatctgacggccgagatcttagagctagctggcaacgcggctcgcgacaataagaagacccgcatcatcccgcgccacctgcagctagccatccgcaacgacgaggagctaaataagcttctaggtcgcgtgaccatcgcgcagggcggtgtcctgcccaacatccaggccgtattgctgcctaagaagacggagagccaccataaggccaagggcaagtgaaatgattactagtcaaatccgtcagtgatcccgagtcccagaaaccaaaggctcttgtcagagccacccgccttttctgtaaagtgctggaatacacatacgatgccg

SEQ ID NO: 243961 - DNA, 1588 bp, Homo Sapiens
  misc_feature (901)..(901): n is a, c, g, or t
  misc_feature (915)..(924): n is a, c, g, or t
  misc_feature (1163)..(1174): n is a, c, g, or t
gggcttgtttttagtctcgcttttcggttgccgttgtcttttttccttgactcggaaatgtctggtcgtggtaagcagggtggcaaggctcgcgccaaggctaagtcgcgctcttctcgcgctggtctgcagttcccggtgggccgcgtgcaccggttgctccgtaagggcaactattcggagcgggttggggccggcgcgccggtgtatctggcggcggtgttcgagtacttgactgccgagatcctggagcttgccggcaacgcggctcgcgacaacaagaagactcgcatcatcccgcgccacttgcagctggccatccgcaacgacgaggagctcaacaagctgctgggccgggtgaccattgctcagggtggcgtccttcctaacatccaggccgtgcttctgcctaagaagacggagagtcaccacaaggccaagggcaagtgaggccgcccgccgcccccggggcccctttgatggacataaaggctcttttcagagccacctaccatctcgagaaaagagccgcactgttcctgcagttctttatagggcggaggcctgatcaccctatgctcatgaatgagcgcagtggccatggggaagggcgcaacgggaaccgagaccctggggactgattgggctgcatacttgcgaggtgggcaacgtgttctgttaacaacagggaaccctcgtccacaggtggccaccccttgctcttgagtcccacccaaaacctctagtagggttttaataacgctcaccgtaaaggtgtcttcataattactagtgacaagttctcttgactctagcaaggctcccgtgtggtcatcaagtacagaaggcaatttcttaaggatttatctgatattaaaagtatttatgatctccaaacgtngaaccctagaaggnnnnnnnnnncccttggtcgggccgccctcggcccctcgaagaagcttttctaaaacccattcctttttgggcgccgccggggcccccgttaagggaaaaggggaaaccatgggacccattaacctggtttttccccctaagagaaaaaaacccctgggggttcacttgagaccgtaaaggggggctcttggggaaattttcctctcccaccccgaaaatatagcgaaaaaaaagccgggccccccgcnnnnnnnnnnnncaaaaaccccgggaaaaccgggttttttcttgggaaaaccaaaaattcccccgacaaaagggggggagaattttccgtggggaggggggctccaattttaaaccgggggggaatcctctttaattccaagaccagggggggaacgccctcaaaaggggcgaagaagcctctcccgaataatactcgggagaattttaaagggggcccccccgggtcccgccctgggggcaccaacttttaaaatttcggacaacaaaaaagaccgtgggttctggcaaaaaaatttccccattataaaaagaggggtttttttcttggggcccgcaagaactattgggggaaagaggccccctttttctcccccaaaaaaagggggggcctgtgtgggattgcgaaaaccccccgcggaaataa

SEQ ID NO: 243962 - DNA, 728 bp, Homo Sapiens
tgttattttccaagtctgactcatgggtagaaatggccatgagacagactagtaggtcctttgcttcagctgcagcttttggtgataaaattttctatattggagggttgcatattgctaccaattccggcataagactcccctctggcactgtagatgggtcttcagtaactgtggaaatttatgatgtgaataaaaatgagtggagaatggcagccaacatccctgctaagaggtactctgacccctgtgttagagctgttgtgatctcaaattctctatgtgtgtttatgcgagaaacccacttaaatgagcgagctaaatatgtcacctaccaatatgacctggaacttgaccggtggtctctgcggcagcatatatctgaacgtgtactgtgggacttggggagagattttcgatgcactgtggggaaactctatccatcctgccttgaagagtctccatggaaaccactaacttatcttttttcaacggatgggacagaagagtttgaactggatggagaaatggttgcactaccacctgtatagtggggaagttcggggagtgcacgcctgagccatgcgctctagtcatgctgtttgactctcgagaagtcggccatgacaagaatctcaacatagtgacgtacatcataattctatacggctgatcaaatcataatccacgaccttacttaatactgccatcggctataatatatatca

SEQ ID NO: 243963 - DNA, 433 bp, Homo Sapiens
tagccggcacccctagcacttcctgtactataaaatgtctaaaggtaagacctgtgtttctagtttgaaggcctagaaagtaaatgagtgaggtttttgtgttggtgtttcagactataaacttaaatggcctcagagaatcgggttagtgcttgttcatgactcaggttctgtgaaaaggctattcaaataaaaataaagctgtaagctctatcctaccaggtatagagacaaacaccaaagttacagtagatgagtattgtcaaggggttaagactgtggacacaagcaatagttaatggctttgggaattctaggaaataggagaccaatgtgggataggtgacattaggaagatttctttggcatctgggttttaaggttgggattgaagtacggaaggttgtagggtaagaagtgctaggagcgagct

SEQ ID NO: 243964 - DNA, 382 bp, Homo Sapiens
tacatcaccatcatcaaagaccaaaagtagataaaatcacaaagatggggaaaaaacagaacagaaaaactggaaactctaaaacgcagagcgcctctcctcctccaaaggaacgcagttcctcaccagcaatggaacaaagctggatggagaatgattttgacgagctgagagaagaaggcttcagacgatcaaattactctgaactacgggaggacattcaaaccaaaggcaaagaagttggaaactttgaaaaaaatttagaagaatgtataactagaataaccaatacagagaagtgcttaaaggagctgatggagctgaaaaccaaggctcgagaactacgtgaagaatgcagaagcctcagcattcctcgcaacag

SEQ ID NO: 243965 - DNA, 371 bp, Homo Sapiens
  misc_feature (48)..(48): n is a, c, g, or t
  misc_feature (63)..(63): n is a, c, g, or t
  misc_feature (68)..(68): n is a, c, g, or t
  misc_feature (271)..(281): n is a, c, g, or t
tccccttttccaccttttcaggaaaataacttagactctagtatttangggtggatttatccntttgnccttctggtatacttccttacttttaaggataaatcataaagtcagttgctcaaaaagaaatcaatagttgaattagtgagtatagtggggttccatgatttatcatgaattttaaagtatgcattattaaattgtaaaactccaaggtgatgttgtacctcttttgcttgccaaagtacagaatttgaattatcagcaaagnnnnnnnnnnngccaaccaagctttaaattatgtgaccataatgtactgatttcagtaagtctcatagggttaaaataaaagtcaccaatagtgtagcaag

SEQ ID NO: 243966 - DNA, 615 bp, Homo Sapiens
agagatttccccttatgtagctattctcagtgcactctggtcaaattttacttggcaataaatccttgcaaacgtcagtcatgtaagtgactaacaagactgaaataccacattgagtcacataccaaatacagtttcagaaaatgtaaacctttcccctgaaactctccaatcatgaatagtttatgctgtacagcataaactattcctgtatgtgccctgtgcaccctcgccttgtgtcaatggaggcacctgtcggcagactggtgacttcacttttgagtgcaactgccttccagaaacagtgagaagaggaacagagctctgggaaagagacagggaagtctggaatggaaaagaacacgatgagaattagacactggaaaatatcaacatggccaatctttcctaagctgctcagcttacaagaaaaggaatcatactgctaagaattcaaacttcagcagtcatagggagccttgggaggaccccgaatcactgatggaattgcgcagtgcatagagatggctcagcaggatgagggtaaatgcaggggcaagtccaggccatactgagagacaagagtggcgctgatgaggaccaagatgaatctat

SEQ ID NO: 243967 - DNA, 923 bp, Homo Sapiens
gaaaagcatctccgtttaatagtgagagcccagaatatgatgctcgcagcattttgtgagaaattgtattagatgaaagaagtgaatgacaagtctccttgtttcagatatgagttatagggggagagaaacacgtactttgatataattgacccagctgaattggaaaatgtggaatggggatggggaagagtctgctccacctgagatctggctccaggacttacagcaaggggaacttgggcaagttacagactgtctatgcctcagtttctttatcagcaaaacagaatcatcccataaactataaggtcgatggtatcagcgggtcccctaactgactgcacatctgagtcatgttaacaaacacattccaggccccacctgagccctctgaatcagaatccctgtaaggaggatgatgaacttgaattggcactgactttcccagctgtttcttactctgatcaacttgggggtaggacccattgagctgcatcacatcattccaaagccaaaacacaacagcaggacaagaatattttcaaggcagtctctaaagcagaggagaaactgttgagggaacttagaagtaaaggagatctggcttgctgggctccatttgaactttgagtacaacagagacatgagcccttcgggacacatgcctgaggtagtgacaatccaactttggaagagtggaagccctagtttcaaattcaagcatgctttgagtataaattaagtttacctctttttgcacagcaacatggccaatctttcctaagctgctcagcttacaagaaaaggaatcatactgctaaggaattcaaacttcagcagtcataggtaagtaaggaagtcttataaacctatcctagccacctaaccagaaactcgaaatttagcaggtgggctacgcg

SEQ ID NO: 243968 - DNA, 291 bp, Homo Sapiens
tattgagcaaggaaacttatctctgtgtgaaactgctttagatcatggctactctgaaactgaggcctttgggatggctggaccctccaaaggttaagaaagctagatacccctccttggagttgcaagtattctttcaaggttggaagagggattttgaagaggtatctctccaagcaagaatgacttgtttttccataagggacatgagcattttactaggcttggaagagctgacatgatgagcattattgtatgtttgtatatacatttgtaaggaaggtgctaggg

SEQ ID NO: 243969 - DNA, 334 bp, Homo Sapiens
taccttgaagaagattcttggattctttggggaagaattgttaatgaatgggaagatgtacgcaaaaagaaggaaaagcaagttaaggaacttgttcataaagggataccccatcactttagagcaatagtttggcaacttttatgcagtgcacaaagtatgccaattaaggatcagtattcagaactcctgaaaatgacctcgccttgtgaaaaattgatccgaagggacattgctagaacttaccctgaacacaacttttttaaggaaaaagatagccttggacaggaggttttatttaatgtaatgaaggcttactctttagtagatcgta

SEQ ID NO: 243970 - DNA, 596 bp, Homo Sapiens
  misc_feature (276)..(302): n is a, c, g, or t
aagtaactaggctttcattatgagtactgctcttgtttcttttcacatagctgtctagagtagcttaccagaagcttccatagtggtgcagaggaagtggaaggcatcagaccctatgtatttgcagtacacctgcacttaaggcactctgttatttagactcatcttactgtacctgttccttagaccttccataatgctactgtctcactgaaacatttaaattttaccctttagactgtagcctggatattattcttgtagtttacctctttnnnnnnnnnnnnnnnnnnnnnnnnnnnctccccttcctcactgcccaatataaaaggcaagtgtgtacatggcagagtttgtgtgttgtcttgaaagattcaggtatgttgcctttatggtttcccccttctacatttcttagactacatttagagaactgtggccgttatctggaagtaaccatttgcactggagttctatgctctcgcacctttccaaagttaacagattttggggttgtgttgtcacccaagagattgttgtttgccatactttgtctgaaaaattcctttgtgtttctattgacttcaatgatagta

SEQ ID NO: 243971 - DNA, 776 bp, Homo Sapiens
  misc_feature (460)..(526): n is a, c, g, or t
gggggctgcgcccgtcccgggttcccttagggcggtatagctttgcttccttcccgtaaaggccaggaccaaccaaaagccacccatgaactgtaggacctgagttcactccacgctttcagccttccattatgacagaaacagttcccactgctcctacttatgtatgtcatccagagctccaaacctaaggctggggcccctcctcccagccctacccacatccaccctacttcccaaaagcctgtagaagcccccacttagaaaaaaaggcagacatacacatacacagaaacacatatctatctgcagctcctccatgtgaagcccctgaaacatacacaccctggaactttcctctccttatgcacagatggacaggctgccttcccctgtctctgggctcccccaatagccagaatcccttccgactggtcccttgccctgaatatctgggaannnnnnnnnnnnnnnnnnnnnnnnnnnnnnnnnnnnnnnnnnnnnnnnnnnnnnnnnnnnnnnnnnntacctgctgcccattctcttcccttgggagacaaaaggactgtattgacccagattccggttccaccccagctataggggcagtggcctaaggtgctatttgggcaaggtccagtggaaatcctgaaggggctgtctcgtggggtgagggtagatagggagctccttagcctgaaagggtggatcgtgacgggggcttcttgggagtggcccttggacagtcagtggatgctcaaggccagggcagcgcc

SEQ ID NO: 243972 - DNA, 316 bp, Homo Sapiens
aaatggtactagtcctgttttgcaaattggagtggcctctctgtaaaggctcagaactaggtactaggtataaaaagaaattaaagaccctcgaggggctcaaagcctggacagggagataggctgttaagcccatttaaaacctgggtgtgttgagtgctaggctggagacatgcatacaagaaggctggtctgtgggggtagataatgcctctgttgactcttaggatgaattagaggcagcaagggtgagagcctggtgtgttcggcaaacaataatcagtgaggggttgacagacgagggagtgaattggta

SEQ ID NO: 243973 - DNA, 775 bp, Homo Sapiens
  misc_feature (274)..(310): n is a, c, g, or t
tatccatcggtctgtggccggaaagatcccagaagctctcccaaagcagtggccaacttggcatgcccaacactgaaagagagcagaagaaggagacagagcggattgaaaaggagagaatgcggcgactgatggctgaagatgaggagggttatagaaaactgattgatcaaaagaaagacaggcgtttagcttaccttttgcagcagaccgatgagtatgtagccaatctgaccaatctggtttgggagcacaagcaagcccaggcagccannnnnnnnnnnnnnnnnnnnnnnnnnnnnnnnnnnnntgaggagaatgcagagggtggggagtctgccctgggaccggatggagagcccatagatgagagcagccagatgagtgacctccctgtcaaagtgactcacacagaaaccggcaaggttctgttcggaccagaagcacccaaagcaagtcagctggacgcctggctggagatgaatcctggttatgaagttgcccctagatctgacagtgaagagagtgattctgattatgaggaagaggatgaggaagaagagtccagtaggcaggaaaccgaagagaaaatactcctggatccaaatagcgaagaagtttctgagaaggatgctaagcagatcattgagacagctaagcaagacgtggatgatgaatacagcatgcagtacagtgccaggggctcccagtcctactacaccgtgggtcatgccatctcggagagggtggagaaacagtctgccctctaattatg

SEQ ID NO: 243974 - DNA, 1230 bp, Homo Sapiens
atccaacaggttcctttgcaccacctcagggttgtactttccccggacttttaaaccatcaaaaaggtacaatgcccaggggttccgccaggaaaaatcgggggcagggcacccttcaaattccacactaatgaatcccccccgatggaaagaagagaaagatggggaaaattctccagagatcatgagatgcatccaggcagggttttcatgtgagaggatagggaggccaaaaactaaaattgctatcagccccccgccgctgtctggtacgcgaggaaactttccgaggactttacaagcatagttgcaaaatgctagtaggtctgggactcttcaactttctcttctagggcccaagtagactcgggtgtaacttattttgtaagaaatgggtatgggtgacaagaggggccaccttccacccctgcagcagagtggtaagactccagcgtgggccctgtgcaagggaccagcccagaggccatgagccacagaaactcacagcacctggtggccacaccctgaaatgcaccctttgctccaagcagccagcgccctatcaacctggcatttaccaaacatctcaacagcagaccagaactagaaaacacagcttctgtgtaatacacacttatggtctgagacccaactaaggctccctacatccttcaaaactcagactccacaggctgaatgtccagcttcttcctccaagacagaattgccctcagcccacgaattctctctgggactatttacagaatcaaaggggaaacccacggaactgaaaacctctttacacaggtgggttcaagaagaaagccaccaacagaaggcaactcaggagggagaggccgaggctggcagagcccctgggcctatttccaagcagccacccctcccaacaagagcagaggtgcctctcacctcaaccctcagccctttaacttctggctgggccactgattctcctccccagtctgtggcccatctggaaactggctatggtactttggggagataggaaggacaggacgacaagagacaggacaccagtgagtggctgggccaggcggccccatttcctaaaaccaagatggctgccgctgctgcccaagccctcaaaggcagacagtcctcatgcgcagcaccgagcacacacacaggtaacaagaccaggggaggggaccctaagtgtcctctccacagggaggtggctagacagga

SEQ ID NO: 243975 - DNA, 307 bp, Homo Sapiens
acttagagcagagatttgaaggctgtaaaattctaggacaggtttatgtaaagcaattaacaagggagttaaaaattgttaaaaaattaaacactaattacttttttttctcctctcatttctgctgagctgttctggccatggagctcagagaaagatataaaaaggagaaagttttgcctcgttgctgtaaatcatgttcaacaaatgcttctctgcattttgcaaccgaacccatctgctgtcaattagtctaaatcatgccttttcaattaaagtggcttagggaagtctggtagtgaaacgg

SEQ ID NO: 243976 - DNA, 730 bp, Homo Sapiens
ttttaaagagacagtcagcaatatgatccataacagaccatccctggcttctcagaccaatgtaggctctcactgcaggggcagaggaggagaccagcctgacaaaaaaacctcctaggaccctgcctttacactctcgtgactgggaaatagagagtaccagcagtgagtcaaaatccagttcttccagcaagtatcgtcccacatggagacccaaacgagaatctctgaatattgacagtatctttagtaaggacaaaaggaagcactgtggctatacccagcttagccccttttctgaggattcagctaaagaatttataccagatgaaccaagcaagccaccttcttacgacattaaatttggtggaccaagcccccagtacgagcgctggggcccagcacggccaggctctcaccttttagagcagcacccccgactaatccagcgaatggaatctggctatgaaagcggtgagaggaacagcagcagccctgtcagcctggatgcagccctgcctgagagctcaaatgtctacagggatccaagtgctaagagatcagctgggttggttccttcctggcgtcatatcccaaagtcgcacagcagtagcatcctggaggtagactccacagcatccatgggtggctggacaaagagtcagcctttctctggtgaggagatatcttctaaaagtgaactggatgaattgcaggaagagtgccagga

SEQ ID NO: 243977 - DNA, 355 bp, Homo Sapiens
cttcctgtactctagtctttctatcttttcaaattaattctgctgggttaatgtttcagcatattgcttaaaggaaacttacacatatcactgtcataagctacacagacagaacattttaaaaaccacttcttatctagttaattaaggattaagtccaaactggtcagaggcttcaagctttccatgctgaggccgcaaaccacctgcatttgcaagtactatttcataagcaaatacaatatacatacacatttatttttcaacttcaaagcacctaacaccttttcccttctctcttgagaacccctgtcctacgtttcttttgaaatgcctgtacaggaagtgtctaggg

SEQ ID NO: 243978 - DNA, 435 bp, Homo Sapiens
cctgtacctcttctctgccctccacttccctgccctggagtccgtttctggagactagaaatgtatctaaattgggggaacagaatgaatgaatgaatgaatgagagttcctttgctttaaccattcctggatgcctgcaaagtaaggaataatgcagtttttatgtatctgattttataaggggttactctttcaagagtaacaaaaaaatgcaaactgtaatgaaactacattgtatttctaagtgtgaaaacgacaggctgccccgtttttactaattgcatttgcattttaaggtactactgaaggtcagatcaaagttgaaatgcaaaaatactaattagagaataatgtgaataaaatatattccttagagtggtacatgtttgaaaggcagtcaaggagtagtcaaggaagtcgctaggggtaccgac

SEQ ID NO: 243979 - DNA, 648 bp, Homo Sapiens
tacgattctttgcctggctcttgtgaaattctgtatttcaatatggggagtcctgatcagctcatggtgcacaaagggaaatgtattggcagtgatgaacaacttggaaaattagtctacaatgctttggaaacagccactggtggctttgtcttgttgtatgagtgggtccttcagtggcagaaaaaaatgggtccattccttaccagtcgaagaaaaagatgaagattgataagtgcgagaaagcagattcaaggaacggaaacagaattcaactcacgtggtaaaattgagccatccaaatgtagtacgctaccttgcaatgaatctcaaagagcaagacgactccatcgtggtggacattttagtggagcacattagtggggtctctcttgctgcacacctgagccactcaggccccatccctgtgcatcagcttcgcaggtacacagctcagctcctgtcaggccttgattatctgcacagcaattctgtggtgcataaggtcctgagtgcatctaatgtcttggtggatgcagaaggcaccgtcaagattacggactatagcatttctaagcgcctcgcagacatttgcaaggaaggttggtaggaaggttgtaggggtacaggaaggttggggtaccgagc

SEQ ID NO: 243980 - DNA, 281 bp, Homo Sapiens
cgcgtcgaccacaaagtgtgcacattgtaatatcgtgatttcatatttggagaatcagcaaccaaccagccaaccatgttgcttttataagacagagctgagaaagcaaagcttggctgtcgtcttggctctggtaccacccacgagatgcgggcgattctcagctcagggcgtggaggcgtggtgtgggggagtctatttgccatttttgtttgtcagcagggggcagggactgcttcagtttcgttatcgcgtccgcgtatttagtaatagtagcgccc

SEQ ID NO: 243981 - DNA, 218 bp, Homo Sapiens
ttatgattgacagattgtatagtaacaatacagaaaccacaatagtagcaaaaaaaataaagaatatttttaaatgaaaactcacatcctaactctaccaaaacatgaaaattaaacctgaatgcctcccattcctgatatattttcacctaaatattcagctctgggatgcattgtttttggattgagtggaattatgccagtctatcaggtaccga

SEQ ID NO: 243982 - DNA, 519 bp, Homo Sapiens
tctgagggacatggtgtgcacaggctgcaagctgcagggaattttcattggatgcagttgtatagttttacactctagtgccatatatttttaagacttttctttccttaaaaaataaagtacgtgtttacttggtgaggaggaggcagaaccagctctttggtgccagctgtttcatcaccagactttggctcccgctttggggagcgcctcgcttcacggacaggaagcacagcaggtttatccagatgaactgagaaggtcagattagggtggggagaagagcatccggcatgagggctgagatgcgcaaagagtgtgctcgggagtggcccctggcacctgggtgctctggctggagaggaaaagccagttccctacgaggagtgttcccaatgctttgtccatgatgtccttgttattttattgcctttagaaactgagtcctgttcttgttacggcagtcacactgctgggaagtggcttaatactaatatcaataaatagatgagtcctgtt

SEQ ID NO: 243983 - DNA, 626 bp, Homo Sapiens
  misc_feature (411)..(437): n is a, c, g, or t
aaatggtactcttttcatcatggtgatgcatatcaaagatcttgttactgaagatggagctgacccaaatccatatgtcaaaacatacctacttccagataaccacaaaacatccaaacgtaaaaccaaaatttcacgaaaaacgaggaatccgacattcaatgaaatgcttgtatacagtggatatagcaaagaaaccctaagatttcgagaacttcaactaagtgtgctcagttgagaatctttgcgggagaattttttcttgggtggagtaaccctgcctttgaaagatttcaacttgagcaaagagacggttaaatggtatcagctgactgcggcaacatacttgtaaactagtgaatgtctgagctttggaagcatgaacagttataaacgtgcatgcatacatgnnnnnnnnnnnnnnnnnnnnnnnnnnnttgttaattttgtatagtatttttatacttggacagaacttataaagttaaatatacttgctgcattttaacacatctgttggaccaacagtcacataactaacctttttgaatttttggaagccattgctgttttaaaagtattatgtagaatgctaacaaaccctaaacttaatatatactaactcc

SEQ ID NO: 243984 - DNA, 1110 bp, Homo Sapiens
  misc_feature (274)..(371): n is a, c, g, or t
  misc_feature (378)..(386): n is a, c, g, or t
  misc_feature (425)..(497): n is a, c, g, or t
  misc_feature (544)..(582): n is a, c, g, or t
  misc_feature (591)..(609): n is a, c, g, or t
tttttaaaacccgggccgggggggccccttattcccgggaaaattatggtttctggagtcccaaccccggtaagagcaggacttttttgccccactggacggaagccccctgtttaccgggatttgccagagcggaggttattaggggcggtgcttccaaagttttggaaagtggtgggcttaattacggcttcccttggaagaaccagtatttggtatctgcgcttctgctggaagccagtttcctttggaaaaaagagttggtaagttctgnnnnnnnnnnnnnnnnnnnnnnnnnnnnnnnnnnnnnnnnnnnnnnnnnnnnnnnnnnnnnnnnnnnnnnnnnnnnnnnnnnnnnnnnnnnnnnnnnngatcacnnnnnnnnngcccgctcattaggcgggttaaattcccgggtactgcannnnnnnnnnnnnnnnnnnnnnnnnnnnnnnnnnnnnnnnnnnnnnnnnnnnnnnnnnnnnnnnnnnnnnnnnaccactttgtacaagaaagctgggtcaggaaacagctatgaccatgnnnnnnnnnnnnnnnnnnnnnnnnnnnnnnnnnnnnnnngcctcgagnnnnnnnnnnnnnnnnnnnaaagctgcataaaacaagtttaatttccaaccagggtcacagtcatcgcgttatcccacattttgagcaaggatagagaaggtgagttattaaacatatacagtctacattccagaggaggaactgcagttaccactataacaccacagacaaactttggggtggggggagcgggagtcctcaggaagcagaaagctggaatcagggaaagcataaaattaaacctaccagagaggagaggagagggagtgggcagaaatggaatgaaacacccaatcccaaaagagctgttaagtgaatgggaatgtagaaaggaccacccctgccaagggcttagcagccagggatactaccaagatcacttactgccccctgctggacagatctggggcagcaccaaggcaacctcctaacatttccagccccagattggtccctggagcccccaaaaaaacaaggtgaggggtgcctcgtgccgaattcgccacccaggcctcgctc

SEQ ID NO: 243985 - DNA, 1348 bp, Homo Sapiens
  misc_feature (193)..(193): n is a, c, g, or t
tccagaggggcccaggggaaagggttacgggtgaaccaagggggcggggcagttccaaagggctggggggtccccccttttacaggggtgaatgggggaaggcccttccttccccgggaagagggcggccatgatccctagtgggccggaggttcaacccgccaggggtcaaacgggaacacaaacccctttntcaggaagacatcccttaacacaattccagggacttttgtttcttaacctaaaaattggaaacacttcttgctaccagggatggggggtggggctcagcgtttgggaaaacggagtgggagtcttttgctgaacagacttttgttttcttaagttttgaactacatgaatgtatttccttttttgaaaggaaaattgaaataggaaaaaattttaagtcttttggaaagaattaatcattttcatggaactgcttccctataggggcctgttttcgtatctgccaacttccactgaaacacgcagatggagaaccctccagtgctcccgagaagggagacagtcttaacccagaggacagcatccaccagcctgcaagcacggaccccgtgctggtgtgtgagtgcagcacacactgggctaaccatcaccacagtgagactggcaccctctggggtagggtagactcaggaaggtgaaaatcaggatgtctgccaggagctgacaaatccctctgggactctcatacttcagaggctctccagtttggctattgctaaacttggactagcccctactaccgatcttaatacccatgtaccaatcattgctgcatcctatttggaaagcaatggacagacagccacgctgaaagcccttactagagactggtccacaagatcagatttagctgcccctggtttgagccttgctcccctggtgtcttttctggcgaagctgggcccagagagcgttttactaagtgggctccatggtagtggaagtggtggggacagaaggctggctctatatgtggcagaggcctgaataaacagggatttgagagggctcaagatatcctgacttaatcctcaatgtggcaggcacagggccatggccaggcctagaggaaggtgggctgtttggggtatggcccagcagggcacgatgtgatcaggtagggcgtagggaaatgggttactgtcctctaaatattccatatatcacaaagttactgactgcggtctccacaaattcaggctgccagtccgatgcactatatcccaacaatctgagcactctgtcaaagatgctcacagagacaacaggagcagacggcttgtttctctctcaatcttcagagcctgattagact

SEQ ID NO: 243986 - DNA, 2309 bp, Homo Sapiens
  misc_feature (2211)..(2211): n is a, c, g, or t
  misc_feature (2214)..(2214): n is a, c, g, or t
  misc_feature (2232)..(2233): n is a, c, g, or t
gcgaggagaaagatggcggcgatggcggtcgggggtgctggtgggagccgcgtgtccagcgggagggacctgaattgcgtccccgaaatagctgacacactaggggctgtggccaagcaggggtttgatttcctctgcatgcctgtcttccatccgcgtttcaagagggagttcattcaggaacctgctaagaatcggcccggtccccagacacgatcagacctactgctgtcaggaagggactggaatacgctaattgtgggaaagctttctccatggattcgtccagactcaaaggtgtagaagattcgcaggaactccgaggcggccatgttacaggagctgaattttggtgcatatttgggtcttccagctttcctgctgccccttaatcaggaagataacaccaacctggccagagttttgaccaaccacatccacactggccatcactcttccatgttctggatgcgggtacccttggtggcaccagaggacctgagagatgatataattgacgaatgcaccaaagtacacacacagaggagtacattggggaggcacgaatacgtaggatgtgttggcacaacttccggactttgtgtgattatattaagaggattgcagtggctcttgaaattggggctgacctcccatctaatcatgtcattgatcgctggcttggggagcccatcaaagcagccattctccccactagcattttcctgaccaataagaagggatttcctgttctttctaagatgcaccagaggctcatcttccggctcctcaagttggaggtgcagttcatcatcacaggcaccaaccaccactcagagaaggagttctgctcctacctccaatacctggaatacttaagccagaaccgtcctccacctaatgcctatgaactctttgccaagggctatgaagactatctgcagtccccgcttcagccactgatggacaatctggaatctcagacatatgaagtgtttgaaaaggaccccatcaaatactctcagtaccagcaggccatctataaatgtctgctagaccgagtaccagaagaggagaaggataccaatgtccaggtactgatggtgctgggagcaggacggggacccctggtgaacgcttccctgcgggcagccaagcaggccgaccggcggataaagctgtatgctgtggagaaaaacccaaatgccgtggtgacgctagagaactggcagtttgaagaatggggaagccaagtgaccgtagtctcatcagacatgagggaatgggtggctccagagaaagcagacatcattgtcagtgagcttctgggctcatttgctgacaatgaattgtcgcctgagtgcctggatggagcccagcacttcctaaaagatgatggtgtgagcatccccggggagtacacttcctttctggctcccatctcttcctccaagctgtacaatgaggtccgagcctgtagggagaaggaccgtgaccctgaggccccgtttgagatgccttatgtggtacggctgcacaacttccaccagctctctgcaccccagccctgtttcaccttcagccatcccaacagagatcctatgattgacaacaaccgctattgcaccttggaatttcctgtggaggtgaacacagtactacatggctttgccggctactttgagactgtgctttatcaggacatcactctgagtatccgtccagagactcactctcctgggatgttctcatggtttcccatcctcttccctattaagcagcccataacggtacgtgaaggccaaaccatctgtgtgcgtttctggcgatgcagcaattccaagaaggtgtggtatgagtgggctgtgacagcaccagtctgttctgctattcataaccccacaggccgctcatataccattggcctctagccctgcgtgccaagtgtccagagccttggaagcagcttcaggttctgctcctgtagtacagaagggctcaagccaccaatctatgaagacctcaggccagggggtgagggaattagtgctggattttgaagctacgcactcagcctcaagaactccctggaatatccctgaaaacatggggtttgaaacgattttcagcctttttctgttcttggtttgaggggttttggtaagaagaaataccaattaaggtttaagcccctttactccaaaaaagganacngcacacaagagaagtagnngtcatggttgggccggcctccggccccctcagagaagcttttcctaaaacccttttcgttttgggggggcgccggt

SEQ ID NO: 243987 - DNA, 437 bp, Homo Sapiens
tgaccccattacccacatgcctccagtttaacagatgtggcccctgtgtatcttctcagattggcttcaactgcagttggtgtagtaaacttcaatgatgttccagtggatttgatcgtcatcggcaggactgggtggacagtggatgccctgaagagtcaaaagagaagatgtgtgagaatacagaaccagtggaaacttcttctcgaaccaccacaaccataggagcgacaaccacccagttcagggtcctaactaccaccagaagagcagtgacttctcagtttcccaccagcctccctacagaagatgataccaagatagcactacatctaaaagataatggagcttctacagatgacagtgcagctgagaagaaagggggaaccctccacgctggcctcatcgttggaatcctcatcctgatcctctagtcg

SEQ ID NO: 243988 - DNA, 547 bp, Homo Sapiens
agtagtgaggaataaaatgcacacaacacaatggatagaatatgaaaatgtcttctaaatatgaccagtctagcatagaaccttcttctcttccttctcaggtcttccagctccatgtcatctaacccacttaacaaacgtggacgtatcgcttccagaggccgtcttaacaactccatttccaaaagtcatctccagaagacatgtattttctatgatttcttttaaacaaatgagaatttacaagatgtgtaactttctaactctattttatcatacgtcggcaacctctttccatctagaagggctagatgtgacaaatgttttctattaaaaggttggggtggagttgagagcagctttttcatattatatacacaggccttccataaacggccagtaaatcttcccagagggtggtgggcatttccaacgggccaaacgtggcctgtcattctaccatttctctcttccgacagcaaagtctggtagaatgaagaccaaccgcccgatggccgctaaccgttccacccggatccttgagtcg

SEQ ID NO: 243989 - DNA, 959 bp, Homo Sapiens
ttacaaccccacgatcacgagaaaccagcaagatgataacaatgtatggcaatcgcatcctgacactaggagaggtcccaaaggatcaggtctatgctctgaagctcaagggcatctccatctgcttctccatgctgaaggctgctctcagtgggagttacgtcaatttcggagtctttcgtctctatggagacgatgccctggacaatgctctgcagaccttcatcaagctgctcctctctattcctcacagtgatctcttggattaccccaagctcagccagtcttattattcactactggaagtcctgacccaggaccatatgaactttattgcaagcctggaacctcacgtcatcatgtatattctctcttccatttctgaaggacttactgcacttgacaccatggtatgcacaggctgctgctcctgcctggaccacattgtgacatacctcttcaagcagctgtcacgtagcaccaagaagaggaccccacccctggaaccaggagagcgaccgctttctgcacatcatgcagcagcatccagagatgatccagcagatgctgtccacggtgctgaacatcatcatctttgaagactgtaggaaccagtggtctatgtcccgaccactacttggcttgatattgcttaatgaaaagtgtttttctgacctaagaaacagtattgtgaacagccagccaccggagaagcagcaggccatgcacctgtgttttgagaacctgatggaaggcatcgagtgaaatcttcttacgaaaaacagagacaggttcacccagaacctgtcagcattccgtcgagaagtcaacgactcaatgaagaattccacttatggcgtgaatagcaatgacatgatgagctgacacctccttggactctacctgtacagagcagcgtccctttggtttggcccagaggggcgaacaattgcaaggga

SEQ ID NO: 243990 - DNA, 425 bp, Homo Sapiens
cctgccaccgggaggtgtggaagagccggattctggctacattggagattggttgctttctaaaactgaaggagaagcccatgaagagatggtggattctcactgagttttgacttgcgggagaaaagagagagttcaagtggatggccttgaggacttgaaaagctgagatatgatgattttgaagtcatttcacatcgaagccatgatttaaatatcggcgttaagatttcaacaagaaaaacttaagcttccttggattcccacgtcaaaggaaagtttcaagctttcagaaggagttctcactcgaagataaagaacagctcgctaaccacgaaagaggaatcgatgctcagcttttagttgcacttcctaaagttgcagaattaagacaaatctttgaaccaaagaagaaagaattctta

SEQ ID NO: 243991 - DNA, 1087 bp, Homo Sapiens
gggagtgtgtaagacgctcacgggcgcgcggactatcgggcggctaggctctctgaggaggctgccacagtgaagcaaccgtgacaagtggtgcccgaccagggacctgaacgaggaaggtctgccagagcagagaaagtgaaactgatcagacgaactacgaacccctggacgggagagtctgccggcggagaatataaggagatggacaaaccgtgtgggtgccctccaggtgtgtgtgaccatggaacgggagaccggagggatccatggtattcaaccgtgggcctgttacctccagtacgagccatgagccagcggaatctgaatgcaaagacagaacaagggccgaccggagtcacaatgacatccaaccccataacatggggacagatcaagaaaacgacacaagaagctgagaaactactggagcgccagggtcaggcaaaaacccctgactccatgttcttggccatgctagctgtagtgtcctgtgcgtctataggatcgggtgaaccaccaaccggcaattgaaagctgcacagcctgaaattacctttattcaattaatgcaaaaacaaaaggggagatgttggaggccgaaggaatgagggtcgtgaccaactcagtataccactggaggctctgtgagcaaacagcaaactgttctcatgaaagcaggatgttggcgaactgacaaactctgtctgccgccagaaggaatgctgggggcagtcatgtcccaggtcccgtgctccttgaggttatccacaggaacatccagaacctgttgaacaaagaaaggaatcatgtgggcctgtgttaaatcaaatagctgaccgacagttatcccttcctccctattcactctacctaataaatatgaagggctgtaaaagctcaggtccctgttccctagaatcaaggagccccctgaccccttctttcaaacagatccttttgtctgtcgtcatttctgcattcgtcgtcacttcgttcggtccagaagcaaccgcgacagtcctgcatgtgttgatgccacctgtatgtgcaggtgtgacctcaggtgtgtgagtatccgtccatg

SEQ ID NO: 243992 - DNA, 883 bp, Homo Sapiens
gtccggatgagatagcacggtgctcacctacagtgcgagctggctacgagctgctaggctccgacattctcacttgccagtgggacctgtcttggagcgccgcgccgcccgcctgccaaaagatcatgacttgtgctgaccctggcgggattgccaacgggcaccgcaccgcctcggacgccggcttccccgttggctcccgcgtccagtaccgctgcctgccagggtacagcctcgagggggcagccatgctcacctgctacagccgggacacaggcacacccaagtggagcgatagggtccccaaatgcgccttgaagtacgagccgtgcctgaacccgggggttcccgagaatggctaccagacgctgtacaagcaccactaccaggcgggcgagtctctgcgcttcttctgctatgagggctttgagcttatcggcgaggtcaccatcacctgtgtgcccggccacccctcccagtggaccagccagcccccactctgcaaagttgcctatgaggagctcctggacaaccgaaaactggaagtgacccagaccacagatccatcacggcagctggaaggggggaacctggccctggccatcctgctgcctctaggcttggtcattgtcctcggcagtggcgtttacatctacaagcaccactaccaggcgggcgagtctctgcgcttcttctgctatgagggctttgagcttataagactacagctgcaggacccaggacgcccctcccctcctcattcgggcagagggaaatacgggacccggtctctgcctcctggctgccctcctccctggctgtgtaaatagtctccctatcccacgagggggctttgatggccctggagatcctctagagtcga

SEQ ID NO: 243993 - DNA, 611 bp, Homo Sapiens
acaccttatgaaaaaaacccatcttccgctactctagaggtaggatggtgccatcccaatgatctccctcctgaagctgacccagaggatgagaccctgcgcaagctgtacgagcagcaccacgatggtgcaggacatgctggtgcccattaagtgcctgcagcaggccctgcacaccttccaaaacgatagtccacgtctaccccatctggctgtgtccgttcatcctgcccagccagaccaggacctagtgcaccccaagaggaaatgaggcagagctactcacatcgacattggagcatatggggagccgcgtgtgaaacactttgaagccaggtcctgcatgaggcagctggagaagtttgtccgcagcgtgcatggcttccagatgctgtatgccgactgctacatgaaccgggaggagttctgggagatgtttgatggctccttgtaccacaagctgcgagagaagctgggttgccaggacgccttccccgaggtgtacgacaagatctgcaaggccgccaggcactgagctggagcccgcctggagagacagacacgcgtgagtggtcaggcatcttccctcactcaagcttggctgctttcta

SEQ ID NO: 243994 - DNA, 253 bp, Homo Sapiens
cttcctgcttctgccaccactgttgtgctggagtcctcactgcacctcacatgagttatctggagcttcagttctcccaagccaaaacgacatccacttctaccccatctggctgtgtccgttcatcctgcccagccagccaggcctagtgcaccccaaaggaaatgaggcagagctctacatcgacattggagcatatggggagccgcgtgtgaaacactttgaagccagtcctgcatgagcagaagcagac

SEQ ID NO: 243995 - DNA, 196 bp, Homo Sapiens
gtgttctagaggatcccagatgattgtccacgctccaggagacaaaaaagaatttgccttttgaaagagggagataaagtaggaaaaggactacagcatgtccattggcttgtgggatggaggggtctttgatgacatcagggaaatgatggagcagaagcggcggcagggctatgaacgatgagcaggagagagc

SEQ ID NO: 243996 - DNA, 1218 bp, Homo Sapiens
  misc_feature (320)..(320): n is a, c, g, or t
  misc_feature (325)..(325): n is a, c, g, or t
  misc_feature (1034)..(1034): n is a, c, g, or t
  misc_feature (1040)..(1040): n is a, c, g, or t
  misc_feature (1130)..(1130): n is a, c, g, or t
  misc_feature (1167)..(1167): n is a, c, g, or t
  misc_feature (1198)..(1198): n is a, c, g, or t
atttggacaaccagcggcaactcgtgtccaacctggaaaagaagcagaggaaatttgatcagttgttagccgaggagaaaaacatctcttccaaatacgcggatgagagggacagagctgaggcagaagccagggagaaggaaaccaaggccctgtccctggctcgggcccttgaagaggccttggaagccaaagaggaactcgagcggaccaacaaaatgctcaaagccgaaatggaagacctggtcagctccaaggatgacgtgggcaagaacgtccatgagctggagaagtccaagcgggccctggagacccagatnggagngagatgaagacgcagcttggaagagctgggaggacgagctgcaagccacggaggacgccaaactgcggctggaagtcaacatgcaggcgctcaagggccagttcgaaagggatctccaagcccgggacgagcagaatgaggagaagaggaggcaactgcagagacagcttcacgagtatgagacggaactggaagacgagcgaaagcaacgtgccctggcagctgcagcaaagaagaagctggaaggggacctgaaagacctggagcttcaggccgactctgccatcaaggggagggaggaagccatcaagcagctacgcaaactgcaggctcagatgaaggactttcaaagagagctggaagatgcccgtgccttcagagatgagatctttgccacagccaaagagaatgagaagaaagccaagagcttggaagcagacctcatgcagcttcaagaggacctcgccgccgctgagagggctcgcaaacaagcggacctcgagaaggaggaactggcagaggagctggccagtagcctgtcgggaaggaacgcactccaggacgagaagcgccgcctggaggcccggatcgcccagctggaggaggagctggaggaggagcagggcaacatggaggccatgagcgaccgggtccgcaaagccacacagcaggccgagcagctcagcaacgagctggccacagagcgcancacggnccagaagaatgagagtgcccggcagcagctcgagcggcagaacaaggagctccggagcaagcttcacgagatggagggggccctcaagtncaagttcaagtccccatcgcggcgctggaggcaagantgccactggaggaacagtcagcaggaggccnaagaacagcggcacaatcct

SEQ ID NO: 243997 - DNA, 813 bp, Homo Sapiens
ctgactctagatgatcccccctaggtatatgtcgtgcctgatggaacatttatacacagagaagatggtagaagactgtgaacaccgtctcttagagctgcagtatttcatctcccgggattggaagctggaccctgtcctgtaccgcaagtgccagggagacgcttctcgtctttgccacacccacggttggaatgagaccagtgaatttatgcctcagggagctgtgttctcttgtttatacagacacgcctaccgcactgaggaacagggaaggaggctctcacgggagtgccgagctgaagtccaaaggatcctacaccagcgtgccatggatgtcaagctggatcctgccctccaggataagtgcctgattgatctgggaaaatggtgcagtgagaaaacagagactggacaggagctggagtgccttcaggaccatctggatgacttggtggtggagtgtagagatatagtttgcaacctcactgagttagaatcagaggatattcaaatagaagccttgctgatgtgagcctgtgagcccataattcagaacttctggtcacgatgtggcagataaccagatagactctggggacctgatggagtgtttgatacagaacaaacaccagaaggacatgaatgagaagtgcgccatcggagttacccacttccagctggtgcagatgaaggattttcggttttcttacaagtttaaaatggcctgcaaggaggacgtgttgaagctttgcccaaacataaaaaagaaggtggacgtggtgatctgcctgagcacgacatatacctagg

SEQ ID NO: 243998 - DNA, 303 bp, Homo Sapiens
cggagtcgtcatgaaggaatccatataagggagaagatatttaagtgtccagaatgtgggaaaacctccccaaagaatgaggagtttgtgcttcatctgcagagtcatgaggctgagagaccatatggttgcaaaaaatgtgggagaagatttggtcggctgtcaaactgtacccggcatgagaaaacccactcagcctgtaagacccgaaagcagaagtaatactgggaaccctttctgggtctgatggtgctgcctcaacctgagagctttcataagtagttctgaatcccaagctgcatg

SEQ ID NO: 243999 - DNA, 562 bp, Homo Sapiens
gaatacttagtatagacgggtgtctcgctattgtgcccagagctggtcttgaactcctgaactcaagtgatcctcctgtcgttttcctcccatattgctgtggttacagatatgaaccaccccacctggcttgaaaatggttttaatggccttacttggagttctccaacaatgggctcataacagttattcctgggctcaccatggtggtagggcctggcctatcctctgtccctgtgttccgtgtgagcccagtactcccagagtcagagcttatctctttcttaggtcacttcctgcccaatgtgaagtatagtggagacgttggctcatggagctgagccctcagtggccccccatgtttgctgttttgtgtctttgcctggagccctgctgcttcctcttccacctgccccacaatctgctgatggctgcagaacatcaggctctctccgaaccctagtcagtggtttccttagtttggtaaccctctgtctttggctactttgtgcatccttgacctcatccacctattaaatccatcagagtctatttccgcacc

SEQ ID NO: 244000 - DNA, 659 bp, Homo Sapiens
  misc_feature (625)..(625): n is a, c, g, or t
ccagccggagcatcccgtgctggcagccctgggaaccaccgtcctgaagcacatcatctggctgaaggtcatcacagctaacatcctccagctgcaggtgaagccctcggccaatgaccaggagctgctagtcaagatctccctggacatggtggctggattcaacacgcccctggtcaagaccatcgtggagttccacagtgacgactgaggcccaagccaccatccgcatggacaccagtgcaagtggccccacccgcctggtcctcagtgactgtgccaccagccgtgggagcctgcgcatccaactgctgcataagctctccttcctggtgaacgccttagctaagcaggtcatgaacctcctagtgccatccctgcccaatctagtgaaaaaccagctgtgtcccgtgatcgaggcttccttcaatggcatgtatgcagacctcctgcagctggtgaaggtgcccatttccctcagcattgaccgtctggagtttgaccttctgtatcctgccatcaagggtgacaccattcagctctacctgggggccaagttgttggactcacagggaaaggtgaccaagtggttcaataactctgcagcttccctgacaatgcccancctggacaacatcccgttcacctcatcgtgagtt

SEQ ID NO: 244001 - DNA, 1147 bp, Homo Sapiens
  misc_feature (12)..(12): n is a, c, g, or t
  misc_feature (22)..(22): n is a, c, g, or t
  misc_feature (31)..(31): n is a, c, g, or t
  misc_feature (42)..(42): n is a, c, g, or t
  misc_feature (60)..(60): n is a, c, g, or t
  misc_feature (77)..(77): n is a, c, g, or t
  misc_feature (98)..(98): n is a, c, g, or t
  misc_feature (472)..(544): n is a, c, g, or t
  misc_feature (1128)..(1128): n is a, c, g, or t
ttgtgatttttnaaaaaggccntaaaacgcnaacaatttccnagtgttataaaccacccnacccactcttccctggnatggtctctggcctttggaanaaaggagaaaaaacatctggccagatcgacaaagctgtcttaactaatacactatctacaaatcttgaaaaatggtggacttagagagaaagggaattttagcaaacaagcgggcggaggagcactaggaggcactttcttatatcttatctgctataggaactgcaggagttatactcacagaaggagagtttccggcataaatttaataggaacggtggatgatttgagaaagtgattttatgcctggttgcaaacagcaagcaataattgatacccggccctggttctactcttacccattattgaaatgtggaaagacttacctagaaatctaaggtattatttcagctgcagttttgcatgtctgcaannnnnnnnnnnnnnnnnnnnnnnnnnnnnnnnnnnnnnnnnnnnnnnnnnnnnnnnnnnnnnnnnnnnnnnnncttttgccagtgcccaacaaaaatcacataatctaagagaaaacaatgtagtccaaacagttccacccaacactccctgagcagctcctaaaatattttgagagcttcattaaggcacctgcatccaaaagatcaaaataatacagctgggataattctgcctttgctttccatatggatgctccaattcatcagtatggggacactcatgaatcacagagctatgttcctgataattctgggtctgcaagaggatctgggagtaaataacaatcaattttcttaaagatatgctagaaagtagttagtacttccaatttctcatccaaatcccaaaaagggccagccctgagaagcttacctgaaatatttctttccttctctcagtggaagtccataaaagccacccctcctccttatcctttcaactgggctcactatggagtgagggagattctaattgtattaggcacttttcctcactagttatatgttgacttttcctctaaaactccattttcacgattccccctcacacatcagacagctacttacttaccgacgccgggtcaacgatctcgcantacccggggggacagcaga

SEQ ID NO: 244002 - DNA, 478 bp, Homo Sapiens
tgaactcaccaaagggagtgaagtgtggatgtgtctcttttacctattttcaccttggttcagttctggtttatgcattgtccagactacccaggatgtgacgattgcagggaggaggtcatgtttgtcataaaaatgctttggctccttaggattcagcaaaggtatccactgcctggtgtctgtggtgcctgcaggacagtgcattctgtaggaaaacaggaagaaaagagggctttcaggccatcttcacatcaaccctacgacagacattttcaaatattgttctcaccatccttactccctcccaggcccctgagatgctcatgcccttggattaaacccctgcagtgctggaagaagaggactctgcactgcctgccacaccaggactggaagatccatggccttcccttcttccaaactaccttcccacaagatggggatggtggtcacatctccaacactgcatgctctg

SEQ ID NO: 244003 - DNA, 274 bp, Homo Sapiens
agctcggtacctgctagcttgggctcaagaggggaggtgaccttagcaaggaatagaagtggcagttctgatagtgtggagatgatctcaggcagaaactcccaacagcagttggcaagggtcccagcatcaattccaaagccccactcgtagaaggtcacccttaaaagatcttcttctctattacctttagtatcctgtcccttccaaatgttcctttcccattccctaattatccattttcagtgagagcacgagattagccaagcttgca

SEQ ID NO: 244004 - DNA, 570 bp, Homo Sapiens
tccccatcagaaagtgatcatagatacactaatcaccaaactgatggaaaaaacaaaatacataaaattcacaggaaatcagatccaaaacagaattattgaagtaaatcaaaatcaaaagcaggtggaacaggatattaaagttgctatatttacactgatggtagaaataaataaaaaaggaaaagctctactgcatcagttagagagccttgcaaaggaccatcgcatgaaacttatgcaacaacaacaggaagtggctggactctctaaacaattggagcatgtcatgcatttttctaaatgggcagtttccagtggcagcagtacagcattactttatagcaaacgactgattacataccggttacggcacctccttcgtgcaaggtgtgatgcatccccagtgaccaacaacaccatccaatttcactgtgatcctagtttctgggctcaaaatatcatcaacttaggttctttagtaatcgaggataaagagagccagccacaaatgcctaagcagaatcctgtcgtggaacagattcacagccaccagcttggccgcctact

SEQ ID NO: 244005 - DNA, 859 bp, Homo Sapiens
tgcagcttggatgtctaaacaattccaggcctttggagatttatttgatgaagctattaagttagggttaacagctattcaaactcagaatcctggtttctattaccagcaggcagcatactatgcccaggagcggaaacagcttgcaaaaaccctctgtaaccacgaagcttctgtaatgtatcccaatcctgatcccttagaaacacaaacaggcgttcttgacttttatggacaaagatcatggcgacaaggaatactaagttttgatctttctgatcctgaaaaagaaaaggtgggaattcttgccattcagctgaaggagagaaatgttgttcactctgagataatcataactcttctgagcaatgctgttgcacagttcaagaagtataagtgcccgcgaatgaaaagtcacctaatggttcagatgggagaggaatattattacgcaaaggattataccaaagctttgaagttgctgggttatgtgatgtgtgattatcggagtgaaggatggtggactctgctcacttctgtattaactacagctctgaagtgctcctacctcatggcccaattaaaggattacattacttactccctagaactccttggtagagcttcaactctgaaagatgaccagaagtctcggatagaaaagaacctcataaatgttttaatgaatgaaagtcctgatccagaacccgactgtgatatcttagctgtgaatactgctcagaagctgtgggcagaccgaatttctctggctggcagcaatattttcacaataggagtacaggactttgtgccatttgtgcagtgcaaagccaagtttcatgccccaagctcacaagcc

SEQ ID NO: 244006 - DNA, 492 bp, Homo Sapiens
aaactatttgacatgaggattctcaacctgataaaaatgagctttcctaataactcaagacccatctgcctaggaataaaccatcccagctgtgagagaccagacgaaacctgagaccagagactcgttttcttctaaaatgctttctccaaaagatttttaaacagaaaaagggggaaatgtgaaaggaaaagaaaacttgaggcccccaaaatcactaagctaaaaggaaaagtcaagctgggaatggcttagggcaaacctgcctcccattctatgcaaagtcatccctccgtgcactgagataaatgcttatctaattgcctcctttggagaggctcatcagaaactcaaaataatgcaaccatttgactgtcacctacctgtgacctggaagatccctctctgcttgagttgtcctgcttttctggatggaaccaatgttcatcttacatatattgattgatgtctcatgtctccctaatgtataaa

SEQ ID NO: 244007 - DNA, 673 bp, Homo Sapiens
  misc_feature (14)..(14): n is a, c, g, or t
  misc_feature (27)..(27): n is a, c, g, or t
  misc_feature (48)..(48): n is a, c, g, or t
  misc_feature (99)..(99): n is a, c, g, or t
  misc_feature (299)..(309): n is a, c, g, or t
aaatgtcggggtanccctaaaactttnctggggttaaccccctttaanggatccccaaaaacacaataaagtgggcattatcccccatttttacagatnggaaaacaagcttggataggtaagaaagaaagaaaaaaacttgcccaagctgtcacagttcattaatagagtctgtatcacagtctaggtaggaatgactctgatgcccttaccttttcaaactaacctaagctttgtcaccttcattgagtttgattattttaagacttttattactaattctggaattacagacacannnnnnnnnnnattaagtcacagtcaggtgctggacagcacgggagagcctgagaaactaccatattgggattaattcctggactcaatgtatgggatccctttcctccctcaaaacacactttcccccatgcccccgtcataaattcattcttatgctaatactgcaaagcctccggtaccatgcttcttaccgtgatattcttgatgatctgctgcaccaagatcgcattggtcaacatatgagtcctgaggggtgcatgctgaagcagcagtcgaagcagctggcccacaacaggcagctcctcaggcccaactctgttcacccgcaggctctgcagcatcaacctgagactcgaggcagagttaacggact

SEQ ID NO: 244008 - DNA, 542 bp, Homo Sapiens
ctttagagaggctctttggctacctgtggttgcaggatgaccacttgatgtccagaaagctactaaaggggagatttggaactggacagactgggctcaaaccctgactctgttgttaccagctgtgccagtcacttaccctctctgagcctcagttacctggtctgtaaaatgtgatgatgacagttccttcttcacagggcaagtgggacggtggcttgagctcctgtttggagaactgttggcaccgacctgcaaaaggtgacaggtgtggtcacacctgaaggtaacccagtcacttgcgcctggagtgatggctagagttggccatggtgtctgggtgaggccagagacacttgcctagtagaaccccccagactcagtgatggacccaaggtgctggtgaaggcgacagaaatgatgcgatagattccctttcgctcttgggtcccaccccaggggcccacctcggggccctacctgcaaaaagcagtccctcagggacattggacaggtgaagaggctttgagggcatgacccaa

SEQ ID NO: 244009 - DNA, 695 bp, Homo Sapiens
catagctggatgggctctgggtcatagatagatagaacaaacagttgcattcttttgagtttctgattagcctttccaaaggaagcaatcagatacaaattaatctcagtgaccagagggatgacgttgagttctgtctgttctttgtccatgaggaatttccgtgtggacaaaatgtgagggaggtatgtagctttttaaaaaaatcttggtagctacttttttaaggactagaatgggaggcaggtttgcactaagcagttcccagcttgacttttccctttggcttagtgattttggggtcgcaagatttattttcctttcacacaggaaaggtaaccattctcctcagtgttgctcaagccagaaatttagacgaaggaaacttgaacctttccctgtctttagaattgtgccattacctcagctagttctgtgcattttctaattcgatttttccagcagtgttgtgagtctcttagaacagttattaattaatactttcactttgcagacggggacacttggagaagttgggagaatattttttcataacgaaagatgtaggcagtgtcatgtgctgggaaagaatggaaatctattgtttcttacatcgttacttaagtaaagcagaaagaaataaccaatgttcacagcttgatgccagctgcagcctggggtatacctctaggatc

SEQ ID NO: 244010 - DNA, 513 bp, Homo Sapiens
  misc_feature (453)..(469): n is a, c, g, or t
ctttctggatggcaggtgtggacagccacccaagacattgcttctgtttttaagttcctataaaatatttctctctgagaaactgggtttgtcagcctctttctttggcctctgagcttccccagcttttgggggtaggtttgcatatgcctgttcacagattctacggattttttgtttgtttccataggaattacaaataacatcttagaattacgacattctatcttacattgataacaacttcagtcacataaaaaaatgctacttctttacagcttcaccccctctatgttactgacatcattcacaaactacgttgttatatactgtgtggccattaacatagatttgtaatttttaatgaatgtgtattttaaatcctgtaggaaaaaaagtagagttacagaccaaaattataatactgttttaatatttgtccatgtattatcnnnnnnnnnnnnnnnnnagactcgagaattctgctcttgtgcccaagcatgcaggtccgag

SEQ ID NO: 244011 - DNA, 247 bp, Homo Sapiens
  misc_feature (247)..(247): n is a, c, g, or t
caaatttagaacttgaataccctcaagagcactggctgatgggaaggcattttacctaattcagactcagatgagggaaaacgataacacttcattacagacttgtctatggccaattcaagtacctttgaatcttgagcaatacacattgccagtcactttaagaggccttatctcttgggctgctttaactcctgcttagcatgtccttaagaacacatgtcctggccaggcatggtggctcatn

SEQ ID NO: 244012 - DNA, 427 bp, Homo Sapiens
tcctcgtgccccaagagggggtgatgttctggacagactggggagacctgaagcctgggatttatcggagcaatatggatggttctgctgcctatcacctggtgtctgaggatgtgaagtggcccaatggcatctctgtggacgaccagtggatttactggacggatgcctacctggagtgcatagagcggatcacgttcagtggccagcagcgctctgtcattctggacaacctcccgcacccctatgccattgctgtctttaagaatgaaatctactgggatgactggtcacagctcagcatattccgagcttccaaatacagtgggtcccagatggagattctggcaaaccagctcacggggctcatggacatgaagattttctacaagggggagaacactggaagcaatgcctgtgtgcccag

SEQ ID NO: 244013 - DNA, 687 bp, Homo Sapiens
cttttgggtaagatcaagtgtagaagtccatgagcacttcaggacttcatttgcattttttcagagagtagattacaacttagtttttcttttttcctgaatgcgtcataggcttgtgagtgatttttgtccattcaattgtgccttctttgtattatgataagatgggggtacttaaggagatcacaagttgtgtgaggattgcattaacaaacctatgagccttcaatggggaagaccagaagggtgagaggggccctgaaagttcatatggtgggtatgtcccgcagcagagtgaggagatgaagcttacgtgtcctgacgttttgttgcttatactgtgatatctcatcctagctaagctctataatgcccaagaccccaaacagtacttttactttgtttgtacaaaaacaaagacatatagccaatacaaatcaaatgccggaggtgtttgatgccatatttgcaaattgccatctattgaaattctcgtcacactacatagacataattgttatctccttttggcttatgtgattttctgtttacaagtagaatagccaattatttaaatgtttagattgccacagtgaaccaggagtcactgagccaatgactttaccagctgctgactaatcttcatcaccactgtagatttgctgcaatgtgttcattttactgtca

SEQ ID NO: 244014 - DNA, 400 bp, Homo Sapiens
cttgggagggtgctgagatcaagaacctggggttaggggagcccaggaggggccagagatgcaggtccactgagtcttgcattgggtctgttcagtgagtgtgccaagtgaagacaagcagagtcacatgccaagagtttggagtggggggtgcagtagacagcccttgagaggctgagaggcagccgggcccgtgagttctgaaaagactgacctggtgtgtggcctgggcagccaggcccccactgctctccgtctttcctggctcatctgctgctctagccagttctcccaggcccgtgagcactgcagcccatctcagggagtggcacttcctctccgtctgaggctaagccaacccattccccattccaagccatatcaggccccccaagtcctt

SEQ ID NO: 244015 - DNA, 288 bp, Homo Sapiens
agagtatccccagcatgcaacttggtttcacagtacacggcaacaacaaagttacacaattcaataagaactcacaaagaaacacaccaagaactcacaagagcacaagttaaaaacaaaggcaaaaatggaagtggagagaaggcgggcagtatacaggcagcagtggctgtgttccttggcacagctcatcctctcctgttgggctctcgtaccgccgccgggaagccggctggctgtccgcccctcccgcagcaccccaagcttgcaggtaccgagctcgatgaa

SEQ ID NO: 244016 - DNA, 894 bp, Homo Sapiens
tctgaatcccaaacgcttttgcaggcttctcaacaagatctagagaaggaacttggaatcaagcattcacttcatcgaaagaaactccagctagcactccaagccctgggtatctgaagaagaaaccaatcatgggaagctggatttcaactgggtcactagatggttggatgacattggcctccctcaatataagacccagtttgatgaaggacgggttgatggtcgaatgctacattacatgactgttgatgacttactgtctctgaaggttgtaagtgtgctacaccatctcagtatcaaaagggccatccaggtcctgaggatcaataactttgaaccaaactgtctacggaggcggccatctgatgagaataccatcgccccatcagaagttcagaagtggactaaccatcgagtgatggagtggctgcgctccgtggacttggcagaatatgcgcccaatctcagaggcagtggtgtccatggtgggctcatggttctagagcctcgttttaacgtagaaacaatggctcagttattgaacatcccacccaataagactttgctgcgaagacatttggccactcatttcaaccttctgattggggctgaggcacagcaccagaagcgagatgccatggagctgccggattatgtacttctaacagctactgccaaagtgaagccaaagaaacttgcctttagcaattttgggaatttgagaaagaagaaacaggaagatggtgaagaatatgtttgtccaatggaattgggacaggcatcaggaagtgcatctaagaaaggatttaaacctggtttggatatgcgcctgtatgaggaagatgatttggaccggttagagctgatggaggattcagagatgagacggac

SEQ ID NO: 244017 - DNA, 838 bp, Homo Sapiens
  misc_feature (704)..(704): n is a, c, g, or t
  misc_feature (758)..(758): n is a, c, g, or t
agaatgcttcagaagaatggcaatagtttgcatagaggtaccagcaatatgtaaatagtgcagaactctcataggttgccaataatacactaattcctttctatcctacaacaagagtttatttccaaataaaatgaggacatgtttttgttttctttgaatgctttttgaatgcttatttgttattttcagtattttggagaaattatttaataaaaaaacaatcatttgctttttgaatgctctctaaaagggaatgtaatattttaagatggtgtgtaacccggctggataaatttttggtgcctaagaaaactgcttgaatattcttatcaatgacagtgttaagtttcaaaaagagcttctaaaacgtagattatcattcctttatagaatgttatgtggttaaaaccagaaagcacatctcacacattaatctgattttcatcccaacaatcttggcgctcaaagaatagaactcaatgagaaaaagaagattatgtgcacttcgttgtcaataataagtcaactgatgctcatcgacaactataggaggcttttcattaaatggggaaaagaagctgtgccctttttaggatacgtggggggaaaagaaagtcatctttaattatgttttaatggtgggatttaagtgctatatgggtggggctgttttgaaagcagatttatttcctatgaatgtngttatctgggccatccccaacccaaactgttggaagtttggtagtaactttcantggagagtttggttactcacaacaaatcctgaaaaggattttttaggggttgggaggaattctggggggatactatacaa

SEQ ID NO: 244018 - DNA, 823 bp, Homo Sapiens
agataacttagaggatcccttgcaaggtaaagtgatggttgactcaggagaccgaagcgagccatcagttctgtgtgcacctacattgtttatcagtgtagtcggccagctcctttacactccagggatctgcactccatgatagtggcagcttttcagtgtctctgtgtctggctgacagagcaccctgatatgcttgatgaaaaggactgccttaaggaagtactggagattgtggaactgggtatctcaggaagtaagtccaagaacaatgagcaagaggtcaagtacaaaggagataaggagccaaaccctgcatctatgagggtaaaggatgctgctgaagccaccctaacatgcattatgcagttgctcggcgcatttccttcacctagtggtcctgcctctccttgtagtcttgtgaatgagaccactttgattaaatactccaggctgccaaccataaacaagcatagtttccggtactttgtcttggataacagtgtcatcctggcaatgctggaacaacctcttggaaatgagcagaatgattttttcccctctgtcactgtgctggtccggggaatgtctggaagacttgcttgggcacaacagctttgtcttttacccagaggagcaaaagcaaatcagaagctttttgtacctgaacctcgcccagttcctaaaaatgacgttggatttaaatattctgtgaaacatcggccatttcctgaagaggtggacagattccttttgtgaaagcagatctcagcattccagatttgcctgacatagtcatctgcagattcagaagatgaggtga

SEQ ID NO: 244019 - DNA, 781 bp, Homo Sapiens
tcttatgcatgtcttccacatctggtctgttataatgtctgaatctggagaaggggaaatctccccacaaagagaagtctcaagatcccaggatcagttcagtgatatgagaatcagcataaaccagacgcctgggaagagtcttgactttgggtttacaataaaatgggatattcctgggatcttcgtagcatcagttgaagcaggtagcccagcagaattttctcagctacaagcagatgatgaaattattgctattaacaacaccaagttttcatataacgattcaaaagagtgggaggaagccatggctaaggctcaagaaactggacacctagtgatggatgtgaggcgctatggaaaggctggttcacctgaaacaaagtggattgatgcaacttctggaatttacaactcagaaaaatcttcaaatctatctgtaacaactgatttctccgaaagccttcagagttctaatattgaatccaaagaaatcaatggaattcatgatgaaagcaatgcttttgaatcaaaagcatctgaatccatttctttgaaaaacttaaaaaggcgatcacaattttttgaacaaggaagctctgattcggtggttcctgatcttccagttccaaccatcagtgccccgagtcgctgggtgtgggatcaagaggaggagcggaagcggcaggagaggtggcagaaggagcaggaccgcctactgcaggaaaaatatcaacgtgagcaggagaaactgagggaagagtggccaagcgcctaatca

SEQ ID NO: 244020 - DNA, 858 bp, Homo Sapiens
actctagaggttccccgactagtccaaccatccggaggagagctgggggctgctcccggagagatacggctatgtcgatcgaaatcgaatcttcggatgtgatccgccttattatgcagtacttgaaggagaacagtttacatcgggcgttagccaccttgcaggaggagactactgtgtctctgaatactgtggacagcattgagagtttggtggctgacattaacagtggccattgggatactgtgttgcaggctatacagtctctgaaattgccagacaaaaccctcattgacctctatgaacaggttgttctggaattgatagagctccgtgaattgggtgctgccaggtcacttttgagacagactgatcccatgatcatgttaaaacaaacacagccagagcgatatattcatctggagaaccttttggccaggtcttactttgatcctcgtgaggcatacccagatggaagtagcaaagaaaagagaagagcagcaattgcccaggccttagctggcgaagtcagtgtggtgcctccatctcgtctcatggcattgctgggacaggcactgaagtggcagcagcatcagggattgcttcctcctggtatgaccatagatttgtttcgaggcaaggcagctgtcaaagatgtggaagaagaaaagtttcctacacaactgagcaggcatattaagtttggtcagaaatcacatgtggagtgtgctcgattttctccagatggtcagtatttggtcactgcgtctgttgatggattcattgaagtatggaacttcactactgaaataatcagatagtatcttaagtgacaggcgcaagatacctctacgctgc

SEQ ID NO: 244021 - DNA, 824 bp, Homo Sapiens
atcagatttgcgttctgcactatgacatcatttggccttcaggttttgtgtgcgacaactgcttgaagaaaactggcagacctcgaaaagaaaacaaattcagtgctaagaggctgcagaccacaagactgggaaaccacttggaagaccgagtgaacaaatttttgcggcgccagaatcaccctgaagccggggaggtttttgtccgagtggtggccagctcagacaagacggtggaggtcaagcccgggatgaagtcacggtttgtggattctggggaaatgtctgaatctttcccatatcgaaccaaagctctgtttgcttttgaggaaattgacggcgtggatgtctgcttttttggaatgcacgtccaagaatacggctctgattgcccccctccaaacacgaggcgtgtgtacatttcttatctggatagtattcatttcttccggccacgttgcctccgcacagccgtttaccatgagatccttattggatatttagagtatgtgaagaaattagggtatgtgacagggcacatctgggcctgtcctccaagtgaaggagatgattacatcttccattgccacccacctgatcaaaaaatacccaagccaaaacgactgcaggagtggtacaaaaagatgctggacaaggcgtttgcagagcggatcatccctgactaccaagatattttccaacaagcaactggaagacaaggctcacccggtgcccaaggaactgccccctattttggaaaggtggattttctgggccccaatgttggttagaaaagaagaagcattttaggggaaaccttagat

SEQ ID NO: 244022 - DNA, 295 bp, Homo Sapiens
ggccactttcgagtagatcctccgcacagccgtttactatgagatccttattggatatttagagtatgtgaagaaattagggtgagtttggattaaattatttggaactagtaagaaccctttattttttactgtatgtttattccgtgaaataatgggtattttaagttttatgcgtttttatttttccatcctaagatcaattcagaatctccaaagctcctctttccaggtgctccccgagcctcacaggtctggctcctgggcacgtagcaagctctttcccatctaatcc

SEQ ID NO: 244023 - DNA, 810 bp, Homo Sapiens
aaggcatgcaagctgggtgggaagaagcttttaaagtgcgaagactgctccttttacacaggctataaatctgcttatactatgcacgtggaagcggggcactcaacaggtcccgagagagggccccaaagatcttcgcaatcctctcagcctctatcacaccaaatacgagcgcaacatgattgagcacatcgtgctgcaccgagaagagcgtgttgtccccattgaagttcgccggtccaaactgtccaaatacttgcagggagtagttttccgctgtgataagtgtaccttcacctgctccagtgatgagagcctccagcaacatatagaaaagcacaatgaactgaaaccttacaaatgccagctctgctactatgagaccaagcacacggaggaactggacagccaccttcgggatgagcataaggtaagccgtaactttgagctggttggacgggttaacttggatcagctggaacagatgaaggagaaaatggagagctccagcagcgatgatgaggacaaggaagaagaaatgaacagcaaggctcaagacagagagctgatgagattttctgaccacggggctgctcttaacactgagaagcgttttccatgtgaattttgtggacgggcgttttcacagggctctgagtgggaaagacatgtgctgagacacggcatggcattgaatgacaccaagcaggtgagcagagaagaaatcctcccaaagagatcatggagaacagtgttgaaatgccctccatagaggattcagaagtgagacgggatactctagagtcacct

SEQ ID NO: 244024 - DNA, 560 bp, Homo Sapiens
atacaatcagccgcacccttctgaatccctataccaagtttctcatttgtgagatggaggtattatttacttcgaaatggtaaagggaaaacaagcaaaagcatttgcaaatgctctgtaagtaaacctatatcatgaatgtattttcttggccagaagtactggtacagaccgttaagtatggagggataccagggcagtcaagacctgcactgggtacatagaaacattttggcttggttagacagtctctgtttcctgtaccacaggttttcctgacagcctgtgcaagttaggacttttgatcttaatatttgtacagcttgtgagttaggtgaattatttccaccaaacaaaacattttacgaatataagcatccagatggcctatctcaactcccatggcccccaccagacactatatcaatatgtttcttatcagttttgaaattttctccttaagtttcatttagcatattgctgaaagtgggttaaagaggccctattagtgagatcccagctgggactttagatgggaaatatgcagattcagaagatga

SEQ ID NO: 244025 - DNA, 657 bp, Homo Sapiens
ggtactggtataaaagtagacacatagaccagtggaacagaatagagaacccagaaatacagccaactattgacaaccaactgatcgttaactaagcacacaaaaatataaactggggaaacaacatcctacttaataaatggtgctgggaaaagtagatagcccacatgtagaagaatgaaactgaatccatctctcttaccttatacaaaaatcaactcaaaatagaacaatgacttaaatctaagacccgaaaccatgacatttctacagtataaccaggaaaaacttttctggacattggcctaggcaaaggattcacgactaagaccccaaaagcaaatgcatctgcctctcttttaatatccaagggcaacatgaatgtaactcgcaacactctctaaggtttcattcactcattcacaataaaactttcagatggggacttgttagagacaaatggcttaggacgagagaaagcaaaaaagacctactgaaactcatcaaggtggggaaagaaatggaggaaggtcagtgagggcaagaaattccctaggatgactctagaaaagaaaaatgaggcaagagccaggataaggtgacagaagatgtgagcaaggtctcctggggattcagaagatgaacggtccgagctca

SEQ ID NO: 244026 - DNA, 564 bp, Homo Sapiens
cctttgctatactgtgatccttagtatgttaattcttaagaaaccgacatatcactgaaagaaggctggcagaacgcaagtgcattttttcactgtgggaagaaagatcaagtgacgtattattttttcctggttgtcacttaatgggctgagtaaaaagcttgaaaactcagactttcggtcttggttctgccactcattggttatgaggaggcccagagcaggtaagttcaccttcctggccttactttcctgatgtgtaatacggaattacttcacagtagcatgacagtataagacaccagcagtagatacaactatgatgacattccatgagttggcatttttagttctaactgctaaatttgttctctttacgggacagatttctaataaagtgcttggtcttaaaatacatggttggacagaggtgccctatcccttaactatgagcaggtgctaccttttgggatatttattttaaattttaatactttggtactcaattgtcagtgttcctggtgtgtcatcctatttttgggattcagaagcatgagacggtat

SEQ ID NO: 244027 - DNA, 813 bp, Homo Sapiens
  misc_feature (143)..(173): n is a, c, g, or t
gtgaaaaaaaattcttgggaaaagtaagaatacatcaaatcccatttggtagtctatctaatagagtttaaggggtaattttgttctttctcccctccaagtaaagctaatgctaaaatcatcactagttacatatgcttttnnnnnnnnnnnnnnnnnnnnnnnnnnnnnnngaagtgaacttaaaagtgcttttcggtatggtcatgaactttactgttctcaactgcattaagggattctcaactgcattaagggattcagaaattatttggggacaagtcctgtacatatagtagaagcagatacttccttatgttccaaaatgtctatggcacaaagcagacatcagtccagaacctacttttcctcacagctttgctgaaatgcccctcaagtcaaacataagttcataaatgttaagacactaggaagaaagttcgccatcaacctgaggcatcagacgttaatgtctgtctatgtgaatcagtggtcaagtgacattaacaagattggcacatgtacaagcttaaattcatgtctacatagttcctcaatagtggaagtaacttctggatgtctaaatgcactgatcacctgtccttttccttgaaggatataccagaatactaattctactagtatctgctttataatttttatactattagcttacaagtggacagaagtaacagtgctaattattttggctatgtgtacagggaatataaaagctttggtttaaagtgattctgataatacagattctgttactccaaggtcttccactcagaccattctaaatatacgacc

SEQ ID NO: 244028 - DNA, 802 bp, Homo Sapiens
cagaggcaattttaaacctacaagctctaacattcttaaatattagtcggaaccaactgtcaacattggcggtacacttgtgtaatttgccattgaaagtcttaattgctagtaataactcattggtgtcacttccagaagaaattggacactttagacatttagatggaacttgatgtgagctgcaatgaaattcaaactatcacctgtcccacattggtaacctggaggccttgagagaccttaatgtaagaagaaatcacctagtacatttgcttgaagagctggcggagttgcctttgatacggttagacttctcatgcaataaaattaccacaatccctgtttgttatcggaacctcaggcacctacagacgatcaccctagataacaatccactacaatcacctcctgcacagatatgtataaaaggcaaagtccacatatttaaatacctgaacatacaagcttgtaagattgctccagatctgccggattatgataggagaccgttgggttttggctcctgccatgaagaactgtactcaagtcgcccttatggagcccttgattcaggcttcaatagtgtggacagtggtgataagagatggtcagggaatgaacctacagatgaattttcagatctgcctcttcgagtagcagagattaactaaagaacaaagactacgaagagaaagccagtaccaagagaaccgcggcagtttggtagtaacaaacggcggagtggaacatgatctggatcagtgactacatagacagctgcgccgcagaggaagagacc

SEQ ID NO: 244029 - DNA, 804 bp, Homo Sapiens
ctgaattattttctgaaataggttgtatgtagataatacaaaatagaataaatgctaccatttaggaaaattttaaaacacatgaacctatatattattttgtctttatcctgtgttatgttttcctgaaagatataaacacatttaatatttttgtgtgtttcacttgcttgctttttcattgttctgtaactttttcttcttttttgaaaaacattattgttttccgtaagatctttctcttactgattcttgtattttgatgtttgtttactagaccacagcagtttacgtttcaagattcaaataattctgttgattcatcagcttctgatagtgaccctatgagacagagattttctataaaagcacactcacggttaccctacctcgttatatctgatggatatatggtcacaacccttcgatttcttgatagcctatctccatcagtacacatgagatcacttctacttgattcaacccagaggcttgagaaaatatatcaaagtgtgatattgtctaagccaaaaggcaaaggactgaacttgcgatcactgaattccctaaggtctagcctgttagaacaccaaggaaatgaaagttcagccgatttcactgtccccaaattcttgcaggcagaagaaacaataaatgaaaatgcagcagattttcaggattttgaagcagaagaaactaacgaaggcagacactttccagacaacttatgtcctttttggaacaaaagagatgatgtgctgtgtagtagtatgaaggaaggaagattggaattgcatctcgtag

SEQ ID NO: 244030 - DNA, 829 bp, Homo Sapiens
aattcttaaaaaattatttcaccgataaagcggcctcttacactgaggaagatgagtatcacacagccaaagattgccttctggtttattctcaggaagagactgaatcgctgaatgcttctattggttgttgcagttttattgaaggagagctagatgaccgcttcttagatgatttgggacttaaattcaagacactagctgaagtttgcctgggtcaaaaaatagatataaataaggaaattgagcagagacaaaaacctgccacagaaacaagtatgaacacagcttcacattcactctgtgagcaaactatggttaattcagagaatacctactcctctggcagtagcttcccagttccaaaatctttgcaagaagccaatgcagagaaagtaactcaggaaatagtcactgaaagatctgtgtcttctaggcaggcgcaaaaggtagctacacctcttcctgacccaatggcttctagaaatgtgatagcaacagaaacttcctatgtcacagggtccactatgccaccaaccactgtgatcctgggtcctagccatccacagagtcttattgtgacagagagggtgtatgctccagcttctaccttggtagatcagccttatgctaatgaaggtacagttgtggtcactgaaagagtaatacagcctcatgggggtggatcgaatcctctggaaggcactcagcatcttcaagatgtaccttacgtcatggtgagggaaagagagagcttccttgcccccagctcaggtgtgcagcctactctggccatgcctaatatagcagtgggacagaatgtgacagt

SEQ ID NO: 244031 - DNA, 317 bp, Homo Sapiens
ggaaaacttgccaccatgtattcaagtggtagtccggaaggtggatctgacagttcagaaagccgaagtgaattcttagagaagttacaaagagctcgaggccaagtaaagccatctacttcaagtcaacctatactgtcagcaccaggacccactaaacttactgtaggaaattggtcactgacatgtttgaaagaaggagaaattgctattcataattcagatggtcagcaagctacagtattgaaagaagatttacctggttttgtatttgaatctaatagaggaaccaacattcatttactgcagaacttcct

SEQ ID NO: 244032 - DNA, 585 bp, Homo Sapiens
aaaggcaacatggattgtctcaatggctaatttcttacacacagaagtggtctttttacaaaccaaaatacaaatccagcatatttttcttaactaaacaaaggcaagcacactcttattacatcatctcctccttcacctgtcctcagcccactcctctgtagctgccaccactaagaagcaggatctcaaagttctcaatgtacatgtaacatggctgagatgttccaaaccagacctgttcttggaaaatgttgatctcatattcaattaagggaggaaaatactactatgaaactggtcacatattcaactaatataggaaacagcacaaccaaaattttatagaaaatctctatcaaacaagaaaccagtcaagtaattcaggaccgcaaatcagatcaggtaagtaaccatgaagtacctgcaacatagtacgtctaagtcaaatacatttttgtttaaatcatcaccagaatcactattaacaaaatgcttttccaagacaggaaaatatattaagggacaatgaatttcctgagatgacataccacgtctaagggggatagtcaatatcctccagaa

SEQ ID NO: 244033 - DNA, 605 bp, Homo Sapiens
  misc_feature (210)..(245): n is a, c, g, or t
actgaacatgaccagtcctgaaatctggagagatggccatatttccactgaatagaattgtcagaaaatctagatcttcaggcatctggggaaaatcagtgcaagaatcctcagggagtcatttgttcaaataacctaatctaggcctttggaattgttaatttgtatgaatagcactagtttgaaatatagtaaatatcaagctgttcnnnnnnnnnnnnnnnnnnnnnnnnnnnnnnnnnnnncttctggtgatttgcctctttagctcttcaaaggaatctaaagacagcaagacatcatctaaagatgacaaaggtaaagaatttttttccctatttatttcagtgttgacattgtgtattttcattaaaaagtagtagttgcgcggtgttttctttgacatttagtccttaaaaattttattgacagactagaaacttgagatggtctttatataaactgtggaattatatatattacagaaaactgattgatgtgttactgtttacttactttgtaaactggtaatggggtacgttgaaaacccattagctagggaacacttacctggtgtgttctaacgggactgggtcatgttctgt

SEQ ID NO: 244034 - DNA, 653 bp, Homo Sapiens
tgaggatcccgagaggtgggacacggggagaggtgggaccacgggtactgaggggaaaataccgtattccattctacatgtccacggactgtgaaaacctgcttaagaaatttctcattcttaatcccagcaagagaggcactttagagcaaatcatgaaagatcgatggatgaatgtgggtcacgaagatgatgaactaaagccttacgtggagccactccctgactacaaggacccccggcggacagagctgatggtgtccatgggttatacacgggaagagatccaggactcgctggtgggccagagatacaacgaggtgatggccacctatctgctcctgggctacaagagctccgagctggaaggcgacaccatcaccctgaaaccccggccttcagctgatctgaccaatagcagcgccccatccccatcccacaaggtacagcgcagcgtgtcggccaatcccaagcagcggcgcttcagcgaccaggctggtcctgccattcccacctctaattcttactctaagaagactcagagtaacaacgcagaaaataggcggcctgaggaggaccgggagtcagggcggaaagccagcagcacagccaagtgctgccagccccctgcccggtctggttcagaagatgag

SEQ ID NO: 244035 - DNA, 1306 bp, Homo Sapiens
gaatctgttgcggcagctgaggctacaacaggcctgcgccggcggcagagaggatatcttgggcgggggatgtgagcgctgagcccttggcagaagtcaatgtgattttaatttgaagcaaaactgaaatgggttcttcttcctcattctattcatgttgctttttgatggccatggcataaggaactctatcccaggaatacagctttgcattagcaccgaacaagatttgtgatgaaatggagcctggaacaaactcttttcgggtagaatttcctgatttttccagcaccattctacagaaactgaaccagcagcgccagcaaggacaattatgtgacgtctccattgttgtccaaggccacattttccgggcacacaaagccgttcttgctgccagttcaccctacttttgtgaccaggtactcctgaaaaacaacaggagaattgttttgcctgatgtgatgaacccaagagtgtttgagaacattctcctatctagttatacaggacgtctagtaatgcccgctccagaaattgttagttacttgacagcggcaagcttcctccagatgtggcatgtggtagacaaatgtactgaagttttagagggaaaccctacagtcctttgtcagaagctaaatcatggcagtgaccaccagtcaccaagcagcagtagttataatggcctggtagagagctttgagctgggctctgggggtcatactgattttcccaaagcccaagaactgagagatggtgaaaatgaagaggagagcaccaaagacgagctgtcattccagctcaccgagcacgaatacctgcccagcaactcgtccacagagcatgaccgcctgagcacggaaatggcaagccaggatggggaggagggcgccagcgacagcgccgagttccactacacccggcccatgtacagcaagcccagcatcatggctcacaaacgctggatccacgtgaagcccgagcgcttagaacaggcttgcgagggcatggatgtgcacgcgacctacgacgagcaccaggtcacagagtccatcaacaccgtgcagacagagcacacggtgcagccttcgggagtggaggaggacttccacatcggggagaagaaagtggaagctgagtttgatgaacaggctgatgaaagcaattatgatgagcaggtggatttctatggctcttccatggaagagttttccggagagaggtcagatgggaatctaattgggcacagaccaggaggctgccctcgcagcaggttacagtgagaatattgaaatggtaacag

SEQ ID NO: 244036 - DNA, 837 bp, Homo Sapiens
ttactctataggatcccgattcattctgaatccctgcactctgtgacttggtctctgtttggcagcctgagattgtgactcaggctctctatggcaaacagaaacctaggctgttactggggtcacagtccccactatagtgaactggagctgtgactcaagctctgtatgtgaactgtgtccgactcaggccctgtatggtgaactgaggctgtgactcaggctctgtatgttaactgggggtgtgatctggggtctgcttggtaacctgaggctgtggctggggtcacagtttctgctatggtgaacaggggatgtgactcaggctctgtatggtgaactggggctgtgactcaggatctgtatggcaaactgagctgtgactcaggctctgtatggtgaactggggctgtgactcagactctgtggtgaactgaggctgtgactcaggctctgtatagtgaactggggctgtgactcaggctctatgtggtgaactggggctgtgactcaggctgtctatagtgacctgagtctgtgactcaggctgtctatggtgacctaaggttgtgactggggtcacagcccccactatgatcagtttaaaacaagaaaaggctatgagctcaggctctgtaatggtgaactgaagtactatgactcaggctttgtagaggtccatgaggctgtgactcaggctctgcgtcgtgacctgaagttgtgacctgaggttccagtttaggagcaactaaaatgatgacagtgatagcttgaagtgaacattttagaagaggaagagaaaactagaacgcacagtactgtttgagaaagctagag

SEQ ID NO: 244037 - DNA, 516 bp, Homo Sapiens
tggctaatgggcaatagagatgtacaatttcagtaagaaaatacaaatggaagtatgttcattgtcattaatgattggcaattcaaattaaaataattgatcagaggggtggaaagaagaggaaggcaagaagacagcatttttaatctggcaaatcggaaaggttaataggtcctagtgttgattagctggcaaagaaatggctgccttcatggacttttgattcaagactgtgtaaattggcctaagtttttggtatgagttaagaatctttgtgttttgactctcagactgccttatcagagtcactcagaatcttccttggctgcattttcctctcatatgtggtatacataactgcacagagcatcgtgtggtctctttgtggccgggtcagccatttgtttagccgttccttatgaatagctttctaaggtgggcaggagaggtctaattacctcaagttttataaagatgaggaaactggcattaaagctcattgactgtcctagttct

SEQ ID NO: 244038 - DNA, 972 bp, Homo Sapiens
  misc_feature (405)..(408): n is a, c, g, or t
ggcagagcgatcagaggacccggacacgcttgagcggtgggaactgcagtatgtgattggagtccagattaatctcccatatgaatgactgtcctcaaacttacaaggtggatcttagtaatcttttccagaaaatgtaacggcactattttgggctaaagtatttaaaggctctcaatcagagttttaaattttgcatatataatttcccccttaagcttcctttgctgtttcttttggaactagctgaatgcttgtattctctatggagaggttgggtagaaaagagtgatgaggggcataaaagtatcttccctgattagaatggagggcatgggtggtactgaactagtggtgcttagacttggttgcaaatgggaatcacttcaagagtttaaaaatatnnnnaacagttcagcaaggtggcagaatataagatcaatgtacagaatcaattgtatttccatatactagtaagaaataatataattgcattaataagaaaataattccatttacaatatcattaaaaggaataaaatatttagggataaatttaccaaagtagaaaattctctgaaaactgcaaaatactctagaaagaaattttaaaagactaaataaaagatatcccatcttcatggattggaagacttgttaaggtggcagtactcccccaatggatttacagattcaacacacctccttgtaaaaattccgactaaattctaggcttatcccaaaattcctatggaaatttgagcaacctagaatggtgaaacaatctggaaaaagaacagagttggagagctctattcctcatttcaaaactgattacagagcgacagtaatcaaaacattgtgatactgtcatgaggatggacagatagatcaatggaatagaattgagagtcctataaataaataaataaatcgttattttttgtcactttgattttcactcagagtgtc

SEQ ID NO: 244039 - DNA, 269 bp, Homo Sapiens
tgttcataggagagcctagtgtgaaagtcaaggaagaaggagggaaacctcaaatgaattctgaaggggagataccttccctgccatcaggcagccaatctgcaaaaccagtaagccagcccagggaaatcaacccagccagatgtttgtgcctctcctcaagaaaagccactcaggactctgtttcaccaacctgaggaagagatagaagatggtggactcttcattccaatggaagaacaagacaatgaagaaagtgagaaaaggag

SEQ ID NO: 244040 - DNA, 539 bp, Homo Sapiens
acgttgatgtagtaaaagtatgagcaactagcgtaaaaaaatctcctttgggagcccagctgggaagccaaaagacaaactgttttagataaggtagtgaattacttacacacgatgaagtccactttcgaaacacgaagatgcaaaggcagcatgaacttagtgagagctgtagtgccaagtgcccttcaggcaagattgaaagtagctcgcacatgaacgctgaggaagatatctgataatattgcagaagacttcttggagggaaagatggaaatagatgattttctcagtagcttcatggaaaagagaacaatttgccactgtagaagagcccaggaagagaaacttcagcaggcgatagcaatgcacagccaatttcatgctccactatagattttcctggaaacatgaactgccaagagaggaatgggacacgaaatcgaacactgttttatatttatggtttgcaaactggcatttcatcagtggctaaattcacagatatcctatatagattggattcagaagatgacacg

SEQ ID NO: 244041 - DNA, 1040 bp, Homo Sapiens
  misc_feature (246)..(246): n is a, c, g, or t
  misc_feature (792)..(792): n is a, c, g, or t
gaaatttggaacgtggaggtgtggaaaagctattggatttaagttggacagagtcatgtaaaccaacagcaactgaaccactatttaagaaagtcagtccatgggaaacatctacttctagcttttttcctattttggctccggccgttggttcctatcttcccccgactgcccgcgctcacagtcctgcttccttgtcttttgcctcatatcgtcaggtagctagtttcggttcagctgctcctnccagacagtttgatgcatctcaattcagccaaggccctgtgcctggcacttgtgctggactggatcccacagtcggcgtcttgtcccacaggaccttccccagaacccaccttctgcaccctattgtggcattgttttttcagggagctcattaagctctgcacagtctgctccactgcaacatcctggaggctttactaccaggccttctgctggcaccttccctgagctggattctccccagcttcatttctctcttcctacagaccctgatcccatcagaggttttgggtcttatcatccctctgcttactctccttttcattttcaaccttccgcagcctctttgactgccaaccttaggctgccaatggcctctgctttacctgaggctctttgcagtcagtcccggactaccccagtagatctctgtcttctagaagaatcagtaggcagtctcgaaggaagtcgatgtcctgtctttgcttttcaaagttctgacacataaagtgatgagctatcagaagtacttcaagacagctgctnttttacaaataaaatgtgatacaaaagatgacagtatcccgtgctttctggaagtaaaagaagaggatgaaatagtgtgcacacaacactggcaggatgctgtgccttggacagaactcctcagtctacagacaaaggatggcttctggaaacttacaccagaactgggacttatattaaatcttaatacaatgggtttgcacaacttttcttaaacaaaaagcattccatcctctaggtgtaaaagg

SEQ ID NO: 244042 - DNA, 950 bp, Homo Sapiens
ttgccagagaccctcgtcattttgttgcagacatgtctagaccttggactgtgatggaatctctgcagaaatgggctagtgttttacgtgagcacattgataaaatgaaaattccaccagaaaaaatgagggagctggaacggaagtttgtgaaagattttcaagactatatggaacctgaagaaggttgtcaaggttccccacagagaaggggccctctgacctcaggctccgatgaagaaaatgttgccctgcctctgggtgacaatgtgctgactcataacctggtggatcccgggtgttggtggatgtgcacaaagtgtgatgcggtgagtgtcctggagaaggagcactgattacagggatgagcatttggactttatccatgtcacacctgcggaggttctgccttcagtatggagctgccttgatttacacttcagtgaaagaagagaaaaagctcgacttgttgtataagtatattggttcataaaacatacggtttccacttcaccacacctgccttagttgtggaaaaggatgccgtttttatacctgcaggctgggacaatgaaaagaaaatagctatttcacatgaacaattttacaaccgtggaagccggacagatgcatatgacagactttattgtgaaacctcccgtgagaaagctggtccacgacagagagttggcagcagaagatgagcaggtgttcctaatgaagcaacagtcactccttgccaagcaaccagtcactcccacgagagcttctgaatctcctgcaagaggaccctctggctctccaaggacccagggtcggggaggggccagccagttgtgcctagctcctccccaggcacgtcagtgaaaaagccggaacccgaacatctaaaatattgcagcaagtgaagggggtgttgggcagcttcttcaacagtctgttgaagtaaa

SEQ ID NO: 244043 - DNA, 1039 bp, Homo Sapiens
  misc_feature (368)..(440): n is a, c, g, or t
  misc_feature (494)..(494): n is a, c, g, or t
  misc_feature (738)..(812): n is a, c, g, or t
  misc_feature (852)..(863): n is a, c, g, or t
cttccgtcgaccttgatggttttctccaaatttaaaaagttgggagtagtgtcatccaacttgtcactgagacacttctgtctttaaaatttcacaaatagctctgaagagtatcatgcacctgccccatccacctcagccatgatactgtattaaatcactgaatatgaaacacagaaacacaaacaatagttttgggtttgtttctttaaaaatgacatttgtattaaaagtcttaaaatgaagagccaatgattaaaggcatgaaattaaaaatttcaattagttagaattggtacatcacaacagtaaatttttgctctttgcttctggaggaacaccctacaaccaggtaattaaaaaattannnnnnnnnnnnnnnnnnnnnnnnnnnnnnnnnnnnnnnnnnnnnnnnnnnnnnnnnnnnnnnnnnnnnnnnncattgcaagagatggaaattacattttaaaggctgaaaataataaagaaattcnctaaacaacaggccctattgtcctggctccttcagaaagattactgaaaggaaactgggaagtggtttggggaatagcagattctgggatatggtgggaagttcacaggttggcaccggctggaacagctgagttttgaaggcactctgcagacacaggggtgctgggggccctgaatcacatttacaaagtctttgtactgtatttttaaaagctagtcattaaaatcggttactgccaaccnnnnnnnnnnnnnnnnnnnnnnnnnnnnnnnnnnnnnnnnnnnnnnnnnnnnnnnnnnnnnnnnnnnnnnnnnnngaaaatgtgcagatctgtaacatttttttcacagctgatnnnnnnnnnnnntactaccattctcccccagactcccctttgatacagtaggtaaacaaaatagattttttttccacaaatatcagcagacactttctggcaccccacactgtattggcatcagtgttaacagtcccagttcagatgtgcaatacttcagattggatacactgtaacaagaatccacc

SEQ ID NO: 244044 - DNA, 618 bp, Homo Sapiens
ttgggattcagcatcacttccagagatgtaacaataggtggctcagctccgatctatgtgaaaaacattctcccccggggggcggccattcaggatggccgacttaaggcaggagacagacttatagaggtaaatggagtagatttagtgggcaaatcccaagaggaagttgtttcgctgttgagaagcaccaagatggaaggaactgtgagccttctggtctttcgccaggaagacgccttccatccaagggaactgaatgcagaagatgaggatattgttcttactacctgatggcaccagggaatttctgacatttgaagtcccacttaatgattcaggatctgcaggccttggtgtcagtgtcaaaggtaaccggtcaaaagagaaccacgcagatttgggaatctttgtcaagtccattattaatggaggagcagcatctaaagatggaaggcttcgggtgaatgatcaactgatagcagtaaatggagaatccctgttgggcaagacaaaccaagatgccatggaaaccctaagaaggtctatgtctactgaaggcaataaacgaggaatgatccagcttattgttgcaaggagaataagcaagtgcaatga

SEQ ID NO: 244045 - DNA, 1037 bp, Homo Sapiens
ttggaaaatgggaattttcccttccattcattggggtttcccccactttcaataggttttccatccctccttagaccccccataggcggccccctccttcaaagcttcactgttggattctgcccaccccatgcttgttaattctgaaccgttcatggaggaaattgcaagctgttctccgaagcggcagaagccattctctttgtagtccttacagatgtcgggctggtaatcccagcgcacggtggcacgtagatgctcgggcgctcggatggggcccttcctcaccatcccggaagaggcattgcccatagacgtatccttgggcttcatgtatttctgataattgttgattccccgatagatcttgtcatcctccttgcccctcagctcctcctggatcttctggctgcgctcaaagatggcttgtgcatcgcgctctttctctgtgtccagctcatagacagctgtcgctcccatatcctctggtcccacgggtttcgccgaacgggtggatttataaaccacgccgagactctcgggctcattttcctcttcctcttcgctgctcaagtcgccgtaagccgccttctgtttaccactgtcacgggtcttctgtatcattggattgtgggtcacccgcttcttttccggtcgaaccacagtgcagccttcgtcgctactgctgccgctttctccgggctctgggtcgcaggccgggcgctttctgcgtccagcagcccctttccgcccaggctttttgaaaaggaaggtgcacacctgatccaccgcctttcctggagaaagctgctctgccattttagagtcctgagctccgaaacagccgtggctgcctgggttgcacttggcccctgcacgtcactccacgttgcgcgctccgccgggagtcgaagcaaaagacactgacggaagaggactgcgagagcgcgagcgcccgtctctcttgtgccctagcagattccgtcgcttcttccggagccgtacgtggccctcgtgccgaattcgccacccaggcc

SEQ ID NO: 244046 - DNA, 824 bp, Homo Sapiens
  misc_feature (719)..(719): n is a, c, g, or t
  misc_feature (796)..(796): n is a, c, g, or t
  misc_feature (801)..(801): n is a, c, g, or t
acggtaagagatgcctttattttaactaaggacacagtacagatctcacagggacactccttatccctgcagagttccagacactactgatggtcaccaaagcaacatttcatcagaaaacacagtgctgggcttgtgaagaaggtgtccagcagagcttccactgcccctgtaggctgcaggcagctgcttcagttgagagatacactgagctcctcaaagaattcctatttaaggtacaaagcagcgactggatgccctgctggattccactattgccacaggctttgataactctaagttcatgctccttaggaaagtgcactttttacaccaatgttagacagttccctcagttgcctttactggacatcaaggagttcacatttttgacaatctttcagtcctgaactgtccaaggggtggaggtagctccatacaggaagctgcctgctgcgtgtggatcagtaatatcagacttgcccaacagctcactggagacatcaaaaccaatgcatgggggatgcatgacgtcacccaaatatttaccacacgcttttgctgccagagaccccagatcacttttcctgcctcctgctaaacaaatgggagcagtagcttcttcatcagcctccacatttcattactcattaattgtggggcctttccttaatgtcttcatggcccttagggacttatttacaatgttttcaacagcnttcttttcaggcctttcaaatattaggtcattctttaaattaatgtctggtgtttaaggcttcggggtcattggtangtggncacttaattttctggtggctccc

SEQ ID NO: 244047 - DNA, 557 bp, Homo Sapiens
ttctgatcatctgagtttgcacagtcagtaaaatcctgctggaagcacagaagcagtccattgagtctggctccatagctggtggggagcacctctgttttatgggcagtggcagggaggaagaagacatgtatatgaacatggtcctggcacactttttacagaaaaacaaagaatatgtgagtattgccagtggaggatttatggcactgcagcagcacctggcagacattaatgtggattgaccagaaaatggatatggccattggattgctagtacctcaggctcaaggagcagtatcaattctgttgatggtgaatctcctaatggctcaagtggtagaggaatgaaatcactagtaaataacaatgactgtggctttgaagacaaaatccgttaatgtcagggaaaaagttatcagttttatagagaatacatcaactcctgtggatcgaatgtctttcaatcttccttggccagacagatcatgtacagagcggcatgtgagcagcagtgacagagtgggcaagccttaccgtggcgtaaagcctctctc

SEQ ID NO: 244048 - DNA, 448 bp, Homo Sapiens
attctgttgatgtggctgttatttggaaaattagcgcacgtgggagaagggaccatcttaagaaaatatagggccaggcgcagtgggactggggtctaagcctgtgcggctgagcgtggcaatccctaaagcgagccgtgtaaagccagtggaatatagtcagatgtacagttatagctacaaccagtattatcagcagtaccagaactactatgctcagtggggctatgaccagaacacaggcagctacagctacagttacccccagtatggctatatccagagcaccatgcagacatatgaagaagttggagatgatgcattggaagaccccatgccacagctggatgtgactgaggccaacaaggagttcatggaacagagtgaggagctgtatgacgctctgatggactgtcactggcagcccctagaggtggggtaccgagct

SEQ ID NO: 244049 - DNA, 749 bp, Homo Sapiens
ccgcggttatgtcttacggtggaggattcccagccatatgaagacaccctagctggacgatcagtccttgtcaaaagtctgacccctcaaactctacagcctcaatggaccagaccctacccggtcatttatagcgcactaactgccgtctatctgcaggaccctctccattgggttcaccattccagaataaagccatgcccatcagacagccagcttgatctctcctcttcctcctggaagccacaagattaggccgagagccgatcagacaaacaacctacaacccttaagctcctggcagcgcccagccaaggccatgcttccatgcaacactccttccaaatggccatcccagcatgcttccaagcaggcttcatccgttcctctggaccctcatctcttaagacctgccgcctataaaaaggattatatcttgagaccctatcctctaaaattttttccacacccaaaacaaaaaatctctgggtcaaaagtctaaaacgcttaggctggcaaccatcagatccttgcccatggtgtcctcaagcctactctcatgaaatggacaacagtacacgcatatggggccagttccacacatttggcaaccagaccagcatccaggacaacacaaagtatgttgtttgttgttagagggcttgggacatttcactctcttgccagcctctcagcttaatccaggattcagaatgagacggggatactctagaatcaactatcacgaa

SEQ ID NO: 244050 - DNA, 395 bp, Homo Sapiens
  misc_feature (195)..(245): n is a, c, g, or t
  misc_feature (351)..(351): n is a, c, g, or t
atggccgaccaagaaaagatctccccagctgcccttaagaagaccctcttagacagagtgaagctggaatcccccacagtctccacactgaccccctccagcccagggaagctcctcacaagaagcctggccctgggaggcaagaaggactaaggcagcatctgtcccctctgtgattcagagcccttagttgannnnnnnnnnnnnnnnnnnnnnnnnnnnnnnnnnnnnnnnnnnnnnnnnnncctcagctgtgcaaggagaaagcatgcttagggaagttttcaggtccttgttgataaaacctccttaaatctgtttcaggaccaaggaatgggaggtttcctttcntgttcccatgtttgggaagtttgtttttgaagggggttggtaag

SEQ ID NO: 244051 - DNA, 365 bp, Homo Sapiens
tgaggaggagctcagttcctcatctgtaaactgaaagagcccagcacttggcaggtgtcagtacctaatcacgctctgttccttgcttttgccttcaagggaattccgagtgtccagcactgccgtattgccagcacagacggattttctctaatcagtgtccctggggcaggaggatgacccagtcacctttactagtcctttggagacaatttacctgtattaggagcccaggccacgctacactctgcccacactggtgagcaggaggtcttcccacgccctgtcattaggctgcatttactcttgctaaataaaagtgggagtggggcgtgcgcgttatccatgtattgcctttcagcaca

SEQ ID NO: 244052 - DNA, 891 bp, Homo Sapiens
gtgcacacgcggaatccgaaactacagaagcaataaacccattattctcagagctctctgtgactacaaacaagatcagaaaatcgtgcataaggaggatgagtgtatccatgaaggacatcaacgagcgcagcaagtgttacgtgacgagcccgggaggcgttgacatgcttgttccctctgtagggctgatgatgccttctacgaacccactgtccgcggagctatacttgcaagattgatgcagtactacgaagccatcttggctctgtggaaccagctctacatcaacatgaagagcctggtgtcctggcactactgcatgattgacatagagaagatcagggccatgactatcgccaagctgaaaacaatgcggcaggaagattacatgaagacgatagccgaccttgagttacattaccaagagttcatcagaaatagccaaggctcagagatgtttggagatgatgacaagcggaaaatactgtctcagttcaccgatgcccagaagcattaccagaccctggtcattcagctccctggctatccccagcaccagacaggtcggcttgggacatctttctctttgtatcaaccatccataccattttaaaaagaaaggggtttgcataaaactggtttcagaaccatttctctgaatgctatatagccagtgttcttcgtgcactaaattttcagaattgattctgaaattcaaaggaagaaggtatacttttaggtagtatggatgtttttatgaggcctagcaccttgatacctaggtattctctgatgttttgtggccctaacttctttttacagtgaccaccactgcaatcactcactcactggaccggctcagagtgtcccgggatcctctagatcaac

SEQ ID NO: 244053 - DNA, 329 bp, Homo Sapiens
gtagacattgggaggctatagtagttattcaggtgacagatgaaggtggcttataccagggaggtagccgaggagtgttgagaaattgcttttgagtagttgcatttgtgtaaccctagctagcgtacaggagatgttgcctggctgaggctggggaaacctagtgcaggagaataagaaccacaggattaccaaactcgttttggggtggcagttctttcctctccttgacagtagcggactctcaagttcctttaatagaggaggctgggacggtgaagggacaggaggggatgcagcacagggtagttcctctgtattacgacggt

SEQ ID NO: 244054 - DNA, 525 bp, Homo Sapiens
tgaacatttctcatggtttctttgtgtcctaatataacacgagttgtacgtgtacttgggtatataaaaaagtgtgtcctgcttacaagatgcttttgatctaacaatataaattaaatctagattagagctaaattagatttgttatctatttctgcctagtttttgtttcctatcatttttgccttttgagtggtaatgctatgttatctggggcaattcagtattgatattcagtggtttgcactctttattgttaataaagtaaaacacaatggtttgcactctttattgttaatcaaagtaaaacacctgttacgtactccatgaagtctataacctagagtcatttgtatgcttactggtctagaaaccactgatttattcttatgttcttttttctctctctgaagtcgttatctttcattagttacctatttttttggttggtgttttttccagcgctctgttgaattacatattatggtttggtaaaagtgagtttcttatggacagcacaacctg

SEQ ID NO: 244055 - DNA, 419 bp, Homo Sapiens
gtcgccacctccgtggagacatcagccgccagtggcagccccgagggagctggaatgaccacagttcagaccatcacaggcagtgatcccgaggaagccatctttgacaccctttgcaccgatgacagctgtgaagaggcaaagacactcacaatggacatattgacattggctcacacctccacagaagctaagggcctgtcctcagagagcagtgcctcttccgacggcccccatccagtcatcaccccgtcacgggcctcagagagcagcgcctcttccgacggcccccagtccagtcatcaccccgtcacgggcctcagagagcagcgcctcttccgacggtccccatccagtcatcaccccgtcacgggcctcagagagcagcgcctcttccgacggcggtcccgatttgcttt

SEQ ID NO: 244056 - DNA, 379 bp, Homo Sapiens
ctatggtcactgtggagcagggctggggcagctctctaactgctcaacagcaagctcttcctcaccaagttcatccacacgctggagagccagcgcaccttttcagctcgggaccgtgcctacgtggcatctctgctcaccgtggcactgcatgggaagcttgagtatttcactgacatcctccgcactctgctcagtgacctggttgcccagtatgtggccaagaaccccaagctgatgctgcgcaggacagagactgtggtggagaagctgctcaccaactggatgtccatctgtctgtataccttcgtgagggactccgtaggggagcctctgtacatgctctttcgagggattaagcaccaagtggataaggggc

SEQ ID NO: 244057 - DNA, 130 bp, Homo Sapiens
cttcctgctattatacatctttcttccttttttgtgtcactgcttctgccatgagtacaagaagggacacaaaaaaggaagaaagatgtataatagcaggggagggggcaaggatatccatcaggtcttg

SEQ ID NO: 244058 - DNA, 475 bp, Homo Sapiens
gatccccgcgtcctgcttctgctgcttcctgctttctgccgcttcctgcttctgccgttgtgttttctttcagggtcttgtccagttcttttcttcattgattgcttttcctcttcactgcatgcggtcatgattttatgctcagcttcaagttcaaaagacattctccatggagattttgagacacacggatattattgatgaccttgttcaatctgggcatacaatcatgaccgcatgcagtgaagaggaaaagcaatcaatgaagaaaagaactggacaaggtactgaagaactatgataccatctgccagattaattcagaaaggtatctgcagctggaacgggcacagtacctggtcaaccacttctgggaaacatatgaagaacttgggccatggctgacagaaacacattcatcatctctcagcttcccgccccagcccgttgaatatgaactctaagcagcagcagt

SEQ ID NO: 244059 - DNA, 957 bp, Homo Sapiens
  misc_feature (389)..(389): n is a, c, g, or t
  misc_feature (414)..(414): n is a, c, g, or t
  misc_feature (427)..(427): n is a, c, g, or t
  misc_feature (514)..(514): n is a, c, g, or t
  misc_feature (767)..(767): n is a, c, g, or t
ggggtttacctggatcgtgggactgggaatgtctccttctacagcgctgtggacggagtgcacctgcacaccttttcttgttcttctgtctcacgcctccggccatttttttggttgagtccattagcatctttagtcattccaccagtgactgataggaaatgaggcttttcttcccctgaccaaaactccttccctgtagtccagctgagggacacacatccctgggccctcttctgcccttcatgtctctatcctggatggtccatcttctgggtctccctaacggtaccgtttggtatctgccctttgtgtgcttcacaagaggcagtcccatgggaggtgggtctggccaatggagatgggacaggaaattttccagacgcttntgggaaatctttttgtagcttttanagagatgtgcggngaagacatatggatgttagcagccatattggaactgagaacacaggaatggtggaaaggtagaagaaacagagttttttgttgccgnttgtgaatttgttgaaatttccttcatgccaagctttttgttatatgagataattacgccccttattgtataagacaattttagttgtatttggttacttgcagccctgaagtaccgtaactgcactaaagggacgtagtgtgaacatcccgcagtataggcttaagtcgcttttgtgaaaatttgacaaaggcatagaatctttttctatccagtcaggcattgcctattctttccagtaactactgattcnccccacttttctgtcttagaaaattgtgggaatcccccctcactctgcctatgttgcactctctcctcttcctcaccagaccctgcccttgcacaatcttcactcttaggcataggctgtgccatcttagccaactcaaacggtctctaggttttatatcctatctgttttagttactcctacattttta

SEQ ID NO: 244060 - DNA, 633 bp, Homo Sapiens
cgttactactgcaaaaacaccttttgcagtttgctgtgaagtttgcctttattgtgcaggtgagcaaaccccagttcagttcacctgctacatttaaacagtatacagctctatttgcaaaaactatacaggaacatttgacctaacaaaaaccactgggtgacatctaccagaagtatcactgcagaggattactcgacaaaaagtgcaattttctatagaaagccgagtgtttcccttgggaaagtgttaatattttatttttaagtaactggggcaaaagactagattttctataactgcaatagaataggactagaaaggcatccctacaagtccccaaagtatatggatggaatatttttgatggttttataaatgagcaattgtaatttagctctcgtgaagaacatgtgcaatcagatttaatcacacaaagcatttactattttcaatcacttgcccaataacaaaatgtttagtaagaaattattcagaacattaagttgtttatgaaataagtgactaagcaacatcaagaaatgctacaatagggcagcttactgtattctgcagtactctataccactacaaaaacagtcataaagagcttaacatactcagcataacgat

SEQ ID NO: 244061 - DNA, 681 bp, Homo Sapiens
  misc_feature (512)..(627): n is a, c, g, or t
gagattttcatatattgggttatagctatatatcaggacaggtaaatacattataaaattataacctttataataatttttagtataatcacttgtgtgactataataaattggctttagttttctttactcttcacagttttaataggtaactattttacaagaataacattgctaggtagaaaaatttctgttcagttaggagttcttattttgctgctgaaatgagtcatgcacaattttaaatctctgtagtttcttcataagctattttactatcttactattttataagccttgtgttgcagtcaagtttttaccacattctatagaccttgtctgtacaccatttatgaaatggaaatttgaatatgacatcttttatgccctctacttacttttaaagcaaaaatattgttgaataggaacacatagcttttatttaaacaatgttaattccccttaaatttcttgtatgaatactcaccttatgcttaaaagtgcttgagaannnnnnnnnnnnnnnnnnnnnnnnnnnnnnnnnnnnnnnnnnnnnnnnnnnnnnnnnnnnnnnnnnnnnnnnnnnnnnnnnnnnnnnnnnnnnnnnnnnnnnnnnnnnnnnnnnnnacgctaaacataccttctaggacagggctgctgtcctacaaggtacaggacagc

SEQ ID NO: 244062 - DNA, 991 bp, Homo Sapiens
  misc_feature (207)..(221): n is a, c, g, or t
  misc_feature (299)..(309): n is a, c, g, or t
  misc_feature (396)..(396): n is a, c, g, or t
aggagccccattacataagctacgggtgaggttggaacagctatgtttcataatttcaagagtgtgaccaccctgctctagtcatcatcattggatgaatccagttgactctttggcaaaagggtgatacttttcactaaaaatgcctactcttcctgttgatgttccttttctgtttttaccttgtccaatttccacactagtcannnnnnnnnnnnnnnagaggatcagattttagcgctggaaaatgagttcaaaaatttcagtgtaatgtcataaggatgttgggatacagagannnnnnnnnnnccttggaaacaaatggactgggaagaaacacagcatggctttgctctgagtttcaatctgatgattatgaccatggaaggatagtcnttatgtaaaaggttaaatggttgtttacaagtgggtagataaggccggagatgggtgagaagccgggttttctctatgctaaatgtgtctactaagagcagcacttcctactagctaagcacaatcatagccccaccgtgatgagctgcaagtctgaataacattccctgacttagggaaaggcacacaaaaacatataaagaatatgtctattttcatatgtgtgatactgacagagccatggtattcctaaaatataggtttctcttttttcttgtattcttagcaaattgcatttattcactacattacaaaccatcactgatgtatccaaaatagcacacatagttcagtatgaaaataagagaataaaatctgttataagcaagtgatttaggtattttcttttgtgtttatgcattatctgactatattaaaacctgtttttctatttaccttctatcagttttctctaccaattatgttttttcaatgctctataagaatgaatatggaaattatatttcttttttctgtaaaagagttgcaactactttattatatttagaaatccaataaacttcttattacattt

SEQ ID NO: 244063 - DNA, 433 bp, Homo Sapiens
  misc_feature (57)..(67): n is a, c, g, or t
tttcattttttaacatttctttgaaacacttactacattcaatgttacagtatttcnnnnnnnnnnnaaactcctatttacttagaaattattctgaggctaaaagaaatcaagtgcgatttcttttaagggataatttattaataattggttatcccactagttttaaaggtcttcacatggctgtcttcaggaaagaggcagggcagtagaagtagaggtgcaggtactaaatttgtgaaggcatgtgaaggcaaattgttatttagcatagtggtattcattatccatggtcaaggtgtctgaaattgctcattaatcaatcattaacaaccacagaaaataggggaatttcatggaagcgtaaaggttcactggcagagaaatttctttatgacttgccaagtaaaaggaatgtgaagaataaggccaa

SEQ ID NO: 244064 - DNA, 718 bp, Homo Sapiens
  misc_feature (54)..(54): n is a, c, g, or t
taaattgaaaagggaaaataatgaaccttttgttacaatttaagctcaagggtntcacagaacaatgtactaagtgctttgaatacttgctaaataatttagccttactgtttcagttatttttatttcttctcttctgccaaattattccaagtagctaatgtcaagactttaattatcagaagtaatgttttaaaaaaatttttatttcctatattacaagacactttcccccctccacacggctatgtaagctgcttcctgtttataaagcttactgttctacagcattttagtctaatattaggagcaaagatttatcttctgatgcctgacacttcttttctgccacagatacttggggaaaacacttcccactatggctagatttgacactaggcttccataccctcaggcaacaatgtctaaaggaacttaaagcaacaattctataaaaacagtattttcccaaataatatgttaaacacacaagtggattattttaatttaataaagtccttttgtattctcattaaaataacctaccaattgaacttctccaaatgcacctctaccaatcaccttcactacttcataatcttcagctttcattcgtaaatctctgattttatttattgtgtctttatctgtatgaaaagaaaagtttatcattttaaatcattaaagcattacaactagcacctcaaaatagtacggg

SEQ ID NO: 244065 - DNA, 405 bp, Homo Sapiens
tgttaatcctatgtacattttgctaattatgctcaggactattaagtgaagtctcttggcactttagaacatgtctgttatttatcatttgcccaaatgcctaaccccaaaacatgaattacttgaatgttttacacttagcaactaacctcagttaaacttggatatctaaattatactaaaaagctgatgttcaagatagcacacagcgccttcaaataaaataatattttaaatgcttagtatgattagaaacaagtttaaattctgactgcaaacacttcctaacaactgctgtcttattaagtataatatataggcagtatatttagctctcaaagagcctcagcaaccaaatgccaagattttttattaattattgttaacttgcatgtcacctccata

SEQ ID NO: 244066 - DNA, 652 bp, Homo Sapiens
tccccggtgcatatatgcacctaatactggagtttccaaatttatgaaacaattactaatagacctaagaatgagatagacagcaacacagtaatagtggggggcttcagtattccactgatagcactagacaagtcatcaagacagaaagtcaacaaagaaagaatggatttaagctataccttggaacaaatgaacttaacagatatttacagaacatttcatctggcaaccgcagaatacacattttattcaacatcgcatgggattttctccaagacagatcatatgataggccacaaaacaagcctaaataaatttaagaaaattgaaactatatcaagcactctctcagaccacagtggaataaaactagaaatcaactccaaaaggaaccttcaaaaccatgcaaatacatggaaattaaataacctgctcctgaatgagcattgggtcaaaaacgaaatcaagatggaaatttaaaaattcttcaaactgaatgacaataatgacacaacctatcgaaacctctgtgatacagcaaaggcggtgctaagaggaaagttcatagccctaagtgccacatcaaaaagattgaaagagtacaaactgacatgctaacgtcacacctccttatgattacgggtaccgg

SEQ ID NO: 244067 - DNA, 601 bp, Homo Sapiens
  misc_feature (369)..(369): n is a, c, g, or t
cttagaggacccggctcatttcagtcctggtctgatctttgttatttcctttcttctgctgggtttgggtttggtttgttcttgcttctctagttccttgaggtgtgaccttagagtgtcagtttgtgctctttcagtctttttgatgtaggctatgaactttcctcttagcactgcctttgctgtatcccagaggttttgataggttgtgtcattatggtcattcagttcaaagaattttaaaatttccatcttgatttcatttttgacccaatgctcattcaggagcaggttattcaaattttcttgtatttgcatggttttgaaggtcccttttggagttgatttccagttttattccattgtggnccagagagagtgcttgatataatttcaattttcttaaatttattgaggctcgctttatggcctatcatatggtctatcttggagaaaattccatgagctgtgaatagaatgtgtcttctgcagttattggatgaaatgttcgcatacatctgttaagtccattgttccagtatagttaagtcctgctttttctgagcatcgttccttattacttatgagccgggatcctcta

SEQ ID NO: 244068 - DNA, 600 bp, Homo Sapiens
agatccaggttcgaactctggccagtgcaggaggaccagacaacttagtcctgctgaatcctgagaagtacaaagccaagtcccgttccccagggtctccggtaggggaaggcactggatcgcctcccaagtggcagattggtgagcaggaatttgaagccctcatgcggatgctcgataatctgggctacagaactggctacccttatcgataccctgctctgagagagaagtctaaaaaatacagcgatgtggaggttcctgctagtgtcacaggttactcctttgctagtgacggtgattcgggcacttgttccccactcagacacagttttcagaagcagcagcgggagaagacaagatggctgaactctggccggggcgacgaagcttccgaggaagggcagaatggaagcagtcccaagtcgaagactaagtggactaaagaggatggacatagaacttccacctctgctgtccctaacctgtttgttccattgaacactaacccaaaagaggtccaggagatgaggaacaagatccgagagcagaatttacaggacattaagacggctggccctcagtcccaggttttgtgtg

SEQ ID NO: 244069 - DNA, 553 bp, Homo Sapiens
tgcaggactggacgatttcttacacgtagtgaagggtctcatttctcggtatttaaggatgtgatcacaagattgttccctatcagggacccttctcttgaggttttgtcgctgcgtgttaaaaatcccttagggacaaacgtgaaacagaatgtggtgatttagtacatatgacctcttggaacacgttcaagagtttgacactagcttcacctgctccgtcgttccctcactcctacattcagggtcattagaaggtaaccttagtaaccagttctagggtcctgccccactccacccctaggcaaagcttaacacacacgaaggtgacgataatagctaatgattatggactgtcacgctctaggcagcatgctgcctgctttgtcagtcattatcacatataaattctcatagtagctggttgaagccagtaccgttaccccactttacagataagcaaacagactctgaggatccgtgtgtccaccagctgagagaaggtgagcccaggcagtctgactccagagcctcttaacttctcgcgagcaca

SEQ ID NO: 244070 - DNA, 546 bp, Homo Sapiens
tgcagcggactcggcactgagagcacgagcatgggcacccagccaggcctcccaggctgctctccacgtcccttatgccactatcaacaccagctgctgcccagctactttggacacagctcacccccgccagggggccgtcctgtcgtttcctgctgtgactaagtcagcaacacagttcctctgacatgggccttggctgtgcttctttgggggtgaagagattggggagggagtctccacccctgggaggcagaagccaggcatagcgcgctggctaggactccagtaccgtgaagggaggcagtgagagcagacatctgtgcctcattcctgatctcaaggggaaagcaagaacaagggaggcttcctcaggatctcgaacctgcggaaggaggaccagtctgtgtacttctgccaagtccagctggacatacagatcagggaggctgtcgtggcagtccatcacggggacccacctcaccatcacccaggccctcccctcctctgtgctgacagcacagaggaggcagaggagggaggagg

SEQ ID NO: 244071 - DNA, 472 bp, Homo Sapiens
ccatcctgttcttcagcatgctaggtaggggctcgggaactggccatccatctgattcttgccgtctgtgcccagggctcgtctgtcccgccgacgtcctgcccccatttctgcgggcagacctggccgggatcttgggggtctcaggagtccttctctttgactgtggctacctccttcatctgctgtgccgacagaagcaccgccctgcccctaggctcacagccatcccacagcagctcctaggcgctgagagcacgagcatgggctcccaggcaggcctcccaggctgctctccacgtcccttatgccactatcaacaccagctgctgcccagctactttgacacagctcaccccgtacagggccagtcctggtgggcatcactccccacccacaccgcacactgcaccagggcctgctgcctggcctcacatcatcctgaagacagattggggatcctataggtagc

SEQ ID NO: 244072 - DNA, 199 bp, Homo Sapiens
gaagcagcttcgagaaacaaatgtcaggaaactgctggcagctgatcacaggcctagccgaagccaaacgcctccttcccactctatcgcagtgtagtcctcgacgaggccaggggcagaggagctggtacactaacagcctgtcatggtggctcctggactaagaatgccttcctgccctttcatcagactgcatctg

SEQ ID NO: 244073 - DNA, 837 bp, Homo Sapiens
gagctcggtaccccggcaacgaggctaaagatgacgctggaccggagcgagtacaccagcctcatccccaacctgaggaactttggtcgctctggacccgggaggtggccagcaatagaatctactggtctgacctgtcccagagaatgatctgcagcacccagctttgacagagcccacggcgtctcttcctatgacaccgtcttcagcagggacatccaggcccccgacgggctggctgtggactggatccacagcaacatctactggaccgactctgtcctgggcactgtctctgttgcggataccaagggcgtgaagaggaaaacgttattcagggagaacggctccaagccaagggccatcgtggtggatcctgttcatggcttcatgtactggactgactggggaactcccgccaagatcaagaaagggggcctgaatggtgtggacatctactcgctggtgactgaaaacagttcatgtggcaccaatggcatcaccctagatctcctctgtgctgtccctcctctgtgctgtccgacagcacagaggaggcccagactcacctgtcctgatgcccgcgcccaagcacactgctcacatgcccatgcacactgccagcctattcaccctgggtactgccacctacatttgtcaacccttccagggtctgggccagaggaagaattgattccagcaccttctcacccctgactaaggcttagagctcaggccctgcacttatcccacaccccaagaaggaatgtcctgggcgggacccccacctcagagcctgcaggccggctcccactcctgcagccctcagctgcttcc

SEQ ID NO: 244074 - DNA, 961 bp, Homo Sapiens
gtcgacgcagagatgaacattctagaaatcaatgagaaattgcgcccccagctggcagagaagaaacagcagttcagaagcctcaaagagaaatgttttgtaactcaactggccggcttcctggcctagcggcagaagaaatacaagtatgaagagtgtaaagacctcataaaatttatgctgaggaatgagcgacagttcaaggaggagaagcttgcagagcagctgaagcaagctgaggagctcaggcaatataaagtcctggttcactctcaggaacgagagctgacccagttaagggagaagttacgggaagggagagatgcctcccgctcattgaatgagcatctccaggccctcctcactctggatgagccggacaagtcccaggggcaggacctccaagaacagctggctgaggggtgtagactggcacagcaccttgtccaaaagctcagcccagggaggtgcagaaggctgaagagagcaaagtccctgaggactcactggaggaatgtgccatcacttgttcaaatagccacggcccttgtgactccaaccagcctcacaagaacatcaaaatcacatttgaggaagacgaagtcaactcaactctggttgtagacagagaatcctctcatgatgaatgtcaggatgctctaaacattctctcagtccccggccccacctcttctgccacaaacgtcagcatggtggtatcagccggccctttgtccagcgagaaggcagagacgaacattctagaaatcaatgagaaattgcgcccccagctggcagagaagaaccagcagttcagaaccctcaaagagaaatgttttgtaactcaactggccggcttcctggccaaccgacagaagaaatacagtaagatctataggctcaccatcatgaaagtgatgaatgatgtcctgtcttctctatgagacactaaatgctctct

SEQ ID NO: 244075 - DNA, 1001 bp, Homo Sapiens
gggcccggcgcaccgacgcgcctctccggttactaagcggccttggatacctggccgcgggatgctgggcggcgtcaggtaaccatggagaaagagctgcggagcaccattcttttcaatgcctacaaaaaggagatatttaccaccaacaatggctacaaatccatgcagaaaaaacttcggagtaattggaagattcagagcttaaaagatgaaatcacatctgagaagttaaatggagtaaaactgtggattacagctgggccaagggaaaaatttactgcagctgagtttgaaatcctgaagaaatatcttgacactggtggagatgtctttgtgatgctaggagaaggtggagaatccagatttgacaccaatattaactttttactagaagaatatggaatcatggttaataatgatgctgtggttagaaatgtatatcacaaatatttccatcctaaagaagctctagtttccagtggagtcttgaacagggaaattagccgagctgcaggaaaggctgtgcctgggatcattgatgaggaaagcagtggaaacaatgcccaggctctcacctttgtgtatccttttggtgccacattgagtgtcatgaaaccagcagtggcggttctgtctacaggttctgtctgcttcccacttaacagacccattttggctttctatcactcaaagaaccaaggtgggaagctggcagtgcttggttcatgtcacatgttcagtgatcaatatttggacaaagaagaaaacagcaaaatcatggatgttgttttccagtggctcacgacaggagacatccacctaaaccagattgatgctgaggacccagagatttctgactacatgatgctgccctacacagccaccctatcaaagcggaatcgagagtgtctccaggagagtgatgagatcccaagggactttaccaccctcttcgacctgtccttttccagctgataccacctcttcaccgcgcctgt

SEQ ID NO: 244076 - DNA, 502 bp, Homo Sapiens
  misc_feature (157)..(157): n is a, c, g, or t
  misc_feature (162)..(163): n is a, c, g, or t
  misc_feature (407)..(407): n is a, c, g, or t
  misc_feature (411)..(413): n is a, c, g, or t
  misc_feature (428)..(428): n is a, c, g, or t
ggggaacatattctgtctgggtttttaatgtctgtggaaaaaaactaaacaagtctctgtctcagttaagagaaatctattggtctgaaggtttctgaacctctttctggttctcagcagaagtaactgaagtagatcaggaaggggctgcctcagngaaannattcctagatcctaggattcagtgagacctgggaggaccagcatgctaatcagtgtcagtgaatccacagtctttacttcctgcctcataaaggggcagggtctccccagtaccaagtccctttcctccatggaaatttggggggtgccccccaagggtggttttaagggaccactgcccgggctgggccaaaaaaaccctggcccccctttattttaaacccccggggggaatcccccggggntttnnnggttttatgggtggnccccacaacaagggcccccacaaggcccttaaggggtttcccattaaaagggcgccctcgcccccaccccaaaa

SEQ ID NO: 244077 - DNA, 206 bp, Homo Sapiens
aagctccctacaagagacccctggagatgggaagcctccagctttacacccaaacagtcaaagaaaaacagttggaaccaaatacattattcacattcgcaacaagatctagaaagtcatattaatgaaacatttgatattccatcttctcctgaaaaacccactcctaatggtggtattccacatgataatcttgttgggagctt

SEQ ID NO: 244078 - DNA, 651 bp, Homo Sapiens
tctggccagtatgtggctcagactccagaggcacatttaccatggtcggaattttggattatccttttgggaatgtcttacgcaagctgacagtggatgtgcaattcttaaagaatgggcagattgcattcacaggaactacttttattggctatgtaggattatggactggccagagcccacacaagtttacagtttctggtgatgaacgagataaaggctgttggtgggagaatgctatcgctgccctgtttcggagacacattcccgtcagctggctgatccgcgctaccctgagtgagtcggaaaacttcgaagcagctgttggcaagttggccaagactccccttattgctgatgtttattacattgttggtggcacgtccccccgggagggggtggtcatcacgaggaacagagatggcccagcagacatttggcctctagatcctttgaatggagcgtggttccgagttgagacaaattacgaccactggaagccagcacccaaggaagatgaccggagaacatctgccatcaaggcccttaatgctacaggacaagcaaacctcagcctggaggcacttttccagattttgtcggtggttccagtttataacaacctcacaatttatactacggtaatgagcg

SEQ ID NO: 244079 - DNA, 247 bp, Homo Sapiens
gccagtgagactgaggacaatgataacagtttgggggacatcctgcaagccagtgacaacctctcccgggtcatcaactcttacaaaacaattattgaagggcaggtcatcaatggcgaggtggctaccttaaccctgcctgactcggaaggaaacagtcagtgcagtaaccaggcacgctcatcgaccttgcggagctgacacgaccacagttgtcctccgtgttgccccagcaccttctccacat

SEQ ID NO: 244080 - DNA, 264 bp, Homo Sapiens
cctgtatcccggggaggaaggagggtcggagatatgatggcaatggcgagctactaaggaaaagagatgtggagaactttctactctggaagtccatctcctaatgcaggagtcacagatcagtattggccttcagctattttcttgggttcctatttactagggatgttctttatgcatcatctggtggaagactccagagagtctggaaagattcttatatttctaaatagatattccatattctccatatctcctcggacc

SEQ ID NO: 244081 - DNA, 623 bp, Homo Sapiens
tatatatgactgaggaagtattaataaaaatgatgtagttggaacagatatatacactctctaaaattgctgcctctggtggggaagtggaagatttctcatcttcgggaactggggctgcatcatatacagtaaacacaggagaaacagaggtaggctttgttccaacgtattggaccttgttaccctgaatctttattggacgccccatgagagtacacgggattcccatgaccccttatgatgagctgaatactggcaagggggaaggagttgcctacagaggcaggatcttggttgaattagccaccttttcttgagaagacaccaaccagataaaaagcttgagcccatttcaaaatgatgacctgctggttgttgagaaataccagcgaaggcggaagtacagcctgttctgccgtgtttcattcagccacccatgttgcaagatgttggtgaggccattcagtttgaagtcagcattgggaactatggcaacaatgtttgaccccacctgtaagcctttggcatcaacaactcagtacagccgtgctgtatttgatggcaactactattattacttgccttgggcccacaccaagccagttgttactctgtatggg

SEQ ID NO: 244082 - DNA, 469 bp, Homo Sapiens
ctcatttagcaaagtttttattcaaaagcttctcagcaccatctagttatcagaaagaatggatatcaccttttcctgcccacccaatccccagttccacaggcagaagttaaaccatttggctagagttttccctaatgattatgactgagaccatgataagattttggttgttctcacccaactgtctctaagcctctactcaaacctgactcaagcagagatgtgcacaccccacagttcagaacaggaaggaatcatgtcagatctgatcaacctcccattcttgggctattagaggcacaagaaattaccttgaaaaaatggaattcagtgactgccatctaggaaagacagtgatacctgtccagcagcatgcagttccgagagctcaactcttaagccaccctccctccactctacatctaggggggtctcgtactctgtatggggatcacgggatccttag

SEQ ID NO: 244083 - DNA, 171 bp, Homo Sapiens
cgagctcggtaccggtccgctcggaccactaagctggggacaggaaccaagtcctttgcgtgtggcccaacaaccatctacagaacagctgctggtgcttcaggggaggcgccgtgccctccgctttcttttatagctgcttcagtgagaattccctcgtccgagcgaccc

SEQ ID NO: 244084 - DNA, 423 bp, Homo Sapiens
acgtccatctagctgtggaataatggcaacagaagagactggctacatacaccggaggcatctatgccgaataccaggacaccacatatataaaccatgtcgtatccgtggctgggtggggcatcactgatgggagcaagacagtcttcgtcccatcaggagagccaccggctgcccgtggaggtggcttacaagcgcggcctcttcgatgaggagatgaacgagatcctgaccgacccctcggacgacaccaagggcttctttgaccctaacacggaggagaacctcacctacctgcagctgatggagcgttgtatcactgacccccagacgggcctgtgtctcttgccgctgaaggagaagaagcgggagcggaaacgtcctccaagtcctccgtgccgcaagcgccgtggtccgagcaga

SEQ ID NO: 244085 - DNA, 539 bp, Homo Sapiens
acacaagttaccagattgttccctaagataatatgggtcatcctgtagcagattgggtttcaagaattcggatgtaaacattgacatccagtttccagccattaaaacaagaaagcagaggtccagaccctaggaagccacggaagactagaaatgaggaaaatgagcaggatggagacttggaaggccctgtgatcgatgagtctgtactttcaacgaaggagctgctaggcttacagcaggctgaggagagactggagagtgactgcattgacgggctcgataggcgaccacgaaactaccctacagcaaagtacacctgcagactctgtgatgttttaattgaatccattgcatttgcccataagcatatcaaggaaaagaggcacaagaaaaaccttaaggagaagcaagaggaagagttgctcactacgttacccccacctacaccctcccagataaatgcagttggcattgccattgacaaagtgtacagaatttggcttacgcatgagagatttgaatccttgagagtcgcc

SEQ ID NO: 244086 - DNA, 167 bp, Homo Sapiens
gaggatccaaactttcatgcgcaaacaggattagataccctggtagtccacgccctaaacgatgtcaactagttgttggggattcatttccttagtaacgtagctaacgcgtgaagttgaccgcctgggagtacgtcgcaatgagagatttggaatcctctagagca

SEQ ID NO: 244087 - DNA, 504 bp, Homo Sapiens
aagggatgcagatgatgctgtgtatgagcttgatggaaaagaactctgtagtgaaagggttactattgaacatgctagggctcggtcacgaggtggaagaggtagaggacgatactctgaccgttttagtagtcgcagacctcgaaatgatagacggtatgtgaagggtggatggctgcattgaacaattattgtaggggtagcatttaagattcaggagtcattagcagtgatgattttgggtcctgccgtataatctgttcttctattcccacgttagccagttgttcttgatgaatctatatgagtcatagaacacaaatctattgacggaagtcattagaatggcttgtgatatctgatggcttgaacttgcccacagttgaacacaagtgctgtcattgcatttcttccattgtgaatacgaattttcttcctcagaaatgctccacctgtaagaacagaaaatcgtcttatagttgagaattgatcctctagagtcga

SEQ ID NO: 244088 - DNA, 390 bp, Homo Sapiens
cagatgatggattctattttagcagatgaagcatttttctctgtgaattcctccagtgaaagtctgaatcatttactttatgatgaatttgtaaaatccgttttgaagatcgttgagaaattggatcttacacttgaaatacagactgttggggaacaagagaatggagatgaggcgcctggtgtttggatgatcccaacttcagatccagcggctaacttgcatccagctaaacctaaagatttttcggctttcattaacctggtggaattttgcagagagattctccctgagaaacaagcagaattttttgaaccatgggtgtactcattttcatatgaattaattttgcattctacaggtgcccctcatcaggtttcgatgacggga

SEQ ID NO: 244089 - DNA, 668 bp, Homo Sapiens
  misc_feature (441)..(449): n is a, c, g, or t
ctgttctagaggatccctggcttcctacaagagggtatctcattaggtaattcagaggcagacagacaattgctggaagctgcaaaggctggagatgtcgaaactgtaaaaaaactgtgtactgttcagagtgtcaactgcagagacattgaagggcgtcagtctacaccccttcattttgcagctgggtataacagagtgtccgtggtggaatatctgctacagcatggagctgatgtgcatgctaaagataaaggaggccttgtacctttgcacaatgcatgttcttatggacattatgaagttgcagaacttcttgttaaacatggagcagtagttaatgtagctgatttatggaaatttacacctttacatgaagcagcagccaaaggaaaatatgaaatttgcaaacttctgctccagcatggtgcagaccctacnnnnnnnnncagggatggaaatactcctttggatcttgttaaagatggagatacagatattcaagatctgcttagtggagatgcagctttgctagatgctgccaagaagggtttcgatgaccgtcatcaaacccttgggcttattggtaaacttcctgggtttagggtttcgatgacggtcatcaaaccctctatcaagttgcgatgctagtcgccgtgccatacatg

SEQ ID NO: 244090 - DNA, 175 bp, Homo Sapiens
tcatcaaacccttattggaagctcattcctcctcccccatcataaccatattcagcaggcatttttaaatctacttttcttccttatttgtgctacagaggttgatggcgtaaatatacctacttggaagaaattactttatcagttaatttcagggtttcggtgtcggggatcc

SEQ ID NO: 244091 - DNA, 1239 bp, Homo Sapiens
  misc_feature (1060)..(1071): n is a, c, g, or t
  misc_feature (1098)..(1098): n is a, c, g, or t
tcataggggcaggatgacttctggagataagagtcatgtcttcttctccttaattaactgggatgatctcattaataagaagattactcccccttttaacccaaatgtgagtgggcccaacgacctacggcactttgaccccgagtttaccgaagagcctgtccccaactccattggcaagtcccctgacagcgtcctcgtcacagccagcgtcaaggaagctgccgaggctttcctaggcttttcctatgcgcctcccacggactctttcctctgaaccctgttagggcttggttttaaaggattttatgtgtgtttccgaatgttttagttagccttttggtggagccgccagctgacaggacatcttacaagagaatttgcacatctctggaagcttagcaatcttattgcacactgttcgctggaagctttttgaagagcacattctcctcagtgagctcatgaggttttcatttttattcttccttccaacgtggtgctatctctgaaacgagcgttagagtgccgccttagacggaggcaggagtttcgttagaaagcggacgctgttctaaaaaaggtctcctgcagatctgtctgggctgtgatgacgaatattatgaaatgtgccttttctgaagagattgtgttagctccaaagcttttcctatcgcagtgtttcagttctttattttcccttgtggatatgctgtgtgaaccgtcgtgtgagtgtggtatgcctgatcacagatggattttgttataagcatcaatgtgacacttgcaggacactacaacgtgggacattgtttgtttcttccatatttggaagataaatttatgtgtagacttttttgtaagatacggttaataactaaaatttattgaaatggtcttgcaatgactcgtattcagatgcttacagacagcattgctgctacaaatatttctatttttagaaagggtttttatggaccaatgccccagttgtcagtcagagccgttggtgtttttcattgtttaaaatgtcacctggtaaatgggcattatttatggnnnnnnnnnnnngcattcctgataattggatgtattggnataaagaacggtctgtacaattgggttaataacactagttatatttaaaacttaccagggcttattttggtaatgttaaaaccaaccattttttaatggtacctggtaaattaacattggggttaataattacgttaccca

SEQ ID NO: 244092 - DNA, 258 bp, Homo Sapiens
tttttgattctgtagttaccgcagacagatgtgtgcacaaacggcatatgactattattttgttgtctgaaattttgcaggaagatgagcgcaacatgtgataccttctatgtgtatttttcattccactttaaacacatcagtacacgcacatggagttcatctggatggctgtatagtactgtgttgtatgaataacccactctgcagctgttcccctcttggggatgatttgtttctgcttcctctctgcgtttg

SEQ ID NO: 244093 - DNA, 311 bp, Homo Sapiens
atccccaaacgcagagaggacattgtgctggggtgtcatgagtgtttaccccattcgcagccttggcaggcggccttgttccagggccagcaactactctgtggcggtgtccttgtaggtggcaactgggtccttacagctgcccactgtaaaaaaccgaaatacacagtacgcctgggagaccacagcctacagaataaagatggcccagagcaagaaatacctgtggttcagtccatcccacacccctgctacaacagcagcgatgtggaggaccacaaccatgatctgatgcttcctctctgcgtttg

SEQ ID NO: 244094 - DNA, 463 bp, Homo Sapiens
  misc_feature (443)..(443): n is a, c, g, or t
aatgcaggacggcaggcaggcagatgtaaacggtaacaacactatcatcaataataatcctaaaacacaatgtaaaattgtttcacaattctttttcttagtgagatatctacgtactgtatcatttgaaatccttcctctctgtgagtatgccactaatttgagacttaggttcattcatgtcatttcgctttcaaatttcagagattgctttgtttcatgattattttttatagtcgtgttaaacatttatatgcttttgaattcaaaacaaaaacaaaatagattcagacatatctagctgtgaatcctgtcccccaccacctggtttccaccctcctccataaataatcgtttcctgcacttgcttttagcataagcaaatttgtattcagattcctagttaaatagtagcatggtggacacattttttttcaccatgnacttttcttacttagcagta

SEQ ID NO: 244095 - DNA, 277 bp, Homo Sapiens
tgagagtatgtttttggtgttggaacttcgggatgtgatccagctaggtggtgcttagttatactggttagttggtaggctcttgctttggtcatgtggctcccctatattttctgacatgttgcagtcatgctccctctcaatgttctgacagtgtgggcttctctcccacttgaatgctggctataaattgtggcttggcactcttgggctgcccaccacagctcttttgcactctcagggcttatgttcctctctgcgtcaggggtaccgagct

SEQ ID NO: 244096 - DNA, 420 bp, Homo Sapiens
tcctggtggtgctgctatccggaggaggagtaacatccgccttggttctacagatgaggttatttgcctgagtttcaactgctgatctcttttttaacaggtccaggtaagcaggggtagggtttttattcactttatcagcactgtcatcagctgcatttttatggaaatcctgagtatctttgtgtgctggtgagaggacagcgctgcccagaacattctgaaaaacagaaggcatctccttaagctgctttgcaggtggactgcctgtaacatctttggcaccatcaaaaaatcttttcaaatttttggtttgcgcactgtcagcggttaatagtgcatcttcagtgtcctgatttttaccatcgttcttgacttcagcagcaacatcggttttacttcctgggatcctctcgcgtt

SEQ ID NO: 244097 - DNA, 276 bp, Homo Sapiens
gttctgacaagatacagtatcttcaatgatcataaggagtcagataccctttgaagtctcacagtagccacaggcaggatactatccaccacctccaacggtaccagctggtgtggctccctgtgttcctcgctgttgtgaggtccaataacgttccagagtcctccctcccacctgcttccatgccatatgccgatcattacagaacattttcccctcgagatcgaatgaattcttaacacttccagcatcctcctctctgcgtttgggggatcc

SEQ ID NO: 244098 - DNA, 168 bp, Homo Sapiens
agggtcacagggtgaggatcaaagacacaaatgtctgagatacacaattgcaggagattttattggccccatgacatccagtgacagtgtgggagcaggctactctccagggacatgtttttggaggcatatggagaagggggcccaggcgaggtggctcacacctgt

SEQ ID NO: 244099 - DNA, 1187 bp, Homo Sapiens
  misc_feature (530)..(739): n is a, c, g, or t
  misc_feature (852)..(852): n is a, c, g, or t
ggtctcaacttttaaacttggtttaagcatttgatttgtaaaacagtaaataattgtatctttccatagcttttcaaatgtgaaatcatttttggaagcttggatctcattaaacttcatgtctctattccatttgtgccacacacttaaaagttagtgtactgaatggaaagatgagcattcctagttctacacttcttttttccccctcatgtgtaaaatgaaaagaaaactaaatttgccctaataccaaggcgctacgtttattgcctcgtcttattcactgacctttgtaatgatacacagtgaattctttttgacaaagagaaatgcagtgtagtatgcagagctgctgttttaatgcctatgcatttactctttcctgatttaggcagaggtggcattttctttattgcatttctctatttttttaatgtaccctaccttcagtattctctttgtaagttggtgacttgcatctgtggccttgaatattttattttcacatttggcataacagtatccacacnnnnnnnnnnnnnnnnnnnnnnnnnnnnnnnnnnnnnnnnnnnnnnnnnnnnnnnnnnnnnnnnnnnnnnnnnnnnnnnnnnnnnnnnnnnnnnnnnnnnnnnnnnnnnnnnnnnnnnnnnnnnnnnnnnnnnnnnnnnnnnnnnnnnnnnnnnnnnnnnnnnnnnnnnnnnnnnnnnnnnnnnnnnnnnnnnnnnnnnnnnnnnnnnnngtgtgggagccaccatgcctgacccacacactttttacttgtatagatgatttttggcttggacataaaagccaagccacccatttgcttttaatccaaagaacatgtatagntttttgtacccagagactatgatttatattgattgcacttgcctgccatgatttagataagatttttttgcatggtttttattctttcctaatggatcctgttttataatacttccaagcctgtccatggatatatcaaatgtcttcacttgtatattttcatggctaggtatttctaatgtttattcttccctgtgtacttctacacatagctatgcactatgaaaattaaatggaatgaatgatatgtatattactcaaaataaagtttctttcactttaattttcatagtcatagctatgtgtagaaattgacgggatcctctagaccgcct

SEQ ID NO: 244100 - DNA, 229 bp, Homo Sapiens
ttcaatttctacacacacatctaccatcactgggttgttttaactgtttcccaaaagtaaaacttaaaaacaaattctaacatatatacgccaaactacgcaaaacaattgctacatcacccacccccacccccgaagttcaaaaagcaacaattatagttcactgggcccagacgacctacttgaacacatgcccatttcacattcctatttgatgtgtagaaattga

SEQ ID NO: 244101 - DNA, 216 bp, Homo Sapiens
ttcattttctacactttctggagggcacaaattagaacgggtcagggggaagtgcagtgaggaaggagaaaaacacaaccatccaatatgattttctcagcaaaagagacaatatttccaatgtctagatgcctatttaattattccacttaagttcattcttagaggggtcttgtcaataaagtcaacccaggctcttggtgtgtagaaattgaa

SEQ ID NO: 244102 - DNA, 315 bp, Homo Sapiens
gtcaatttctacacaacaatgttcttgtctcacgtccaagaatgcctcctacacctcctataatactggctttctggtgagtaaagatgccattctcatgtgtaatcaggtggcaaatggagatatgaccaaagtaaccatctgcctacactcataaccctgtacacactcttcctgtgtcgattcaattcaagtaccccttttgatcacttagcaaatctgacctttaaaagggttagggtttttatatccatgtaagtttctgtattgctttggaagtctctggttaaattaatactcttgtgtagaaagtga

SEQ ID NO: 244103 - DNA, 1601 bp, Homo Sapiens
  misc_feature (152)..(163): n is a, c, g, or t
  misc_feature (930)..(930): n is a, c, g, or t
  misc_feature (1067)..(1168): n is a, c, g, or t
  misc_feature (1188)..(1197): n is a, c, g, or t
  misc_feature (1515)..(1525): n is a, c, g, or t
ccagctgatttttaaattttttgtgttggggataacatgtatgttatccccaacaccatttcgaattggaatcaaagaatcactttggcctttcctcattgacaagagatggagacaaacggtctttcattagtttatttgtgttgggttcnnnnnnnnnnnnaaatgaaaagtatagtatgtggcactttttaaagaacaaaggaaatagttttgtatgagtactttaattgtgactcttaggatctttcaggtaaatgatgctcttgcactagtgaaattgtctaaagaaactaaagggcagtcatgccctgtttgcagtaatttttctttttatcattttgtttgtcctggctaaacttggagtttgagtatagtaaattatgatccttaaatatttgagagtcaggatgaagcagatctgctgtagacttttcagatgaaattgttcattctcgtaacctccatattttcaggatttttgaagctgttgaccttttcatgttgattattttaaattgtgtgaaatagtataaaaatcattggtgttcattatttgctttgcctgagctcagatcaaaatgtttgaagaaaggaactttatttttgcaagttacgtacagtttttatgcttgagatatttcaacatgttatgtatatgtggaacttctacagcttgatgcctccgtgcttttatagcagtttatggggagcacttgaaagagcgtgtgtacatgtattttttttctaggcaaacattgaatgcaaacgtgtatttttttaatataaatatataactgtccttttcatcccatgttgccgctaagtgatatttcatatgtgtggttatactcataataatgggccttgtaagtcttttcaccattcatgaataataataaatatgtactgctggcatgtaaaaccacncccacacccccccgaccgccccccgaacactgccccgcctccgcgcggcccatcccggacgttacgcccccacctaccctaatcccccttcgtccccgttaaccgctttcgcccccgtcgcgcggcaatagcgtcgnnnnnnnnnnnnnnnnnnnnnnnnnnnnnnnnnnnnnnnnnnnnnnnnnnnnnnnnnnnnnnnnnnnnnnnnnnnnnnnnnnnnnnnnnnnnnnnnnnnnnntctcggcgccggctcgtgannnnnnnnnnatatccggctttttatccacctgctccccccccttcctaccgcaggaaaaaagaatccttcttatattgtctcccttaaaacggacccttccgcctcccctcttctccctcgccccggtacccaccccaccactctgttggtgcctgtccttctttacgtgacgctctccacctactccttctagcccccccgcccgcggtccgaccgccacacctacctcgcgggtggtcactctggccggcacagcaggcaagacactatgtgttctcttccacccccgactccaactctcgttgtgcctgccctggtgttactannnnnnnnnnntcctgataagataagaccggacaaagcttcgcctgcccccggccgccgcattttttccccgccgtcttcgcttctc

SEQ ID NO: 244104 - DNA, 853 bp, Homo Sapiens
ttcaatttctacaccacagcactaattcacattataaccacctgtcagctcatttgctctcttctctaagctattaaagtccaagacggcagagcctctatcatgtttaacactgtacccccaaacctacagggtctagtacagaatagacagtaaatctttgttgaaagaacgttcaatttctacactcctacctcagattctgcatctgtacagagagcagacactagcttaaacaactgtgaaggtgctgctggcagcacatctgaaaaatcaagaaatgtgcctgtggctgccttgcctgtaactcagcaaatgacagaaatgagcatttcaagagaggacaaaataactaccccgaaaacagaggtgtcagagccagttgtcactcagcccagtccatcagtttctcagcccagtacttctcagagtgaagaaaaagctcctgaattgcccaaaccaaagaaaaacagatgtttcatgtgcagaaagaaagttggtcttacagggtttgactgccgatgtggaaatttgttttgtggacttcaccgttactctgacaagcacaactgtccgtatgattacaaagcagaagctgcagcaaaaatcagacaagagaatccagttgttgtggctgaaaaaattcagagaatataaattacttcttgtgaagagactgaaactttgtttttatattaatatatcgtaggaaaacattaaagagcagttgcatggccatttttctttgatgttctccagagttttacattacacttgtctgtctttacttatcaattcaccaaggagctgttttctctgcatctagccatcatactgccaggctgttatgcgt

SEQ ID NO: 244105 - DNA, 701 bp, Homo Sapiens
  misc_feature (146)..(154): n is a, c, g, or t
gagactgaagataaaaggttgttcatgacactatgaatatgttttcagccaccctcaacatatgggccaaactctttactgaggttgataaagccctttaaaattcagtccctgactacatttccccattccagctttactgaacnnnnnnnnnccccatcttcctgcctttaacatgcggttttatctactccagcaatgtcgactcattttcccatctctctcttagctaacttctaagagttcttggcttaaatatcattttctccagaaagcctaccattacaccaaatacctctgctttgagttctctccaattcctaaaccacagcactgattcacattataaccacctgtcagctcatttgctctcttctctaagctattaaagtccaagacggcagagcctctatcatgtttaacactgtaccccaaaacctacagggtctagtacagaatagacagtaaatctttgttgaaagaactcttttattctacctttttgcacaccacctcctttgtttgtgttaacttgaaagttagtgcccataggaccatttacgccaggctgcattagagttgcattcacagtgtcaccattagcttggccattagggcctgaacatttgtctccagagtaattagaaccataggcaccccatgtagtaccataagagcctccactttttgactctccattg

SEQ ID NO: 244106 - DNA, 1110 bp, Homo Sapiens
  misc_feature (239)..(239): n is a, c, g, or t
  misc_feature (312)..(312): n is a, c, g, or t
  misc_feature (834)..(854): n is a, c, g, or t
  misc_feature (1032)..(1043): n is a, c, g, or t
gcaccagcccgggttttatttgggtgccccggccacggtcggtcccccttgtttcccctcccttctttgtggggttactttttagagagtttcgtgggtctaaaatctccattttgtcccaggaaagccgttaccgttacccccggaattcctctcccttgggggttttctccaattccctaaacccgcagcccgtaattcccattataaccccctgtcagctcatttgctctcttctntaagctattaaagtccaagacgggcagagcctctatcatgtttaaccctgtaccccaaaaacctacaggggtntagtacagaatagcacagtaaatctttgttgaaagaactcttttattctacctttttgcacaccacctctcatgaaaatggttcttgacaatgccttccgtctctcatctaccaagtgtcttacctagagaaggtatttaggacttttgaataaattcaagactttgctcactagtcagaccgtaatttttcgaaggaataggagcatcctgactagaagcgtgataaaacctggctatccagaaaataaagaatggctgctaactataaaagctgttggaagaaagggccttaaaatcttaaaagtctttgtattttaaccaaataccttcatagtgcaaatatgataaattcacatgcattttacttttacatactcataacaagatagtaacacagactaaagctgcagtgttttcccaagtgaatcttcattttaaccaaactcacaaagcatttatggaaattaatacatctggcaaagcaccagacttgaatcaagcagtctcaatgctacagtgnnnnnnnnnnnnnnnnnnnnnctcaagatgtagaagcagtagccatatcagcaaccattcttctagggaagggacccacatatacgatccttccccaagaactttgatgctaccccgctgaagagtttaagcacaaaacacagtgcttgtatcatataagtaaggactttcatagaggaaaactgtaatataaatgcannnnnnnnnnnnggctttaaagggatactgcaatataattattttaagctgtggctcaaatatccaacatttccctatc

SEQ ID NO: 244107 - DNA, 458 bp, Homo Sapiens
gcagtgttcagctcagaaaaagtaaggggaaaaaaaagcaatctctaaaaggaacatagacaatagcaaaagaagaaaccgagcccaaaagatgcttctgataggccgccttggggtcctgcatcctcgggtgagaatcactgagtggacacgggaggatggagagccgggcagacatgtggagtgagaggcgcgaagatgcatgtgtggcagggctgatggaggcatcagggtcaagactgtcaggtgttagaacacagttcctgacagaccaggacaaggatgacagcgaacaaatggatgtagctgaaaaggcaatgggaccacggtggtgcagctggggtcttcgaacgcctcggtcccagactgcaagggctcaggtggaggagtgaggcccagagaagggcccagtgactcagaggaagtgggcccattctctggcctcactctccaaccaa

SEQ ID NO: 244108 - DNA, 315 bp, Homo Sapiens
cttactccaaaataaatcaaggctgcaatgcagctggtgctgttcagattctaccatcaggtgctataagtgtttgggattgagcatcatactggaaagcaaacacctttcctccagctccagaattccttgtctctgaatgactctgtcttgtgggtgtctgacagtggcgacgatgaacatgccgttggttttattggcagtgggcacaaggaggtgagaagtggtggtaaaaggagcagagtgctgaagcagagagcagatttaatatagtaacattaacagtgtatttaattgacatttcttttttgtaat

SEQ ID NO: 244109 - DNA, 187 bp, Homo Sapiens
ttcaatttctacacacacaaaaaagggtctgatggaattttgataagaagctgtagataaaattgtggagaattgctatcttaacaatagtgggtccttcaatccgtgaacatggtgtatatctcttttacttagatttctctctaattctctttataatgttgtagctttcagtgtagaaattgaa

SEQ ID NO: 244110 - DNA, 323 bp, Homo Sapiens
  misc_feature (248)..(257): n is a, c, g, or t
ttcattttctacaccaccccggttatttagaattacagttaagaaggagaaacttctataagactgtatgaacaaggtgatatcttcatagtgggctattacaggcaggaaaatgttttaactggtttacaaaatccatcaatacttgtgtcattccctgtaaaaggcaggagacatgtgattatgatcaggaaactgcacaaaattattgttttcagcccccgtgttattgtccttttgaactgtannnnnnnnnnattaaagccaaatttgtgttgtatatattcgtattccatgtgttagatggaagcatttcctatcca

SEQ ID NO: 244111 - DNA, 585 bp, Homo Sapiens
caccagcgacagaaggaaaatgggcccttcctgaggaaatgctttgcaatctccctgttggtgatttgtataataataagcattggcatcttctatggttttgtggcaaatcaccaggtaagaacccggatcaaaaggagtcggaaactggcagatagcaatttcaaggacttgcgaactctcttgaatgaaactccagagcaaatcaaatatatattggcccagtacaacactaccaaggacaaggcgttcacagatctgaacagtatcaattcagtgctaggaggcggaattcttgaccgactgagacccaacatcatccctgttcttgatgagattaagtccatggcaacagcgatcaaggagaccaaagaggcgttggagaacatgaacagcaccttgaagagcttgcaccaacaaagtacacagcttagcagcagtctgaccagcgtgaaaactagcctgcggtcatctctcaatgaccctctgtgcttggtgcatccatcaagtgaaacctgcaacagcatcagattgtctctaagccagctgaatagcaaccctgaactgaggcagcttccacccgtg

SEQ ID NO: 244112 - DNA, 384 bp, Homo Sapiens
  misc_feature (327)..(327): n is a, c, g, or t
  misc_feature (350)..(350): n is a, c, g, or t
  misc_feature (374)..(374): n is a, c, g, or t
gatcccccccaaaaagcccaagactttcttagaattagtgtgggaagctcttcaagatgtcacgctcatcatcctggagattgcagccatcatctccctggtcctgtccttttatcgccctgctggtgaagaaaatgaactgtgtggtcaagtcgcaactaccccagaagatgaaaatgaggcacaagctggctgggattgagggggcagccatccttttctcagtgatcatcgtggtgttagtgactgcctttaatgattgggagcaaagagaagcaattccgggggctgcagtgccgcatttgaacaggagccaaagttcttccntcatccgaaaacggtccaattcntccagcttccctgtgggctgaagnttgtgggttg

SEQ ID NO: 244113 - DNA, 269 bp, Homo Sapiens
aaaccattttaaaaagacagcaaggtatatatctggagggaaaggaactattagactgaactgtactgagtagattgagtttcatgtcctgggaagaaatggaggctggttggacacatgcttccccatcctgaagagtgcttagaaaaaggcgtgctttctttctcacagaatgaatcattgaggcaaaagctatagaggtatatacagcaaaatagctttgccaaatgtttataccatggatatttccaacaaagtgtagaaaatga

SEQ ID NO: 244114 - DNA, 884 bp, Homo Sapiens
ctcttttcgctggctgaactcacgggaatcaaatggcgtaggtacaattttggagggcatggggactgtggacccataatttcagccccagcccaagatgatccaattctgttaagtttcatccgctgtctgcaagctaacctgctttgtgtatggcgtcgtgatgtcaaaccagattgcaaagagttatggatattctggtggggagatgaacccaacctagtgggtgtaatacatcatgaactgcaggttgtggaagaaggactctgggaaaatggcctttcctatgaatgtaggacgctgctcttcaaagcgatccacaatctgttagaaaggtgcctaatggataagaacttcgttaggattgggaaatggtttgtccgaccctacgaaaaggatgaaaagccagtcaacaaaagtgagcatttgtcctgtgctttcacattctttctgcatggagaaagtaatgtatgcacaagtgtggagattgcccagcaccagccaatttatttgatcaatgaggagcatatacacatggctcagtcttcacctgcaccatttcaagtactggtaagtccttatggcttaaatgggacgctaacaggccaagcatacaagatgtcagacccagccactcgtaagttgattgaggaatggcagtatttctacccgatggtgctaaaaaaagaaagaagaatcgaaagaggaagacgagtcgggatatgatgatgatttccctgtggcagttgaagtaattgttggtggtgttcggatggtttacccttcagcatttgttttgatctctcagaatgacatcccggttcctcagagtgtgccagtgctggaggccacgttattctcaccgggatcctctagatcgcccg

SEQ ID NO: 244115 - DNA, 123 bp, Homo Sapiens
tccatgtttcctaattggcacgaaattttctaccacaagatgtgccttgccttccgagaataagtattacctttaaacaatatcagcgcacacacatagctgcatgttctgctcgtgtagttt

SEQ ID NO: 244116 - DNA, 269 bp, Homo Sapiens
  misc_feature (192)..(200): n is a, c, g, or t
tctgtatgacctcgcctaaccctactttgcaaggctttgggcaacattttagctcattaacttcaagatgatgtgtcatctgtataggtcaaagaatgggacttctgaactgaggaatttgctgttgacagccaaagtatagtgtacaagattgatgtaacttgatatgtatttttgttgaagttttttgtnnnnnnnnnttatttacaatgttatttgaatgatttttttaaatgctgtgaatctatatttgttgttttatatattgg

SEQ ID NO: 244117 - DNA, 188 bp, Homo Sapiens
tacagtagcaaggcatactcaactgataatctccagctagatgagtaaaacagtatgtgtttagttttccagagaattctagcaagtttcatattttcttccaagttagtatagaactaactataggaagtatggggttgctttttcctccagtagaatattaaagatgggggagggtgggcaatgta

SEQ ID NO: 244118 - DNA, 259 bp, Homo Sapiens
ttcaatttctacacagaacactaacctatcttcacttctcaatgtgtaaatgtgtatctactaagtatacattaatgtgcattaaagacattcagaaaacataaaaaccaaagaaacatattaactgcataaaaatttaaagttgctaaatggtaaagcagctagaaattataaagtagggaaatgttgaatagctgacataaagattcttagtaagaacattttacattccaatattacaaatggtgtagaaagtgaa

SEQ ID NO: 244119 - DNA, 267 bp, Homo Sapiens
  misc_feature (119)..(119): n is a, c, g, or t
ttcattttctacgcttcaaactctccctatctctttcaggacttgcactttccccatttttgtcagattcttgtcctctgggtgtctctagctaacaactgtttttgttctctgtcctngtttccctcttggttcattcttcctctcctgtcacatctgtctgtctttctggtagcagtttctcagtttctctctccaatggccctctctcagggcccaccctctctgctgtttcttttggtacacccatgactgtttagaagttga

SEQ ID NO: 244120 - DNA, 574 bp, Homo Sapiens
gggggggatttgggtatcttctttcctgaagtcactcagcctctgaagaagcttcgggttcagactcaggcagtcagtcggaaagtgagcagggaagtgatccaggaagtggacatggcagcgagtcgaacagcagctctgaatcttctgagagtcagtcggaatctgagagcgaatcagcaggttccaaatcccagccagtcctcccagaagccaaagagaagccagcctctaagaaggaacggatagctgatgtgaagaagatgtgggaagaatatcctgatgtttatggggtcaggcggtcaaaccgaagcagacaagaaccatcgcgatttaatattaaggaagaggcaagtagcgggtctgagagtgggagcccaaaaagaagaggccagaggcagctgaacaaacaagaaaaatggaaacaggaaccctcagaagatgaacaggaacaaggcaccagtgcagagagtgagccagaacaaaaaaaagtaaaagccagaagacctgtccccagaagaacagtgcccaaacctcgtgttaaaaagcagccgaagactcgtgtagaaattga

SEQ ID NO: 244121 - DNA, 194 bp, Homo Sapiens
tctgtaggcactgtaatgaaacatgtagtttgttgactaaaagctttgttgaaaaggctggagactggaatctagaatttgttttctttcttgaaataattcattcttgagatttcagatagaagacgaaactttttgtatttgaacggctctgtatgtactaggtgtagaaagtgaccggggtcctctagatc

SEQ ID NO: 244122 - DNA, 722 bp, Homo Sapiens
cttgatggtccttcacgcgctttcatttagagatgggcagtgggcaatcgtgaatttcccagttcacacagccttagtagcgtcaagcaagtgatagcgtgctgggtatagaaagcagctctgggaccagttaccccatgtaggaaaggagtttgcactaaactgtttttctcacagcagaggaacctttccaaggtggggatggaagcacagtcgggacagaattcgatggattcctttagttggagtccgcgtagtcagcacagacagcagtggaaaggacgctctgggtcctgttatgtgctagggagggtaaagggagactatttcaaagctactgttcctagtccagctttaagtttcggtaagaaacatgctgttttgtttcatgatttcgttaattatggaaatttggcattgagggattattttattgagggtagaagaggttccagaatcatcatctgtgatgatggtgtcctttagggctcttggagcagccagaccatgtttccgagaggaacctggtgatgttgtccagctgacctcttgccatcccctcccagttgtcctggggctgaatgggcaaatctgtccaaacagctagtaaccggctgtgagggagagggtcagaagcacttagcgttggcctctgattgctgtcctctcttgtcctcttcccactccaatgatgaaaatgattttctctaaatgcctgggta

SEQ ID NO: 244123 - DNA, 494 bp, Homo Sapiens
ggctgtctgttacagattttatattctatatggtggtgttatttatttctgtcttatctccattctggattttaagttccttgacagctacaagaatggctttacatttttgtagcctccacaggccttgagcacagtgacattcacataatatgcattccaaaatcatctgctgaatcaaacaagggagataagacaagcttgtaacttaagcacaaaccatagtaacaaacataaacatgctggttacattatgaatataatgctgagtatatccataaatgcttaagtcgcaggagaaatacaaatgctttaaccttggagtgtcaggaacaattacatgaccagggacctactaaggtagggtaattttggtacagtacatggaggagattcagccttgaagagagaataagcttgttttaaaatggaacatacaaaatcggataccctcacagatagcattggtgtagcaattgacggggtactctaga

SEQ ID NO: 244124 - DNA, 581 bp, Homo Sapiens
cccctccccccgccgccgcggttctagcttgaacgcgccaggccactggcagctgcggtcgactttagaggtccctcactgtgctggactttgggtctgccaaattcatctgcattagagaaaaagtaggagagcagccccaggtggtattcattgatatgaatgacccaagtaatccaattcgaagaccaatttcagcagacagcgccatcatgaatccagctagcaaagtaattgccactaaaagctgggcaaactcttcagatttttaacattgaaatgaaaagtaaaatgaaggctcataccatgactgatgatgtcaccttttggaaatggatctctttgaatacggttgctcttgttacggataatgcagtttatcactggagtatggaaggagagtctcagccagtgaaaatgtttgatcgccattctagccttgcagggtgccagattatcaattaccgtacagatgcaaaacaaaagtggttacttctgactggtatatctgcacagcaaaatcgtgtggtgggagctatgcagctatattctgtagataggaaagtgtctcagcccattga

SEQ ID NO: 244125 - DNA, 463 bp, Homo Sapiens
tgtattggtggtgctgcctctgcagcactttgactgaatgctcagggtcgaaggaacggagaagctctggttaggtttgtaagtgaggagcaccgagacctagcactacagaggcacaaacatcacatggggacccggtacattgaggtttacaaagcaacaggtgaagatttccttaaaattgctggtggtacttccaatgaggtagcccagtttctctccaaggaaaatcaagtcattgttcgcatgcgggggctccctttcacggccacagctgaagaagtggtggccttctttggacagcattgccctattactgggggaaaggaaggcatcctctttgtcacctacccagatggtaggccaacaggggacgcttttgtcctctttgcctgtgaggaatatgcacagaatgcgttgaggaagcataaagacttgttgggtgtagcgagatgaccgggat

SEQ ID NO: 244126 - DNA, 222 bp, Homo Sapiens
gctgtatcttgaggatccccggtcatctgctacagcaagtgtcacagttttcaccatctaacaaataaaatagcttgtatacagcagagtcacagtcaacctgacataaaaggaaatgtcaatgaacaagtaaaccttgtgtatgtgttgctgctaaggattttggggcttttgttactgtagcataacctagcgaaagctcagcgagacagcctgtagaat

SEQ ID NO: 244127 - DNA, 183 bp, Homo Sapiens
atatatatcgaaaatcatattcaccacttcctgggttctttggaagctctactggaatttctgaaaacatcagaagtgccctatgcaggaattaacattggcccagtgcataaaaaagatgttatgaaggcttcagtgatgttggaacatgaccctcagtatgcagtaattttggccttcgat

SEQ ID NO: 244128 - DNA, 1571 bp, Homo Sapiens
  misc_feature (1466)..(1466): n is a, c, g, or t
ggggcagcggcgcagaggaggtcagctgcgggagcgtttccggggacggtgccgccatgagattgaccccgcgcgcgctgtgcagcgccgcccaggccgcctggcgggagaacttccccctgtgcggtcgcgacgtggcgcgctggttcccgggccacatggccaaggggctgaagaagatgcagagcagcctgaagctggtggactgtatcatcgaggtccacgatgcccggatcccactttcaggccgcaaccctctgtttcaggaaacccttgggcttaagcctcacttgctggtcctcaacaagatggacttggcggatcttacagagcagcagaaaattatgcaacacttagaaggagaaggcctaaaaaatgtcatttttaccaactgtgtaaaggatgaaaatgtcaagcagatcatcccgatggtcactgaactgattgggagaagccaccgctaccaccgaaaagagaacctggagtactgtatcatggtcattggggtccccaacgtgggcaagtcctccctcatcaactccctccggaggcagcacctcaggaaagggaaagccaccagggtgggtggcgagcctgggatcaccagagctgtgatgtccaaaattcaggtctctgagcggcccctgatgttcctgttggacactcctggcgtgctggctcctcggattgaaagtgtggagacaggcctgaagctggccctgtgtggaacggtgctggaccacctggtcggggaggagaccatggctgactacctgctgtacaccctcaacaaacaccagcgctttgggtacgtgcagcactacggcctgggcagtgcctgtgacaacgtagagcgcgtgctgaagagtgtggcttgtgagctggggacagacccaaaaggtgaaggtgctcaccgggcacgggtaaccgtgaaaagttattcagccctaactatccctgcggcaaggcccgcggactttcctggcagaattttccgaccccgggggcttcgctggggcttccccggcatgctgggaacctcccacaggttctgggcgggggcccacccccaccgcggttgggccccttttgcccccgcaaactttggtctcggggagacacgggaaagggtacccgcgacgagccctcggggagttatttcccgacaagacctcttcctgtgaccccctcggggcgtggatgtagaagagactccacaacgacccagttttacacgccgcggggctccagatacatacctcccccgggttgtggcaaaccacgtgcgggggagcgctgtgtgagatatctcctcgggcgcacccccccgccaataacttatatcgtcggaggcgcccccagtgtgacatccccccccatgttgttacagagggacgaaaatagaaaacgcgcggggccgacaacggcgcgcaccccacaataacactctctctcacgacggtggngaagtgccgctcacacgcaccgcagcacatatactcacctcacacatcggtagtgtgggcgataatctcccgccgtgcggcggctgttgcgccgtgcgtacagcg

SEQ ID NO: 244129 - DNA, 215 bp, Homo Sapiens
taggccattaagggctgtggaacttgctatgatcatggaccggctatatggtggagtttgttatgcaggaattgatacagatcctgagctaaaataccccaaaggtgctgggcgagttgctttctccaatcagcagagctatattgctgccattagtgctcggtttgttcagcttcagcatggtgatattgataaacgtgtagaaagtagaacgg

SEQ ID NO: 244130 - DNA, 749 bp, Homo Sapiens
gtaaccccttggttttaaagtggggccaaggaccaggctactaatgggtcaccaacggacctctttcctttaaatccttacctttatacatcaacctttcaggtggctcccccaaaatgttataccaaatctgtaaaatgcaaataaaacaaaagacaaatctccatcacgtacaacatgaactgaacagccatttaaaaattcaatgggtgagaacttcttggacctcattggctagattcctttcttaaaatccatacaccgaatttaacaggaaggttcccattccttgaagagcaaacttcagatgtacaagccttgagtgaaatatattttggtggctgagtaaccatcttactgaataagagacacgatttttgtaaactacacgagagtgacagatgcacaaacgttttggccagtgtgcctttaaatagatgtctcttctggtggagggatgtctagagggaggaaggtatgcattctataggactgcagccttcaaagctgctcagtcatgtttttgccagtgggtcaaacacctgcagtgctgtcctcttttcttggtcactgattgtcacccagtgacctaaggttttgtgttcatgatctggtggcagctctgccttggcagctgaagcgccagctgacactgggtctatgggatctcttttggggctcctggttcctgagtccaaagggtctgagctcttagaaagccaagtgttattcaacagtttagggtggtg

SEQ ID NO: 244131 - DNA, 1144 bp, Homo Sapiens
  misc_feature (49)..(59): n is a, c, g, or t
  misc_feature (334)..(334): n is a, c, g, or t
  misc_feature (367)..(654): n is a, c, g, or t
  misc_feature (1018)..(1093): n is a, c, g, or t
gcccaggggaccctgtgacctgtgaaaatctttgaagggggtaaccccnnnnnnnnnnntcagggccaaaaagggggaaaaggaagggaatttttccccggcccgggggggaagggagaaaaaggcccccaggccccggttattgaagcccgagggacattttaggaaggaaaggggcccccggggtttgggccctctggggtgactggaggaggaaggcccgggaatgatcccagattaaatcggatgctgtatgccctgtgaagacatggggtgtacctctaaacgcactgcgttgtaagcaaaggagtgacctgatttaatttgatctttnaaaagtcattctaggccaggccgggtggctcannnnnnnnnnnnnnnnnnnnnnnnnnnnnnnnnnnnnnnnnnnnnnnnnnnnnnnnnnnnnnnnnnnnnnnnnnnnnnnnnnnnnnnnnnnnnnnnnnnnnnnnnnnnnnnnnnnnnnnnnnnnnnnnnnnnnnnnnnnnnnnnnnnnnnnnnnnnnnnnnnnnnnnnnnnnnnnnnnnnnnnnnnnnnnnnnnnnnnnnnnnnnnnnnnnnnnnnnnnnnnnnnnnnnnnnnnnnnnnnnnnnnnnnnnnnnnnnnnnnnnnnnnnnnnnnnnnnnnnnnnnnnnnntgtcattctacactgtgaaaaatgagctggaggaggcaaagggaagaaaggggagatcagtgaggaggctgttgtcatagctcaggcaggagtatggtagcttggacttggcaacagcgtgcaggtagagcaccaccgctggagtctggatgcgggatgcattctgatgtagggagtggtgggaccgcgcagcatcaagaagccaccgctggagtccagatgagggatgcgttctgatgtagggagtgggggacggcgcagcatcaagacttgcactgaaaatttctgctttgagcaactgcgtggaatggatggaggtgtccttcaccagctatgggaaaggccagggaaaggtttaaagggnnnnnnnnnnnnnnnnnnnnnnnnnnnnnnnnnnnnnnnnnnnnnnnnnnnnnnnnnnnnnnnnnnnnnnnnnnnnagcctgggcaacataagcaagacacttcgtcgcagtgaccagggtcctcta

SEQ ID NO: 244132 - DNA, 395 bp, Homo Sapiens
  misc_feature (225)..(251): n is a, c, g, or t
gggtcctagtgcttccgaatcatttaatggcattgtcggatatctcctacatttcaattgcaatccatgaaattacatttagaagattcttagtacttaactgtagtcttctccatgaattacacgttagaatagactggcagcaactgaatatgcagcaagtaagcctctagcttatagtttcatccctacccctcatgcctgcgtgagtctgtacagggatannnnnnnnnnnnnnnnnnnnnnnnnnntagagaggaagaggaagagcagaatgtctgtatactacatgctgctaaggtagtgaatttttctttaatgcaattttgtgggtccaaactactctttgcactactttatttacagtagtaaataaaattatttttatacaattg

SEQ ID NO: 244133 - DNA, 618 bp, Homo Sapiens
agaggatccccggattgagataagcacggtgcctggccactgtacaggttatttatagaagttggagagtgaagggttgagaaagccaaggggcagatgcgggtctggaggattttgtgcctaaggccctctctttgctcccagacagcatgaagtaacaatgaggcatccacctcttggttttgtggcctctgtggatgacgtctctcaccttgaaccagttcagagttggagtagcgcaggatcctgtcttcagaggaggggccgaagcgggttcctctgttgtcaagctctttggaggtgcctggctgctactactgtcccagagaggtgatgatgaatgatgggtgtgtccagtggcagtttgccccactgaggcaggggcttccactaggccctgacagagcccttccagcaggcagaaatccctgtgctaggcaagattcaaactccgtagcatgtctcctgctcccatctcttaggaatggagtccttcaggccttgagtcccacattttccatgatgctccattaagcagctgatagcacccccacctccagggaaagtgagttcagagtccttggtctaatgcatctgtgttgaaatgagcctcgccca

SEQ ID NO: 244134 - DNA, 621 bp, Homo Sapiens
tctagaggatcgtcgctctgaggatcccccagatcaactggaatctgacagatttggtcaacactggactcagcgctttccttttctttattgcttcaatcgtactggctgctttaaaccatagagccggagcagaaattgctgccgtgatatttggcttcttggcgactgcggcatatgcagtgaacacattcctggcagtgcagaaatggagagtcagcgtccgccagcagagcaccaatgactacatccgagcccgcacggagtccagggatgtggacagtcgccctgagatccagcgcctggacacgtgaggacctgcctggatcctcctccctcccgtcctcgtgcctgtctctcagtcaagttttctttcccttgtcctgtcagatttccatgtgattcagttgaattttgtcctctttggtaaaagttcattttgggaaagggtttcccgagtggcccagtgggcgggtccgcggtggagttgggaggcccacgttcctcagcgtttggggctgtggagcagccggcgtcactgcccaggtccacttgaggtcttacctgccctgaagcacaggcttcctttgactctgacaccttgtacgtgtgtagaaaata

SEQ ID NO: 244135 - DNA, 302 bp, Homo Sapiens
  misc_feature (185)..(185): n is a, c, g, or t
gccacatacaattttacatacgatttcatggggttatgaaacccccagcacctacccatgaatcacaagttaagaatcctggtgtaaaaataaccaaaggtataaagttaggaaacggtgggaaaatgagacatagggcccaaaagaaaagttggaagaggatggaggagaggacaggagatgcncgtagcagtgagtaactctggaagtgggtataggactacgtggctctgtacttcaaagtgctctcacttcggacatttcatttgatctttacagtaactcattcaacaacaatggat

SEQ ID NO: 244136 - DNA, 395 bp, Homo Sapiens
tgattgcatttagacgacaggaatttggcaagaggaactttgtttgctgtgaacacatatttggcatgtcaggttacatccttttgtattttatttatatttgatagtgtctatgtcctgtcttcttggtggctttataaacattttggggagggaaagtatgatttattctccttgagttcctccttctcacccatacgatccataatgtagtgcacacataaatatctctaaatatgcagttgggactgttgcatcactaatgagttaaactattcaacgaagccaaaaatatgtattatgggcccttaagtgccaggcacagttttgggcatggggatacaagaatgagggagcttatgatccaatctgagaccaggccagggggtctaaat

SEQ ID NO: 244137 - DNA, 853 bp, Homo Sapiens
  misc_feature (824)..(824): n is a, c, g, or t
tacagacccacatctctattcttgccctgaaatacgcgcttttcacttgcgtgctcagagctgccgtctgaaggtccacacagcattgacgggacacggaaatgtgactgttaccggataacactgattagtcagttttcatttataaaaaagcattgacagttttattactcttgtttctttttaaatggaaagttactattataaggttaatttgcagtcctcttctaaatagaaaaccatatccttggctactaacatctggagactgtgagctccttcccattccccttcctggtactgtggagtcagattggcatgaaaccactaacttcattctagaatcattgtagccataagttgtgtgctttttattaatcatgccaaacataatgtaactgggcagagaatggtcctaaccaaggtacctatgaaaagcgctagctatcatgtgtagtagatgcatcattttggctcttcttacatttgtaaaaatgtacagattaggtcatcttaattcatattagtgacacggaacagcacctccactatttgtatgttcaaataagctttcagactaatagcttttttggtgtctaaaatgtaagcaaaaaattcctgctgaaacattccagtcctttcatttagtataaaagaaatactgaacaagccagtgggatggaattgaaagaactaatcatgaggactctgtcctgacacaggtcctcaaagctagcagagatacgcagacattgtggcatctgggtagaagaatactgtattgtgtgtgcagtgcacagtgtgtggtgtgtccactcattccnttctgctcttgggcacaggcgtgggtaag

SEQ ID NO: 244138 - DNA, 316 bp, Homo Sapiens
gaaaccacgagtcctacatcagaatctggacccaaccagcagttcattcagcaaatggtgcaggccctggctggagcaaatgctccacagctgccgaatccagaagtcagatttcagcaacaactggaacagctcaacgcaatggggttcttaaaccgtgaagcaaacttgcaggccctaatagcaacaggaggcgacatcaatgcagccattgaaaggctgctgggctcccagccatcgtaatcacatttctgtacctggaaaaaaaatgtatcttatttttgataatggctcttaaatctttaaacacacacac

SEQ ID NO: 244139 - DNA, 866 bp, Homo Sapiens
gggggcatacttccattcaatgccccatcctgtgggctgattacattaactgatgcacaaagattatgtaatgctttattgcggccacgaacttttcctcaaaatggtagcgtacttcctgctaaaagctcattggcccagttaaaggaaactggcagtgcctttgaagtggagcatgaatgcctaggcaaatgtcagggcctatttgcaccccagttttatgttcagcctgatgctccgtgtattcaatgtctggagtgttgtggaatgtttgcaccccagacgtttgtgatgcattctcacagatcacctgacaaaagaacttgccactggggctttgaatcagctaaatggcattgctatcttcatgtgaaccaaaaatacttaggaacacctgaagaaaagaaactgaagataattttagaagaaatgaaggagaagtttagcatgagaagtggaaagagaaatcaatccaagacagatgcaccatcaggaatggaattacagtcatggtatcctgttataaagcaggaaggtgaccatgtttctcagacacattcatttttacaccccagctactacttatacatgtgtgataaagtgggtgccccaaatgtgtcacttacttctgctgtatcccagtctaaagatctttacaaagacagaggcaagtcaattccaaatccaggaccggccagagaaagggttctagtagcgcgcaaaactttcaaaaaacaggggccctactccaaaaggtcctcccctgagggcaacggggaaaaaccggcattctaaatacacagttacaaaattttattgtatgcccgactatagatgccctccaactccgtcgaatatatgttctc

SEQ ID NO: 244140 - DNA, 393 bp, Homo Sapiens
gtaccctgtgtagatgggatgggccaagaggaggcttccttgtctagtacacagaaacctggacaaatataatcacacacataacaggccaggaaaatgggccttggttatcagcacccctgctgtactgcaaaaggggtctgagagtaaggccttattcagatgagataggccgtgtgcagttacacacattattgaccaaggtgcatgtctgcggtcacttagaattgtgcaccttgactgtccaaatgtaaggttcttatggagctggcactccctgctgggaggaaaagaaagattatgcgtagatgggatggggcagaggaggcttccttgtctagtacacagaaacctggacaatataatcattagataccccatatgtgggagaag

SEQ ID NO: 244141 - DNA, 275 bp, Homo Sapiens
tcacccacaatgtaaaactccaaaaccttcaatttggcctaacttagaattcataaatttggctaagcaaataatatgcaagagtgaattgtgacattgtatttaccctaactatggtgtttccaaatacattttaaaagagcaccttaacagttttcacttcagacaatcagagtatataaggacagcccagttgaagtcactaatctatgttactagttaataatggccctagtactaggtctaaatgcatcagggacctctagaacacctac

SEQ ID NO: 244142 - DNA, 311 bp, Homo Sapiens
ggcaaaccatagatattggaaatgtctatattgaatgtacatgctcttgtggaaaaatgtactatatgtgatggaaataaaccagaatcgaagttatttcagctaaatgtgcttcagcaaaggtgcattggttgaaacttaaatgttttattatcaaatttaaacttattcagtgagtatgagcagctacacttgaattatattctgatagttttatttctaagaaatagagtaataatttctctttaatttaaaaacagatttactttcccacatattgaaaatttgtacttatagatctagctttaata

SEQ ID NO: 244143 - DNA, 353 bp, Homo Sapiens
tcggtacagagccataactatacaaatagaaatatatctacccagaagaagaaacatgttttccaaacaaaatcaagcattatgtgtaaaatcaagcatgaccctgcaggaaggtctggccagcacagtggcagcaccagtcaggctctataattatttacttgtgtgtgaatcctagtgccactttttaccccctcccacagacctgcaatgattaacaaactgtgatgattagaaaataaattacaggtccttccataaattatatctggaaacctgcctagattctttgtataagaaacacaaatttaatttctatcttcatacaagcatagaatttacttgggtgagga

SEQ ID NO: 244144 - DNA, 213 bp, Homo Sapiens
aactatgggaaggggctgatgctggtttaggataatcccagatggaatattatctatttagttgctgatatttcttggcaattgaagactaaaacaccattctaaggcaccaaatgatatcaccttaagtttcaaactgtttaaaatgagctgtataaaatagtttatgcaatagtttgctgtaatagtttatgctgtaatagtttatgctgt

SEQ ID NO: 244145 - DNA, 693 bp, Homo Sapiens
agaccccctgacgtcaacccaatcaactagctcagtagatgttgtctgtatttattttctacctttatgaaacaagaacctgctaacaggtaaatcgtaaagtaacatatttttgccctgatgccattagtcacaatgccatggggtaactgctatgtgatttcccatttgcaaggaagcatattaattcagtttctgctcaatatacaattaggttgtagggatatagatatctcatttgagttatctgagtttttcatctttatatctaaaaatctaatctgaaaatagtaaaacacatttaaaaccttagatgctactgtagtaaaagttatgtttataaacatttcagtatattccttcaacttcaagaatcttgaatttccttgctagaaggcttttttcctcaaagattccttttaggcttactttggtgttcaggatctccaattataaatgtagtctctcagcaccacattccgtaaagatgatttcccaagtaacggtatttgactaagttgctccagagtgttagggtgcaaaccacagttagtaagctccttatgaacaacctcctgtggaaatgtgtgtacaagtcagtaaaaagcacattagtctttaaacacagaagagttaaataattactatggagactgacaaataaatggttgattaatgtgattcatcctatta

SEQ ID NO: 244146 - DNA, 200 bp, Homo Sapiens
gacctattttgtgaatttgctttgactgagtaatggcatcacatggtaccattaggtgccatgttaattaggcagttggaaatacgagcttatagctcaggtagaggtttggacgttgttctgggactctgaagatctggctttttatcctagctctgccatgcagctgttatctgtgacaagtcaatagtttatgctgt

SEQ ID NO: 244147 - DNA, 450 bp, Homo Sapiens
  misc_feature (289)..(289): n is a, c, g, or t
  misc_feature (292)..(342): n is a, c, g, or t
aagctccctacaagatttacacaacagaattattctgcaaatacagatattggagtagctgagttccatctcaaatttgactatgcaggttgacaggtgatcttggcaaactacttatcctttctgaagttcaactttttcaccaaatggtattgggatacaacacttgctcttgcctatctcacatgaattatccattttggacaacttggtaaactataacccaccaaacgtatacacagagtaaaatctacaacacataagtggtttaaaacaatgacgtacctcncannnnnnnnnnnnnnnnnnnnnnnnnnnnnnnnnnnnnnnnnnnnnnnnnnncacaagagtgaactctgaaattaaataattattattattaaatgcatttagatattcaaataaaaaaagagaagcctccttgttcttgttggagcttggatcctctaa

SEQ ID NO: 244148 - DNA, 202 bp, Homo Sapiens
cagcataaactattacagcataaactattacagcataaactattattcttagcttcacctattcataacataataatgaaaccccacaactagtagagacatggcaagaattacttgcacagtgtttctaaaaaagccacaattttggtgcctatatagtcctgtttcaggaaaagatgattgaaccataaatcatggtgga

SEQ ID NO: 244149 - DNA, 708 bp, Homo Sapiens
tgtggtaccatcgttagtcatcatgtgatcgttccatgtagatcctgtcgtctttcctgcaacgtcggacacttctggatgtttcacagccaggcagtttatgatattaacagactagactccacagacttctgcaagatgccaagaggggaacttgggctttttcttttttccaattgccttttacagagtgatggaaagttaactacgaactcctgcggggaaaagaagagacgatctaggcctaaaaatcgtgtctactctccaagagagcgtcgccctgctttccagtgttatttcatctgtttttataattggatgtgaaacttcttgagaaagggtcctatgactctttaaccaattattgttcaaaggagtccccaaagtgttaagcagtttcaaggacagacatccctcctaccaacgcagtggacttcactggaagatgctatttcaccaaaatctgcaaatgtaaactgaagggcatcggttgtgtatccatgtgagacgatcgtagggtatcatgtgatggtaccatgtggtgcctgtcttctttcctgctaggaacggaccttcctggatgtctcacagccaggcagtttatgatattaacagactagactccacagacttctgcaagatgccaagaggggaacttgggcctattcttttttccaattgccctttacagagtgatggaaagtaact

SEQ ID NO: 244150 - DNA, 295 bp, Homo Sapiens
cagcataaactattaccacatttcttaaaagtagattcgtattttgatttgagattgttgaaaagcatggtatgtttggagtgcacttagttatgtcccatctcataaagactgttgagctctctgcactgctgtatgatgaagccattgcatgaacccagaaaacggggatgcctaagcacagggcttaggtgctgttcccttgcgtcatcagcagaggtctgtccactttgtagaaggtcacggggttagagactgtgtcctgttttgcgtattcctatatagctttccttat

SEQ ID NO: 244151 - DNA, 327 bp, Homo Sapiens
gcataactatagtgaatagtgctgcaataagcatggtaggtgcaggtatcccatggatatactgatttatattacctttggataaatattcagtagtgggattactaaaccatataggtagttctatttttaattttttgaggtaaccccaaactgttttccataatggttatactagcttacattcctaccaacattgtataagagttcccttgtttctgcacgttcattaacatctgttgttttttgtcttttggataatagccattctaacaggaggtggatgatttcttattgcaattttgatttgtgaatagtttatgctgt

SEQ ID NO: 244152 - DNA, 692 bp, Homo Sapiens
cagttgatctgcagtcactcagagatcccacagacataagagacttgattctgcctaagagggtataaactataccatttgaaggcacagcccataagactatacttgattttgccccaagattctgacttctggctacatttcacctgcagttacctgggctatcggccgtgatacattttttaattcatttgttttccaccattatatttttatacttttcagttagatatacttctgcataaagagtatatatacagtgtaggataaaggcatatcgtacatggcaatgctgttaaacatggtaagactgaggttctgcaggattaaagtcagattaagggtacagaaagcacaccttgatactgaggccatttagagcaatttgtttaatgagtggttcagccatcaccaccagtggccacctgttcaataaaattgcctagcaccacagtggagagtcatctacaccccaaggtgagctgtaagactggccaattctttgaagacctttttttctgttgggagaatggaaagcagaaagggaagccaggctctttaatgttccaagtcagccgtgcctcacatcaaggctctctttttagctactaagtaacatactcaagactttgtatctgtgcagcattttatggaaatcactgtgacctataggatatactaatatttcaact

SEQ ID NO: 244153 - DNA, 532 bp, Homo Sapiens
tattttggcagatggatactaattccaggcattctctcctcttggcctttatgtttgttttcttttttacaggatacgtttatgtatgtcacagatgactggattaattaagtgctaagttactactgccataaaaaactaataatacaatgtcactttatcagaatactagttttaaaagctgaatgttaataggggacactgtaaagtatcatcaaaacctgaatagcttcattgtgcacaagtgtggagttttgtatcctcttacctggtaaactgaagggattgtttggccatttcatttatcttatcattaattcacaagatagttagaaattctgcctcaagcaaagtaccacattttgaatgttttcttagattttgattgcaagtagatatcagcattttttaaatgaaaagctatattatcttctcccttcaaggcagcctaaggatgttctttcccagaatcactccaacccttcttgccagaattcataaaagtacaaaattggagaatagtttatgctgt

SEQ ID NO: 244154 - DNA, 731 bp, Homo Sapiens
catccgtcaattttccctgatatgcagtactgtactactaacatctaattctgtagaaaataatgattgttagtgacttgttagagcttgaaaagacccttttagaaattatttaaatgatcactctttaaaaattttttttaatctcagaatctactaatgtgacagacaaacggtatgcttaacagagtcataaatactgtgtataattgcttgaccatttctggcatttaaatgacctcccagaatattacacaagccctgagactagtgagcatcttactactgaccttgtacaataccaaagcttcataatgctaaagaaaaccaaaacaaaagacaatggtttacacagggaaataaccctaaggcaatatgaaaacagtcataatttattactgataaagagtaaaggcatccttcccatagagggggggaattcacagggaacactaattatatcagatgaaccacggggatagaaaataggcccatttttaaaattcattgagaaattattactttttctccacaactgtgattctatacaaaatataaaccctgcaaaccttatgtgctacctgacagataaaagtagcaggagccagactcttgaagcacttgagactgatttctacaaagtccaggaagagcaatgattccagtgtgcagtgctgatgcatgtgtgagcctaacatgttattcagctctggttgcagccccatctaccc

SEQ ID NO: 244155 - DNA, 1061 bp, Homo Sapiens
ggggcttcaggttccggtcaggcgtcgggacagagcctgatccaggcttcggcggccggtggcagctctcgatcagctctcgcagtcggagaggtggctaaggaaaggtgccacagcagagacgcgaaggagaggccctagaaccttttcaaagaagaatggaagaaaccatgaagcttgctacgatggaagacacagtggagtactgcctgttcctgataccagatgagtcaagggactcagataaacataaagagattcttcagaagtacattgagagaataatcactcggtttgcacctatgctggtcccctacatctggcagaatcagcctttcaatcttaaatataaacctgggaaaggaggtgttcctgctcatatgtttggcgtgacaaagtttggggataacattgaggatgaatggtttattgtttatgtaataaagcagatcacaaaggaatttccagagttagtagcaaggattgaagacaatgatggtgaattcttgttaatagaagctgctgactttctccctaaatggctggatcctgaaaatagcaccaatagggtatttttctgccatggggaattgtgtattatccctgcaccaagaaaatctggagcagaatcttggttacccaccacaccccccacaattccacaagcattgaatataatcacagcacattcagaaaaaatacttgcttcagaatctatacgagctgctgtgaataggcgcatcagagggtacccagaaaaaattcaggcctcacttcatcgagcacactgcttccttccagctggcattgtggcagtgctaaagcagcgccccagattggtggctgcagcagtccaggcattttacctatgagaccctattgacctgcgaagcttgtccgtgttttcaagacattcttgcctgaaacacgaataatgacctcggtcacattcactaaatgtctatatgcacaattggtgcaacaaaaggtttgtgccagaccggcggagtggatacaggctgcctcctccatctgatccccagtaccgagcccatgaattg

SEQ ID NO: 244156 - DNA, 370 bp, Homo Sapiens
attcaaggtttcaccaagggacattagtggctgtgcgtgctcatctgttgtctgtggggactgggttcctaggcttgaggtgctcagtctggagagttttcctggttttattttcgcatttccctgtcctcccttctgtgtggtcggttgtgtgattggcaggctgctttgctcaccagaggtgtctttacaggctgccctgatgatctcactcatttggaagtattattctgtccctgtggctgtcgtgccgagtaaatggataacccctctagaccgcctggtagcctttcctactagagtagcaggtaagaattttctggaagatgcagtggaagagtgcgataggcttatgtaggggtggccttac

SEQ ID NO: 244157 - DNA, 2533 bp, Homo Sapiens
  misc_feature (187)..(219): n is a, c, g, or t
  misc_feature (1299)..(1300): n is a, c, g, or t
gggggaatcagtgcactgagctgtaaactcggcagaaagtgggattctgcatacgccatctctgagagccatggagggagccacacccctggtgacttcatggtgctggatgggagacgctagcggcatccttcagggccaagtttgataaataccaccgccatcattctgctcatcctcctcctgnnnnnnnnnnnnnnnnnnnnnnnnnnnnnnnnncctgtttatacattagaacaagataagatttgaaatacttccttgcaaataatgtgcaactcccaaggtgaaactcaaatagaaaaagtcatctctctggtagaaaggatggctttcctgtaatgactatagagtaagagtggcagcaatctttccatgcccttttcagcagaaggcacagaacagtagcgggactgccatctctggcaagatttcaggtaaagaatctcttcttaatttctaccttcctgtttctctgaatcagcccataggtgttgatgagtggccactcttaaagagtcactcagtatcagggatctactgtctttgttcaaaggtcaaataaaaacctagtctccttttattcctactttctattcttagctagaatgaaactcagcatatatacacttctgggacataataatattggatagtaatttacctttacttagatgaaagaaattttcattacaaacttaaatcatgtaaaactcaacaactcagattcctggacctggtgtcctggttgggtccaaggtgattttacagaagaaaaaaacaactcaagcattctggtggcaacatagagattgtaggctgcttctaagaaagttattaacaatttggaaattcctaagtaggatgagagttagtaactggatacgagtgaagtttatatccaagttcagactcaaaggcattattatgatttgcttcttcccatgtcttccatgtcctgcttctcaaagtttttctcatccatcacactcctgccttaactgctctgagtatgcatttgttttcaattcatctttatttcaatctgtttaacttttgaatcgcatgggaatacgcacattaagttcctttctaaaataaggttttatgaagctgagtttcacgataagtgtcttgctattttttgagatgttttatggacaaagaaaactttacagatttatatgtattttgctgcaccagtaaatggaccattaactagggcccacctttaacagagcacccctttgaaagttttataggtatgaaatatatgtagatatttgtaaagggttttannatttttcttttgatggggtgctgtgtaaatcttgtatttataaatgtaatgaaggtattgacagaaaaaaatatatacaacttttataaaggattgtgtactgactgaatacatttaaaagaaaatatattttgaaacctgttctgctatgaacagagataacatatctttttactatgctattggtttttaggttaagcttcctaatgcataataaatttacagtggttacttttatcacccacacacacaaacaacacaaaccctacctccctcccacccaacatagaacacaaaaacatggctaccacaacccacgagaaagacctaaccttgcatgcccataaaccccaaccacacgacatggggggggccccctggccccaacaaaaatccatccaaaaccctcttttggcgccgcccgccccccacaggcgccccggaacctggcggtatattgtttttccccaggaaaaaccctgggcgatatcgcaagggggctgggggtattcccccccacaaaaacaacgcccccccgggggggcaaaccaagggtgtttctccacaaaccaacccccaaagcaggcaccctctccgaggggtcattatgggcgggcgcccattacctcagcgcgggcgctgcctcaaccgccgagactcctcccatcatctatacagtctgaaccgccgcgccggcggtccgcggagcaatcgatgatatggagtacaacggaggccgctgctgagcgacccacctcttcttttctgcataagaaggttctggcttacgcagcccgccacggagccgtggtagcaccctcccccctctgaatactggggcggccgtggcgttaattcacgaggacaaaccgtgtcgcgggatatatcgcgtcccgatgacgcgcagtatacctacacaaaccctcgcccgcgggatggagtcccatgattggtgggagcgaacgaagagatcaaacagtcgtgcgcggcccccgacggtggtgtgagacacatacagtgcccggggtggcaggatctaaatcacaaagaaatgcctcgcgggcgcccacgataccttcgggggcgcgcacactatcgcctcttttctataaccccccgcactccgctgccgggtccgcgtgaggccccaccccccgcccacgatctagggtacgtgtgctgggctggtggcgcccagcacacgccccgagggcttcttaccccctgcggtct

SEQ ID NO: 244158 - DNA, 611 bp, Homo Sapiens
gagctgcctaccgtgctatacaccccccattgtttcctgcaattttgacagagtctacatctaccatctgcgctgctatgtctatcaagccagaaacctcttggctttagataaggatagcttttcagatccatatgctcatatctgtttcctccatcggagcaaaaccactgagatcatccattcaaccctgaatcccacgtgggaccaaacaattatattcgatgaagttgaaatctatggggaaccccaaacagttctacagaatccacccaaagttatcatggaactttttgacaatgaccaagtgggcaaagatgaatttttaggacgaagcattttctctcctgtggtgaaactgaactcagaaatggacatcgcacccaaacttctctggcacccagtaatgaatggagacaaagcctgcggggatgttcttgtaactgcagagctgattctgaggggcaaggatggctccaaccttcccattcttccccctcaaagggcgccaaatctatacatggtcccccaggggatcaggcctgtggtccagctcactgccattgagattctagcttggggctaaagaaatatgacaaacttccagatgg

SEQ ID NO: 244159 - DNA, 492 bp, Homo Sapiens
gctgataccaccgtgccatagaagacttaagtcaatgaaatctaatcagtgtgtcatttctcagcggccattggtgactttaaattaagatgaggcagagcccaaatggaaaacagtcattttgttgtaggtataaacacatgaacgattcagaaaattattcatctcagctgccatgcagcatgacattaacattaggattgatagcactagtctgatctgctcaaggaaaataatagttctattatacttaatgatgttggtttttacacagctcatttcatttttcactagaaagccagttatgaaagagagctggcctaggcatcccggccctgagtcctaggcccagtctccaactggaaaaccttaggctggtgtttacacatccctgagcctctagtttcctcatctgcaaaacggtgtggtggtataggttgtatagagtggtatagtggtgtaagggtgtatagcggtgccgagctcgatcgt

SEQ ID NO: 244160 - DNA, 123 bp, Homo Sapiens
tcctgataccaccagatattgcctgtgtgtttgcagagaagatggtttctataaagagtaggaaagctgaaattatagtagagtctcctttatatgcacattgggtgtatagcgggccggctc

SEQ ID NO: 244161 - DNA, 276 bp, Homo Sapiens
tggagctcggtaccatgctatacaccgacaacatgttcatgtgagtgcagcagaactgcacagaaggagggaaaagtcacaacaggagagtaccgcaaggctggccccagtaagacacaagaagcgaagtctgcagcggcactctgagtcacgacagaagagtaactgcgaggccggtcccagtgacatacacgaagggaagtctggagcggtgctctgagaagcggtccaaggggctccccccgaggaacactttctcctgttgcagggtggtat

SEQ ID NO: 244162 - DNA, 258 bp, Homo Sapiens
gaccactttatatattcatttgccccttcagcatggatggcttacacctgtaatacgttccagaatagctggactttcttttgttttcccatcggtgattttcatagagtagatgctcaatgacatataatgcagaaaggccacaaatagaggtaagtaaagctatgaaagaaaagaagaacgaaagaggaagcagagtagtttgattttgtttattgctgcttaaaccagagagatatttattctcggaagggtggt

SEQ ID NO: 244163 - DNA, 261 bp, Homo Sapiens
gatcgagctcggtaccaggctatacaccctataccactactaacccctagtcacaccattctactttctgtctctaggaatttgactattttaggtagctcatgtcggtggtatcagccagtgtttgtctttttgagtctggctgatgtcatttagcatgctcatccattcaaggttcatgcttgcagcaggcgtaaacacttccttccttttaaaggctgagtaatattccattgtctggatacaccgcggtggtatagt

SEQ ID NO: 244164 - DNA, 144 bp, Homo Sapiens
catcgagctcggccctgttacacccacggcagatagggaccaaactgtctagacgttctgaacccagctcacgtaccactttaaatcggcgaacagccgaacccttgggaccctgctccagccccaggatgtgatggtggtata

SEQ ID NO: 244165 - DNA, 1200 bp, Homo Sapiens
gggattcccagtgtttttctcttttgtaatctttataggtggccaaattacaattctagacaatgagatgtttgtggaagtctgctgagtttgggagatgtagtatcctgagaaagctttcactttcctgaagaaaaaaaagaccatggatggtggaagccaccccctttcccctcttcttgccttgaacaaaggtgcgaaggctaaaactgctgcagccatattgcaaccatgaagtcaatgtcgagagaatcacagaaatgatggccctgctgttcttgagctattgaaccaacaaagttactccacaggatccgctgaacataggatgttgccacaaaatctacctcgtgtatttttctctttcactcatgagctgcacaattgcagatttgagcacaatgtctgcagactgtgttgaaaaactctgaagaacctaattaacacaggatgacctaggagtgattctaagtctgtgtaacaagatattactcattagtgaatgtgtcagtcttggtactgaatgctgcagataacagcaagtaggttctcctttatttctgaagtattcacttgaccttccatcagtaagacggacttttctaatctgtttctgggagatattaatgggaatacagtcatgtccactcaagacgagaggcagatcaatactgaatatgctgtgtcatttgttggaaacagttgaaactgttttatgaacagcagttgtttactgacatagtgttaattgttgagggcactgaattcccttgtcataagatggttcttgcaacatgtagctcttatttcagggccatgtttatgagtggactaagtgaaagcaaacaaacccatgtacacctgaggaatgtcgatgctgccaccttacagattataataacttatgcatacacgggtaacttggcaatgaatgacagcactgtagaacagctttatgaaacagcttgcttcctacaggtagaagatgtgttacaacgttgtcgagaatatttaattaaaaaaataaatgcagagaattgtgtacgattgttgagttttgctgatctcttcagttgtgaggaattaaaacagagtgctaaaagaatggtggagcacaagttcactgctgtgtatcatcaggacgcgttcatgcagctgtcacatgacctactgatagatattcccagtagtgaccattta

SEQ ID NO: 244166 - DNA, 201 bp, Homo Sapiens
taatcgagctcggccctattcacctgcatggtaggcagtttgactggggcgtctcctcccaaagtgtaacggaggagttcgaaggtacgctaggtacggtcggacatcgtgctaatagtgcaatggcataagcgtgcttaactgcgagactgacaagtcgagcaggtacgaaagtaggacatagtgatccggtggtatcag

SEQ ID NO: 244167 - DNA, 182 bp, Homo Sapiens
gtggtaagatagggccttcctacagagcagcaagagtaggccaagcagaaagactgctgaggtaacacggaccccagcccctgtcagggcctctgccaaggaaataatatggaccatttacctggcaggcagtctgctctctctcaggatcaccacgcatctcaggattggccttatccgag

SEQ ID NO: 244168 - DNA, 792 bp, Homo Sapiens
aaaccaggaatattagccctactgccaacggagctacagactgcattcactagcagagctcacttggccactcatgatgaactaattgccaagtcataccaaggaagtcaaggacgagcatacctctttaactcagtagttaatgtgggctgtgggcctgcagaagagcgagtgtagctaacaggactgcatgcagtcgcagccatttactgtgaaaactgccaaaccactctgggctggaaatccgaacatgcttttgaacgcagccagaaatcatcaagaaggcacctacatcattgaactcagcacacatgatccaggacaatggctgggactgattggccagcatctacccaacccagtgtccacgtgaacgccattcaaccgaacattcttcccaagcgtgagagagtgactgacacttggttccatccatttaggggccttgccatccggggcatcctcccaccctgacgccatctttctggtgaccggcctctaaatcgctgtctctctgtctctttttctttgtatctgttggtgagttgatcctggcttctctctctgttctagttttggctgaaaacaaaacaacaaaaggaacagatccttgaccgcatggcggcagcccaccttggtaagggccccagggcccatgcgagagctgcctgatggcctcttgtcaggagagcagtggcacgggggcgtgaagaagagggaaaggggaaactctaagggtcctggcgcggggaaggggtggaagggtggaggtaggaaccaagttatgttata

SEQ ID NO: 244169 - DNA, 811 bp, Homo Sapiens
ggattattcccaccctgggggattggttgggtattttttggaccaaaggttcaagttagggggggttgtttgtccccagtggggtaacgattcaggggaccgtgtacaggtttatgccattcggagcaacaagcttcccacagtgtctcaccacagtttccagatttgagtgaaattcagactcacagctgccaaaatgaagaggaggctggaagccgtagggcgtgcggctctcccaatataaagcatgccacccactccgcaccagttacgctcgtactctgtccccaaaggagtgtgtggccatttgccagaggttgtgtcaccaacatagaggggtacagagaggctttttgaggacgggaacatggtgtgtatccggacactgacattgacgccaggactttgtcaagatcaccacacccctctgtttattgaagtcatggaaggcactgtggcccaagtccatctctagtgggtccagtgggtctgtaggtctgccctgtttattgggatacacattcttagctgccagctgaatgctcacattggctccttggccggaggagtaagggttgttacggcagaaagaaccaagtgagagcctgtggaacttcctccctccagcaagacagtgagcctgatagaaggagtgctttgcttgaggaattgcagaggttaacaccaacatcagagaccagggaagcaggtgtggtggtttccatctccattagattcaccttcctggcctttgcaaaaacaaattaataatggccgtgggtgatggactgcagtcaacttgaagaggccc

SEQ ID NO: 244170 - DNA, 718 bp, Homo Sapiens
tagccacgatgccgttagtggactgcatggctttacggatcggggattaggttcgattccgagagggagcctgagaatagctaccacttctacggagggcaacaggcgcgcaaattgcccaatgtcaaaaaaaaaagatgaggcagcgaaaagaaatagagccgacagtgcttttgcattgtcgttttcaatgggggatatttaaacccatccaaaatcgagtaacaattggaggacaagtctggtgccagcacccgcggtaattccagctccaaaagcgtatattaatgctgttgctgttaaagggttcgtagttgaattgagggcctctaaggcgcaatggtttagtcccatccacttcggattggtgacccatgcccttgtggtccgtgaacagacatattcagaaacaaaaaacacgggagtggtaccttttctgattatcgcatgtcatgcatgccagagggcgcccgtgattttttactgtgactaaaaaagtgtgaccaaagcagtcattcgacttgaattagaaagcatgggataacaaaggagcagcctctgggccaccgtttcggcttttgttggttttaaaagtccattggagattatggggcagtgtgacaagcggctgggtggttattccacacacacgcacactccttttttggatgttgtgtcttctgtgtgtgtgcactcgtgaatcctcgagagcgactca

SEQ ID NO: 244171 - DNA, 486 bp, Homo Sapiens
  misc_feature (38)..(38): n is a, c, g, or t
  misc_feature (231)..(231): n is a, c, g, or t
  misc_feature (263)..(263): n is a, c, g, or t
  misc_feature (382)..(382): n is a, c, g, or t
tatttattgggcatttaattgtaacccaggcaaagtcnagcaagaaacggcctggagcaagtgccccaagagcactcactcactctccctaagcaaacaggctcagaactctctcacaacatgtcatcctctttcccactcaaaactcccacccccaaccttcctggaaggcagggctaacaggacctcctgcctgcctgctcatgactgattactttcaatcccagctgnaatgcaaactgaaactcattctgtatatcacnactctacaggagaggtctatttctggggcacccagaagtcagcacacatactgctgggacccaggactcgtaattcgccttggtccaactccttctatgggtttagctgccctcattcntgtgggtaatacaagatcaaacagtccacaactttgcctgtcttctctgctcccctaaggccctctcccttcgccgtaagatgtgactgaccagtacagtttct

SEQ ID NO: 244172 - DNA, 992 bp, Homo Sapiens
gttgtcgtgttctcacagtgaagggcgtgccctgtgtgccggggtccatggtgtcatatgcagtgacacacactgtcaagcgccatttccctcaccgctggagacttactgttaggtgcctgccctcagtatagacgtatccaatgggaaaccagcggacctgcccagagcagggaggtgtcgtggaactgggtagaccccctgcagcgttaggggcccatttgtgggctcgccaccttcaggcttccccagccatgacacttcagccccgccacccatgcctgtctgctgcagccatccttgcactctccagcgacactctcgcacctccctaggggaagcttccctccccctgggctgctgctctgagcccgtctgttctccccctgcaagaaggggcaatgctcttgtgttgtccctctgtctggacgcgcctggccactccgaaggcttttcaccccattatggccaaatagtatagggccactggggagggggaagggaatcattttgtgttcatttttgttttctgtttcacctaaaccagcataggattgataggggagacggttggcgggcatttccgtttctatgtgactatgtgaccaaggcagcaggggcttttacctgctaggcggcagtcctttggccctgagaatttgggagagaacagtgcatcaggccaggctcagcaatatgtttgctcacattctttcagccttctgtcacccccctcaacaccaaactttcttccttgtgagcagaaggttggctgctgttagcaggatcccacagtgataaccaggcccttcccttcctaagccaaaacccattgtgactgcctgtctctcctgtctctgacttctcaggcagcctcctgagtgcactgagttgtatccgagagggtgggaacagcagcatcccctaattgcagtacacggttccttttccgcccgccaccctgccttttacgggggcagctgtctcccgga

SEQ ID NO: 244173 - DNA, 336 bp, Homo Sapiens
cgctgatccgcttaagcacaccaagggcacagccttcaatacaatgagagctgatgctaagcaagcactcgtcaattccccctcatgccatgacacagacatgagcatcacagactcttcctgtcctctggctgccttctgaggcttgtggctttccatgatgaagaatggaaatcatgacacaacagtggcaacaggcttttagtatcatctagaaacctcccctccctcacagggaaagaaaacatgagccagtgttttcctccttgtcttctgaggtgctccagtagatgccccagacaggagagctgaaccttcccttaagcgaatcagcgg

SEQ ID NO: 244174 - DNA, 432 bp, Homo Sapiens
gtaccgctgatccgcttaaggtcagccaagcagtactgggatggagttttaatcatttcttctagggaataccttaagttgtttattgagtttcagtgataaagaattgttttttctccacaatgcatttctgggtattgcattacatgggaatactatacttctaatatgttccttaaaggcttggttacctctgtagcattaacagagacaatactgctgcttctgggaacctccttgtagtccacatctatccactattcaccaccttttcttggcacctattgagcaagtttcttgtatgtgtaacatcccgttacattgattagcctcctctccttccaccacttgctagttaggatgtaagttcagctactgtaacgaagacccgaatttacaatggcttaagcggatcagcggatcctctaggtc

SEQ ID NO: 244175 - DNA, 536 bp, Homo Sapiens
cctcatgctgtaaggctgggatttgaaaagccctttatttggggagttaagggtttttttagagtcaggcctcactctctttagcggatcagcgctgatccgcttaagcacaagtcccattaatagtagcagttatttgggatataacagtaatgcaagaagtaactctttgagattaagtttgatttggtgacctgacgaggtgaccggcggcggagtaacacactgtgatataatggtatggacggataaacccatagcagtagttttagcaaggactagaagcctttcctctctaagagagaaaggaatgtatgacgtgcagtccactactgagcctaccaacttgatggccatcattttttggatagcagcatctttattagaatcagattatgaatatgaatacctcctggctctcaggcttctccaacaaactgcttatccatttgcctttggataaatcagagagtcgagagaagattgaaaatgtacaaagcaaattgaaatggactaatgtttgccagtactcagca

SEQ ID NO: 244176 - DNA, 537 bp, Homo Sapiens
gctgatccgcttaaggtggaagaatgcaggctgcacctagtgaatgaaactcaagacatcgtgacgtgccaatgtactcacttgacgtccttctccatattgatgtcacctttttgtcccctctacaatcttccccgttgtaaaatggatcacctatgtgggactgggtatctccattggaagtctcattttatgcctgatcatcgaggctttgttttggaagcagattaaaaaaagccaaacctctcacacacgtcgtatttgcatggtgaacatagccctgtccctcttgattgctgatgtctggtttattgttggtgccacagtggacaccacggtgaacccttctggagtctgcacagttgctgtgttctttacacacttcttctacctctctttgttcttctggatgctcatgcttggcttcctgctggcttaccggatcatcctcgtgttccatcacatggcccagcatttgatgatggctgttggattttgcctgggttatgggtgccctctcattatatctgtcattac

SEQ ID NO: 244177 - DNA, 427 bp, Homo Sapiens
  misc_feature (416)..(416): n is a, c, g, or t
gagctcggtccccgctgatccgcttaaggtcagggagtgctagagagtttctgtatggcaggcaagaattcttccttttgaacaagcccgagaaacctcaggacaaagagaaagtatatcttttaaaaactgatttcatagtaatgtttctacatattttgaagcacctttaatgtatttagagcatatcaaattaattcattttcttttccctgttaataaaaaaggtacattcacagaatcagtgtacttagaataaaaaataaacagaggaaataagaactaactcgagttaatgaccacatctttaaggaacaagtttggtcatttaaaaactaagtcttgttttgttttgcttgtttttaattactcctttcatacttaatatttcaaatatagctgcgtaagcgatcagncgggatcctca

SEQ ID NO: 244178 - DNA, 589 bp, Homo Sapiens
ttttcttaagcgcacatcttcttataaagaactaatgatagatccttatctattagagatcaaaggttcctgcagtcgagtgggttttgaaatcatcagtttattcattttcacagcagatattgctgattaccaggtgctatataaacaaaaaagtcgaacatgcccccatcttcataaaactttgaatctgaaaatcaacactgagcaaataattccaagtatactgacatgtgacaaatatgtgaaaagtagtgaaggagcacatctaagttcctatatgaacttgcgtatcaataagaaaatgattgtagctttttctgtgggaggagcacatgaaaaatctatgcaccacgaatgatactcttattccatggtcatcttaggataattgtaccttttcaggcacttgacaagtattgtatacccactgtgtgtaagttagagagtattcatggcaaaattagtcaaaacaactacagcaaacgcttactgcacctctgtcttcatcagccctaaattgccttgttattcattatcctgttagcccaattatctttgcctaagcgatcagcgggtcctcaggtca

SEQ ID NO: 244179 - DNA, 410 bp, Homo Sapiens
agtagtgtaacgatgttctcctagttccaaatttagtacactactgagatcatacctatttcaaggtatgttattacactgattaatgatggaactgctgcattctgaaagtcaagttttaaaagtgtatttgtcactcttaactcacatctggctttacgtgccacaggatacctctgcagacttctcagcaggttgcttaggtaagcatttgctattcaacaagattctgactgcgatcatcatcagggttatggcaaaggttaaagctctgattttactgaggtataggagtaaagagagtgatgaggatgagggtaacagtggaggaactgaagaaatgggtggaaggggaaaagaggtccagaagattattgcacataaggtatggcaggagtcctcagatcatg

SEQ ID NO: 244180 - DNA, 451 bp, Homo Sapiens
cgcgtaagactgtttcctaatcgtctgcactgctcctctattccaccctgcatacgctgtgacagatcaatcttctccgagcacaattctgctcacttcatttacttgctctagaatctttaataaagtccatatttctcagcctggcattcaaatactcttcccaatttatactcaactgacacttattccaccttatttcccactagtctctgccaaacacctaaagcttcaatcaagtagaaacctatgcttttatcccgaggcattttgatccttctcatcacttcaactttgtattgagaagtgacgttcttaactcttcccactaccatctatgcttactcgaattctaattaccattaatacaaggcccagatcaatgctgtattcacacaagacgcctcagcttctctctcctccttaagcggatcagtaagatcctgctaga

SEQ ID NO: 244181 - DNA, 936 bp, Homo Sapiens
agttctaccccacgccagacctacccgggcgaagcgggcgagcggtggtttggacgccggcggagacgcgggcgagtggttagcaggaagaagatgagccttaagtctgaacgccgaggaattcatgtggatcaattggatctcctgtgcaagaaaggatgtggttactacggcaaccctgcctggcagggtttctgctccaagtgctggagggaagagtaccacaaagccaggcagaagcagattcaggaggactgggagctggcggagcgactccagcgggaggaagaagaggcctttgccagcagtcagagcagccaaggggcccaatccctcacattctccaagtttgaagaaaagaaaaccaacgagaagacccgcaaggttaccacagtgaagaaattcttcagtgcgtcttccagggtcggatcaaagaaggtgcctccagaatgagttgagaagataaatgggatcagattgaaaagtacatcatgactcatctctataaatatgtgttctgtccagaaactactgatgatgagatgagagatcttgccattcaaaagaggatcagagtggaagctgctctgtggtgtcagaaagacaaggaatgtggtgacctcacctatccatctccctcaaggcagcttttgagcccttcactgggttacacctcagatgctgcgtgtccctgttaatgaagacatcccagaagtgtctgatacggtgttgaaggcaatcacagggattgtgctgcattctgactcagattctgccatcaaaaacagaatgccctgatccttagaggcagaggcagctcttcagcctatgggcttaagctcttggactcactgaggcagtaaaagaaccatatcctgtgtttgaatcaaaccccgagttcctgtatgtttagaaggtttgccagacaggaattcc

SEQ ID NO: 244182 - DNA, 251 bp, Homo Sapiens
gaatgaacttctatcacaaagcatgagataagttgattaagttgataagctctatccctgtaacctcccatcaacaccaccaaatttcttggcctcaattcaacttaagcctctgccaattatgttcctgcagcaacataataatatattcctaagattgcttcatgacactcacagcaatttccatttgttatttagcatgtcattaggagccaatgagatagtcctacactctgattctacctaagcga

SEQ ID NO: 244183 - DNA, 506 bp, Homo Sapiens
  misc_feature (137)..(137): n is a, c, g, or t
acaagctacttatctatggagataattgcattaaaaataattcacagcatgagataacttcaatagatgtactttgtgtcatgctcatggattactttagaacaagcagagtcattgagtggttacctctgcatgtntggagtggactcacagatgaacccttaatgaataatgtgtccggggttttttagagagagggagcactcttaagttaccactttgagacagctcttaacatcttagtgaccatttgtagttttctttttatgaggaacccatgcttctatacttgggtggacaatcgagcttagtgagaagtgacttcccttcaaattccaacagcagacatgcattgtcatgattctgtcttctttttagtgtggtttattgagttcagcagttctcatattctgtttaaataggtacagcattttcaagggcacagatacagagaagctggctttctaggtattgggcttccaagccaagagttttgtccttccacc

SEQ ID NO: 244184 - DNA, 561 bp, Homo Sapiens
taatctgcacggcagagaaatgtggtttatctcatggtgcttagcctgactcccaaactacttaagcggatcagcgctgatccgcttaagtgacttttgtgtctggaaaagaatcagcagatgcttctgtctctggagactgagtgaactgcttcaggatactggtaacgatgttttctgctacggtttcatgtcatggaatccccttgcagagaaccagtggcatcactggtgcccaacctgaaccgtagctctcttgcttctgcctctctaccggtcccaccaccagcatccttcacaggcgtctgcaaacctttcgggggcacctctgctcttctgtcctgggatacttctagactaatcggcacctctctctctcgcaccctcatctccttcggtgatccttccccttacccttccccttcatctgctggctttctctctgtctcgctcccttatctaacttgtcaattctcccatcttaggtttctctcctcgaagccttctctttagaatcaaacattttctcttctgctaacggatcacaggatcctctagatc

SEQ ID NO: 244185 - DNA, 367 bp, Homo Sapiens
gcttaagcatatgtgccaccactgttttcctatgagtccgatgatatgcagtcagtccacagaatttttaatactttctgtagtaattgctctaactcaaccaaggaataatgtagaacctaaaggcagctgagacgtaatgaaaagaattggacttaaattcagaaggttgaggcaattccctagcccagtttttcctaacagcttagacctttcctaatacacgtatgccaatacttaacagagcccttgttagaactggcatgatgtatggggcagaatagtctacacaccaatgtaaagctcttctatagaatgttgttttgaatccaaaacgtaaaacgcaaattacaacgcagccttaagc

SEQ ID NO: 244186 - DNA, 730 bp, Homo Sapiens
gctctagaggatctgcaatatatccggctatcccaacttttctgtcataaaaagcattaattgcacagttaccatccacacaaatacatagtttttctgacttcacatttattaagtgaaatttatttcccatgctgtggaaagtttattgagaacttgtttcataaatggatatccctactatgtctgtgaaaacatgtcaagtgtcacattagtgtcacagacagaaagcacacacctatgcaatatggcttatctatatttatttgtaaaaatccaagcatagtttaaaatatgatgtcgatattactagtcttgagtttctaagagggttctttatgttataccaggtaagtgtataaaagagattaagtgcttttttttcatcacttgattattttctttaaaatcagctattacaggatatttttttattttatacatgctgttttttaattaaaatataatcactgaagtttactaatttgattttataaggtttgtagcattacagaataactaaactgggatttataaaccagctgtgattaacaatgtaaagtattaattattgaactttgaaccagatttttaggaaaattatgttctttttccccctttatggtcttaactaatttgaatccttcaagaaggatttttccatactattttttaagatagaagataatttgtgggcaggtatgtgagggctcgggggattcctctagag

SEQ ID NO: 244187 - DNA, 557 bp, Homo Sapiens
  misc_feature (156)..(156): n is a, c, g, or t
  misc_feature (172)..(172): n is a, c, g, or t
  misc_feature (333)..(408): n is a, c, g, or t
acctagaggatcccggctatcacatatcccagtggcagtggattcgtttattctgctgagctggctaagctatcagtcctgttattttccaacctctataagaatatcatcagagccaagcttatttgcccagccaagtatatatattctacatantgtgagccttcagggntggggcttgcgcccttaatttccctgctacagagactgtggctgagctgggttttggtgggtactaagtatatactagtttacttgttgggtgtgtgttgataatgtgatagccggctatcacattatctttgggctgaaatgtatgtgtggaggtatgtnnnnnnnnnnnnnnnnnnnnnnnnnnnnnnnnnnnnnnnnnnnnnnnnnnnnnnnnnnnnnnnnnnnnnnnnnnnnttggtctttgttgctgaatgatgcttggggtgtccttttctctttgtggttgtgtatcgactgtaacgaagagcagcgcctacgcgcctggtggggattgtttcggttcgcctccttttctttctacacagcggggataatgtatagcc

SEQ ID NO: 244188 - DNA, 651 bp, Homo Sapiens
  misc_feature (184)..(469): n is a, c, g, or t
aatggctgttcagttacccttcgtagtaaccctatgtcttctctttatagttaagaaaactgaaccttagagaggtgaagaattcgtccagggtcataaaactagcaagtggcaaaattgagatttaaacactgctaggtgttaccttaggatctaaacttttaaccattactccaaagtacannnnnnnnnnnnnnnnnnnnnnnnnnnnnnnnnnnnnnnnnnnnnnnnnnnnnnnnnnnnnnnnnnnnnnnnnnnnnnnnnnnnnnnnnnnnnnnnnnnnnnnnnnnnnnnnnnnnnnnnnnnnnnnnnnnnnnnnnnnnnnnnnnnnnnnnnnnnnnnnnnnnnnnnnnnnnnnnnnnnnnnnnnnnnnnnnnnnnnnnnnnnnnnnnnnnnnnnnnnnnnnnnnnnnnnnnnnnnnnnnnnnnnnnnnnnnnnnnnnnnnnnnnnnnnnnnnnnnnnnnnnnnntaaataaactacataggaaataaaactacctggaatcttttcttttacaaaatcaatatgacacacatatcggtacttgacaaagacaacatgaaaaattttataagttacaggcatgagccactgcacctcactttacaagtacattcttaagtgaaactggcttttctccctacctcgca

SEQ ID NO: 244189 - DNA, 686 bp, Homo Sapiens
  misc_feature (97)..(392): n is a, c, g, or t
tgtgtttttgccttggtccccattatgggatgcattaggactggcctatgcatcgaaaatctttttgtttgtaaacgtttaaaaacaaagttccccnnnnnnnnnnnnnnnnnnnnnnnnnnnnnnnnnnnnnnnnnnnnnnnnnnnnnnnnnnnnnnnnnnnnnnnnnnnnnnnnnnnnnnnnnnnnnnnnnnnnnnnnnnnnnnnnnnnnnnnnnnnnnnnnnnnnnnnnnnnnnnnnnnnnnnnnnnnnnnnnnnnnnnnnnnnnnnnnnnnnnnnnnnnnnnnnnnnnnnnnnnnnnnnnnnnnnnnnnnnnnnnnnnnnnnnnnnnnnnnnnnnnnnnnnnnnnnnnnnnnnnnnnnnnnnnnnnnnnnnnnnnnnnnnnnnnnnnnccaagttcccactggtgatgcctgtctgacacgttttggtatttagtaggaaatgaagtgtttcgaagcttcgagagaagcttcaaaattgtcacaattgctgaaaacagaatgaatcgtgaacattatctcaatattttgtataatagacaagaccacagtgttttggttccctgacctgtttttgtgtttatgttaggatctgaatcatgttctgggtaaggggacgaggagcgaacactgcactaagatttggtttgccaaatcagattctttggtcaagagtcagtttgg

SEQ ID NO: 244190 - DNA, 1100 bp, Homo Sapiens
  misc_feature (140)..(435): n is a, c, g, or t
  misc_feature (730)..(930): n is a, c, g, or t
  misc_feature (1025)..(1030): n is a, c, g, or t
  misc_feature (1033)..(1034): n is a, c, g, or t
  misc_feature (1063)..(1064): n is a, c, g, or t
gggatcttgcatttttctagggaatattttgtagttgtgtgtgtgtgtttttgccttggtccccattatgggatgcattaggactggcctatgcatcgaaaatctttttgtttgtaaacgtttaaaaacaaagttccccnnnnnnnnnnnnnnnnnnnnnnnnnnnnnnnnnnnnnnnnnnnnnnnnnnnnnnnnnnnnnnnnnnnnnnnnnnnnnnnnnnnnnnnnnnnnnnnnnnnnnnnnnnnnnnnnnnnnnnnnnnnnnnnnnnnnnnnnnnnnnnnnnnnnnnnnnnnnnnnnnnnnnnnnnnnnnnnnnnnnnnnnnnnnnnnnnnnnnnnnnnnnnnnnnnnnnnnnnnnnnnnnnnnnnnnnnnnnnnnnnnnnnnnnnnnnnnnnnnnnnnnnnnnnnnnnnnnnnnnnnnnnnnnnnnnnnnnnccaagttcccactggtgatgcctgtctgacacgttttggtatttagtaggaaatgaagtgtttcgaagcttcgagagaagcttcaaaattgtcacaattgctgaaaacagaatgaatcgtgaacattatctcaatattttgtataatagacaagaccacagtgttttggttccctgacctgtttttgtgtttatgttaggatctgaatcatgttctgggtaaggggacgaggagcgaacactgcactaagatttggtttgccaaatcagattctttggtcaagagtcagtttggnnnnnnnnnnnnnnnnnnnnnnnnnnnnnnnnnnnnnnnnnnnnnnnnnnnnnnnnnnnnnnnnnnnnnnnnnnnnnnnnnnnnnnnnnnnnnnnnnnnnnnnnnnnnnnnnnnnnnnnnnnnnnnnnnnnnnnnnnnnnnnnnnnnnnnnnnnnnnnnnnnnnnnnnnnnnnnnnnnnnnnnnnnnnnnnnnnnnnnnnnaggggggagggtttcagccgaagctgaagattcgcgcccactggcactcccaagcccttgggtggcccgaaaatggaaaactcctggtcctcccnnnnnnagnngggcgccagaaaagaagcacaacgaacannaaaaaacatggtttccggggccccgccctcttcccg

SEQ ID NO: 244191 - DNA, 311 bp, Homo Sapiens
cgggtgactctacaggatcttccaggtagacctaactaatacaaaataggtgatgaacctctggttttaccataatgcaatgtgccacggaaagtttgggggaggtttttaatgtaattgcactctggttaattggctcgtaccaagccctgccttatgacttgtggtaagcttcaaggagttccactgatgcaaaagggtcttttcctagcttcctggtctgatcagtgctatgagatggacagataagtgtgaatgttttatacagaatatggaaatgatacatttctcttgttagactacctggtgag

SEQ ID NO: 244192 - DNA, 199 bp, Homo Sapiens
ccaggtagacctaacccagggataggtccccaaagtggggagaagtggagcaagggggcagtcatatagtttgcctgaaaccaaataaaatgcttctatttttatattctgagatatgtacaaatattgatgactttccgaatttatccaatcaacatgttattgagtatgtgtcagttaggtctacctgggggatcct

SEQ ID NO: 244193 - DNA, 442 bp, Homo Sapiens
acgttttcacttcatttattcctttgaaacaagtcacttaatacagcatttagatatttaaagtcatacacctcataaataaaatcaatgcatcttaatgacaatggcaaaatcacataagagttgtagaaaatgaagttagacatcttccaggtagcagcagtgtattacttcaaaaaaatgctggcaaataggcaaaacatttttaaaacaagaaaacactgtccatctgcattaagaaaaaatattttcttatgctgttttgcccatccctactttttcaagtcatattctaaagctctaatttgacggtctttacttgtggttttctttttgcgttaggaacctctgtctctactgcattaatacagaaactataggaatattggtgttctctaacccttttcacaaactattcatattcattctgtatttaggctga

SEQ ID NO: 244194 - DNA, 289 bp, Homo Sapiens
tcgaagctcagtaccccaaggtagacctaacatacagataagaaatgtcatttactgtgatactgtgtactggctaccaggttaactcagagcacgtttacaatgattggacaagggcattgggaagagcatcattttaacagctgctaaatgatggagagaatgctcatgggagcatttcctctagaaacatatccattaagattcctgcaaacatacacacaagttttatatagagcattctttgggaatgctcttaacttcagtagagtgacctattaggttagtc

SEQ ID NO: 244195 - DNA, 303 bp, Homo Sapiens
gagggtgactcccaggattaccaggtagactaactggttgaattgttataggagcctgggtgagcagaatatttctctatcacacaaattcccaaaagtttcacagtctctgcattcttttctgtttctgataagaaaaactggttgccctcctctagtagctgggcttatttattcatgaattaaccttccatcatccacagaaaaggtaaaatgttattctttcctcatgcttgaacatgcttcaagttaggattctgagttttttaatacttcatgtagatcaagtgttagtctacctgg

SEQ ID NO: 244196 - DNA, 311 bp, Homo Sapiens
tgttgactcatttcgcttttttatttctttcgtttccacgcgtttacttatatgtattaatgtaaacgtttctgtacgcttatatgcaaacaacgacaacgtgtatctctgcattgaatactcttgcgtatggtaaatacgtatcggttgtatggaaatagacttctgtatgatagatgtaggtgtttgtgttatacaaataaatacacatcgctctataaagaagggatcgtcgataaagacgtttattttacgtatgaaaagcgtcgtatttatgtgtgtaaatgaacgagcgtacgtagttatctctg

SEQ ID NO: 244197 - DNA, 725 bp, Homo Sapiens
  misc_feature (37)..(37): n is a, c, g, or t
  misc_feature (102)..(102): n is a, c, g, or t
  misc_feature (144)..(144): n is a, c, g, or t
  misc_feature (154)..(193): n is a, c, g, or t
  misc_feature (598)..(650): n is a, c, g, or t
atctttaaactgctgaataccgaagaaaccctctccnccctggggcatccccacggtggatggcaatggctgggaagttctgctcccactagttagctgggnccaaggcaatgcaccgctgcacagacttcacaaagatcaccnacctgttgtnnnnnnnnnnnnnnnnnnnnnnnnnnnnnnnnnnnnnnnncatggtgtgtgagagacattacgtgggagaggggagtttctagtaattacgttctcaggaattcctcttcatttctcttattcccccactatatatttagagcagaaaaggaaatataactttatttcagcactgatttttccctaaggaagctggcctctgaggtagcacagagttcagaaatcaaaattgtcagacatgctaggagatgaggatgagatcacctcatgaaaaagtgataaaaaactagaattaagatctggaggggtaactgatattcctgctcaccaaaacattaaacctaagggagctatcctaattctagaaagcagttttaaatgcaaatagaccactcacaagtatattaattaaacacttttttgagatggggtctcactctgtccnnnnnnnnnnnnnnnnnnnnnnnnnnnnnnnnnnnnnnnnnnnnnnnnnnnnntgggtttaagagatccttccacctcagcatcccaagcagctgggaccacaggtgcacaccaccacgcccagctac

SEQ ID NO: 244198 - DNA, 374 bp, Homo Sapiens
  misc_feature (162)..(184): n is a, c, g, or t
tgttttcggtcgccgttgacagcgctttggctaaccccctgaggctatttgagaatgtcaggggcatttgccttacccaggatcttttgtcaggaacctttagccccaccaaacacaattttgaataggtaacagccgggttttagggaatttgtctgtttnnnnnnnnnnnnnnnnnnnnnnngtccgacttactttattttattttcttaacctagtcactgtttacaattgtatgctaaagcctggaatattgtctgtgctgtggtgtatgagcattgccaactttatatttattgcagctgaagaagaaactaaaaactatatggtaatgaggagcatgtccaagctcctaaatccgtggggtaggaggt

SEQ ID NO: 244199 - DNA, 763 bp, Homo Sapiens
acctcctaccccacggaggcgcacgggagacctcaggcccagactccactccccagctgtgaaaggactgctggccagacccccaagctagcccgccaggcctccatagagctgcccagcatgactgcgtccagtaccaagagttggtgggagacgggtgaggtacaggctcagtctgcggccaagactccgtcctgcacggatattgtggctggagacatgagcaagaaaagcctctgggagcagaagggaggctccaagacctcatcaacaattaagactctttggcagttgcactgggtactggctgagttctggaaaacaggaatgtgagcagagtgctgcagatctccttgtcaggagcacctaagaactggcatgactctacaccctctctccttctgcaatgacctcgtgtcaagatggcagacctgcagagatgaatgtgcctggatacctgagtcaccaggtggaggaaactcccattgacatgcatcacactccacatatgaaacccttctttttctgcactgtcactggggttagggattattactcactgcaacttagcctagcattaagttgcttgactaatacaagtttcaataaatgtcgcttcatttcccatggcttctgactgaatgctgtgcaatatccacaaaccatccagattgtggtttataaataccacccttcactaaaaggactcagagctcttgtagaaatggctgatgtaaggcgtggaaggaggtaccgagctcga

SEQ ID NO: 244200 - DNA, 559 bp, Homo Sapiens
ggaaatgaagcgacatttattgaaacttgtattagtcaagcaacttaatgctaggctaagttgcagtgagtaataatccctaaccccagtgacagtgcagaaaaagaagggtttcatatgtggagtgtgatgcatgtcaatgggagtttcctccacctggtgactcaggtatccaggcacattcatctctgcaggtctgccatcttgacacgaggtcattgcagaaggagagagggtgtagagtcatgccagttcttaggtgctcctgacaaggagatctgcagcactctgctcacattcctgttttccagaactcagccagtacccagtgcaactgccaaagagtcttgcaggatggagtcttggccgcagactgagcctgtacttcacccgtctcccaccaactcttggtactggatgcagccatgctgggcagctctatggaggcctggcgggctagcttgggggtctggccagcagtcctttcacagctggggagtggagtctgggcctgaggtctcctgtgcgcctctgggcgcctgcgcccgcgctgtgcccc

SEQ ID NO: 244201 - DNA, 518 bp, Homo Sapiens
ggtaccaccttctccccacgggggagattttatggggctctcggactgctttctattttggatgggttgaaagaatttgttaacttttagccactagaatgaacttagttttaggcagcatttatattctttttagggttagaggcagattttacttggctatttttttcaagaaaagatagttaatatccagcttcagtcttcctaaattagccacaatttattttgcttgaactctaacaaaggcttgtgtgttgctttcacctacgcattcagccctatgaaaggctcgttgaaggttaggttgagaaggctgactataggacttggatcctaaaaattgtatttgtatttttctttccctagagtttgctctccaaagctcggggaattgattccagctctgttaaactccggggtagttctctcttcatggatacagaaaaatcaggaaaaagggaatttgatgtgcgacagactcctcaagtgaatattaatccttttactccggattcttg

SEQ ID NO: 244202 - DNA, 762 bp, Homo Sapiens
ggggcaccataatcagtatgagccaacaatatttaaacttgattcaggccacattcagacatttgctcttatatacaaatatttaaattaaatacaatctgaaatgtgttctgttacatacaaaaaaggaaaaactatacaacgcagagcagtgtgtgtgttttaaataattacatttacatgtaagctaaatggaaccagcaatggtgctcaagtttttatcatcccttccagaaaatctttttctaccatctcttctattttttgcctggcttgcgaacatggtttgtggttctccagtttcatgtccttattagggaaggcatttgagtagaggataggactccctgagtgtcctccacatcggcttgtgactttgctgttgaagacttgactgagcacattgaagaacggcaggagctgctccatactgcgcacggtgcagatggtgagcagcaagtgccctggctcccaacccaatgttctccctgagttgtcttcctctggatttttctgcagaaaacaaaaagtgaactggtattaatacaacagacaatgtggtatgttagaaaaattaaaaatatataaactttggcagttggtcaagaaatgaatacaaatgacattaagtttctaactcctgacctgatcaaaacccttggtgcttctgagaccttttactgccatttattagttttacatggagcagtctaacattgtagtaatagttcccaactagaatgcgcagattagcttagttaa

SEQ ID NO: 244203 - DNA, 1064 bp, Homo Sapiens
  misc_feature (33)..(33): n is a, c, g, or t
  misc_feature (75)..(91): n is a, c, g, or t
  misc_feature (867)..(867): n is a, c, g, or t
  misc_feature (869)..(871): n is a, c, g, or t
  misc_feature (875)..(875): n is a, c, g, or t
  misc_feature (884)..(884): n is a, c, g, or t
  misc_feature (890)..(890): n is a, c, g, or t
  misc_feature (893)..(935): n is a, c, g, or t
agcgaggcctgggtgggcgattcggcacgaggntggcggcggccattttgagccgctgccgccattggagtgggnnnnnnnnnnnnnnnnnttcgcctcctgacaggaaaggtttaagggggacagagccctgggaggccgggccgggctcgggggccaccccgggggcccgggccatggatgtgcgccgtctgaaggtgaacgaacttcgcgaggagctgcagcgccgcggcctggacactcgaggcctcaaggccgagcttgctgagcggctgcaggcggcgttggaggccgaggagcctgacgacgagcgggagctcgacgccgacgacgaaccggggcgacccgggcacatcaacgaggagatgccatggacaatattaccaggcagaaccaattctacgatacccaagtcatcaaacaagaaaacgagtcaggctacgagaggagaccactggaaatggagcagcagcaggcctatcgtccagaaatgaagacagagatgaagcaaggagcacccaccagcttcctcccgcctgaagcttctcaactcaagccagacaggcagcaattccagagtcgaaagaggccttatgaagaaaaccggggacgggggtactttgagcaccgagaggataggaggggccgctctcctcagcctcctgctgaagaggatgaagatgactttgatgatacccttgttgctattgacacctataactgcgacctccacttcaaggggggcccgaaatcggaggagtggctatccgctccccaatggagggcttttgcctacccgcgggccaggaccccgtgcccacctatggggggtccgaaaggcgcccggccagccctcccagaataacntnnntgcnggcccaccncctcgnaannnnnnnnnnnnnnnnnnnnnnnnnnnnnnnnnnnnnnnnnnngggaacccctagttttcctgccaccccttgagctcccctattttatcaccaatcccccctttctccctagagcccatgggagggcctggatctcacaacattcgcacaatttaccccccgtctcgcaaa

SEQ ID NO: 244204 - DNA, 600 bp, Homo Sapiens
cgaatacagttgtctcaaaatcatcctgtctacatttccccacataaaaatgaaacaatgctttctcctcgagaaaagattttctattacttcagcaacagtccttcaaagagactgagagaaattaatagtatgatacgcacaggagaaactcctactaaaaagagaggaattcttttggaagatggaagtgaatcacctgcaaaaagaatttgcccagaaaatcattctgccttattacgccgtctccaagatgtagctaatgaccgtggttcccactgaggttagtctcttgtattaaactcttcacaaaatctgtttagcagcagcctttaatgcatctagattatggagcttttttccttaatccagctgatcagttacagcctgttagtaacatgaggggacattttggtgagaaatgggacttaactccttccagtgtccttagaacattttaattcatcccaactgtctttttttccctaccattcagtgattactgtcaaggctgcttagaatccaaacttggatttttgactctggcaaagcttttagaaatctgcaagaaaatgatgtgaaccaaacgtggtagaggtg

SEQ ID NO: 244205 - DNA, 1087 bp, Homo Sapiens
  misc_feature (31)..(31): n is a, c, g, or t
  misc_feature (40)..(40): n is a, c, g, or t
  misc_feature (85)..(85): n is a, c, g, or t
  misc_feature (120)..(120): n is a, c, g, or t
  misc_feature (143)..(143): n is a, c, g, or t
  misc_feature (160)..(160): n is a, c, g, or t
  misc_feature (179)..(179): n is a, c, g, or t
  misc_feature (190)..(190): n is a, c, g, or t
  misc_feature (255)..(255): n is a, c, g, or t
  misc_feature (266)..(266): n is a, c, g, or t
  misc_feature (286)..(286): n is a, c, g, or t
cagccttgatcccccctttgttaacttgtgnaaatgaaanaacggaggggttctttttggaagttgcttcccagatttctggaancagcccttggcaaggggttgttgaatggaaaaaanaaagggttctttcttttgcaaantgggttcataagggccnttgtgccggggtgcctttnccaagtgtccnttctatttcaggtggagaggtctaccaacagctacacgcaagccatgagccaggcgccggtaaanagaacatcccntactcttggccagcttagcntgcgtaaggcccaccactacgcggccctggcccattacttcacttgccatcctcctcatcgaccaccaggtaagccaggcacggatctggaccaccaggagaagtgcctgtcccagctctacgaccacatgccagaggggctgacacccttggccacactgaagaatgatcagcagcgccgacagctggggaagtcccacttgcgcagagccatggctcatcacgaggagtcggtgcgggaggcgagcctctgcaagaagctgcggagcattgaggtgctacagaaggtgctgtgtgccgcacaggaacgctcccggctcacgtacgcccagcaccaggaggaggatgacctgctgaacctgatcgacgcccccagtgttgttgctaaaactgagcaagaggttgacattatattgccccagttctccaagctgacagtcacggacttcttccagaagctgggccccttatctgtgttttcggctaacaagcggtggacgcctcctcgaagcatccgcttcactgcagaagaaggggacttggggttcaccttgagagggaacgcccccgttcaggttcacttcctggatccttactgctctgcctcggtggcaggagcccgggaaggagattatattgtctccattcagcttgtggattgtaagtggctgacgctgagtgaggttatgaagctgctgaagagctttggcgaggacgagatcgagatgaaagtcgtgagcctcctggactccacatcatccatgcatataagagtgccacatactccgtggggtagtaatg

SEQ ID NO: 244206 - DNA, 566 bp, Homo Sapiens
ccgattctggagtaaatataaagacgagtgaaagcttctatgaggtgcactatgtgtgtctctggggtcagtcttgtgcttgacacagcgaaagctcattgttagttcatgtgtgaaaaaccagacctcaccaatgcatcacaactaactccatcggaagcagaggattgctcctcatctgactcctcctgtgtgagacctgattctcagtcagaggctgatgccggaactgagaccatcagccatagagagatccttccagaataaccccgcagttcactactgcactttgccatgattcaggactggaactcttgtcatcgactttaaagatcctggttgagagaaaaggcaatctgaatgctgggcgcatctattgaattagaaatgatcggaatggctcctaagtcagggtgttatgtcctgaaaataggtgacaacggccaaccatccaccctggtgttgactgactttaacaaggttcagttcacagagattgagggcagaaaaaggaaacggcctcaaaagggtaagtttgctgtgttgccctcataccacttgcgtgg

SEQ ID NO: 244207 - DNA, 606 bp, Homo Sapiens
tagctcaccaacagtgtcatggagaggtctgttaaatgaagttcctcttttatgcgcctgtgaaacaaagcatccggcacaccactgaaagcaagacttctcactcccctgcctgcccccaccatctttgggtgttcctgacttcagcctatggcccatacctgactacacctacaggcaggtcgttctgggtcagggcagggaaaagcaactcctccagggactaagggatggctttgtctcataggagttcagagggccaggatgagcggtcagggctagagggtatgacctacccattgtcctcataggcatcacatagacaagcagatggctttgtactcatggttgagggggctaggacatggtgtcacctggtgggctgtcaaatctttcaatgcccctagtgtatgaggcagcacacagggagaaagccctcatcttctgagatcccaggtagccacggagaaaagggtggctagtgatagcagccaaagccaagcaccagatgaaagcaggtcctattctcagttgctggaagcatctggccaataacaacttatagagagttctgcattgctacgtgggtagaagtggaccgaccga

SEQ ID NO: 244208 - DNA, 683 bp, Homo Sapiens
  misc_feature (50)..(147): n is a, c, g, or t
tcagcctgccggcttttgacatgccttccttactaagcttaatcatttcnnnnnnnnnnnnnnnnnnnnnnnnnnnnnnnnnnnnnnnnnnnnnnnnnnnnnnnnnnnnnnnnnnnnnnnnnnnnnnnnnnnnnnnnnnnnnnnnnnatgagccactgtgtccagttctccagtattcttttataagttagatgttaatactgtagaattgaaaaaaattatgaacctttttcatacacaaatctattcaactcaaaatacttacgaagtcgagtcctggattcataatatctcagcatattgttttgagttccatctgagcttgaggatgatatctataaagccagccaatattaattacatcttcaagtgaaagtacattacccgcctccctgcagttttaaccctatacagtggaagtgtagcctttccttcttccaggaattgttagcataaatcctgacagttccagacagtatggaaggatcccagtagatagggaaaagatccccactcgaaggtccaagcctagtgggatacctttcctgggcacatggtgccaagagatgacttaaatatctacaaccacttgtcagctcagttttttgggggactactccaggtcttccctggggaagggacacatattcttcctggtaacaaagattagccgtggggtagag

SEQ ID NO: 244209 - DNA, 342 bp, Homo Sapiens
  misc_feature (54)..(62): n is a, c, g, or t
ccatcaatctagttaccatgtactgacaaaacaaaaagacctagctaaacctcnnnnnnnnngaagtcactggaaagcacattgtccagatggttctggtggggagcacctttgcctgcttatagctctgtgagatcctgagcttggtgagatggactgggaagtcctaacttcatttatgtcttctctccaccctgaaacgatgccaaaatgaccccaaatctcaaataaaagttggtgtctgttgctgtaaatgtacaaataacccaaagtcaaaattagggatggaagttaccattccttttgccttctgtgttttgaggtggtcgtggggtaggacgg

SEQ ID NO: 244210 - DNA, 371 bp, Homo Sapiens
ccacgagacaaaggaaagtttattacagcattagcagtagccaaagtatcagcattttttagtcaattctatgaacctcagttctctcacggaccacgttataaacatgcattgggttgcttggggaggaagtctgaggttagagatccaaatatttttataatgggcagtgagcatgcttgctttttgctccaaatgaagacagtatctccatcttataaggcagtaagcaaactggcttcttgctccaaaggaagacattatccctgtcttccaagaatattttctacacaaacatatttgaaaagatagccaagaacaaaaacagccagtacctttaatcagcaggtggaggcaattgtcctaagcaa

SEQ ID NO: 244211 - DNA, 1029 bp, Homo Sapiens
cgcgtctgccccagccctgagcgctgtcgcggatgccgcctgcgtacagcctgcaggactttgacacgctggccaccgtgggcactgggacgttcgggcgggtgcacctggtgaaggagaagacagccaagcatttcttcgccctcaaggtgatgagcattcccgacgtcatccgcctaaagcaggagcaacacgtacacaatgagaagtctgtcctgaaggaagtcagccacccgttcctcatcaggctgttctggacgtggcatgacgagcgcttcctctacatgctcatggagtacgtgccgggcggcgagctcttcagctacctgcgcaaccgggggcgcttctccagcaccacggggctcttctactctgcagagatcatctgtgccatcgagtagctgcactccaaagagatcgtctacagggacttgaagccagagaacatcctgctggataggggtggccacattaagctcacggactttgggttcgccaagaagctggtagacaggtttcctccgttttttgatgacaacccgtttggcatttatcagaaaattcttgcaggcaaaatagatttccccagacatttggatttccatgtaaaagacctcattaagaaactgctcgtggttgacagaacaaggcgattaggaaacatgaagaacggggcgaatgatgtgaagcatcatcggtggttccgctccgtggactgggaagctgttccgcagagaaaactgaagcctcccatcgtgcccaagatagctggtgacggcgacacttccaacttcgaaacttaccctgagaatgactgggacacagccgcgcccgtgccgcagaaggatttagaaatcttcaagaatttctgaggacaggagctcacatctggaagtcttcccagttatgtgaagtggaaagccaattggctaaccaacaccattcgaaacagacaccaaatgtcacaattgctgactggggagaggaaccaacctgctgaaagacgtggggtaggcgtggggtagagat

SEQ ID NO: 244212 - DNA, 656 bp, Homo Sapiens
  misc_feature (569)..(569): n is a, c, g, or t
tgaggagtgacccatttcactactttgttttcttatcactaaaggcaaaaatcaaagcacagttgtccattaacacttataagttaattatgggtttatgagtctgtaatgttatatgctgcaaacatttactatgtaaacgtgaagtagccaataatatctcaatagtagtaacagtatctttagcgacctttggagtagttaagcacaggtcattgtggacatgaattcaggcctctgtactaaaatctatttcagggaatgttctgtctagtgatttgctcaccatttgatatataatgaattataggacaagtataagctgatctgctatagctgtccatcagagagaatacacgtggctataacatctataacaaaacgacgattcctctacaagaggctgtttctcactgctaacgttggtgtttctggcgtgggaagaaatgcacaggcgtgcatggcatgcacgttcagacagctgcattgtaagagttctgtcatgcagtctgaaaagggaagaaacaggatggctttctgtagccacacctgtgaggcgtgatgattgntgtattattagattactgatttttcttttctgaaaatacatttgagttttaatcacatctgtggaaagctgtaacttttaagggagt

SEQ ID NO: 244213 - DNA, 633 bp, Homo Sapiens
ctacccaggagaaaacatcttcatcatctcatgctggtggtgtctggtgtcctggccctgaatatcattgaactcttctatgttttcttcaagggcgttaaggatcgggttaagggaaagagcgacccttaccatgcgaccagtggtgcgctgagccctgccaaagactgtgggtctcaaaaatatgcttatttcaatggctgctcctcaccaaccgctcccctctcgcctatgtctcctcctgggtacaagctggttactggcgacagaaacaattcttcttgccgcaattacaacaagcaagcaagtgagcaaaactgggctaattacagtgcagaacaaaatcgaatggggcaggcgggaagcaccatctctaactcccatgcacagccttttgatttccccatgataaccagaattctaaaaaactagctgctggacatgaattacagccactagccattgtggaccagcgaccttcaagcagagccagcagtcgtgccagcagcagacctcggcctgatgacctggagatctagatacaggcttgaaagcatcaagattccactcaattgtggagaagaaaaaaggtgctgtaagaaagtgcaccaggtgtaatttgatccaggggag

SEQ ID NO: 244214 - DNA, 1347 bp, Homo Sapiens
cgtagcggaaaggattttggatagcgtttacaggtgaaggaacatcaacatgaggaaattcagaatgttcgaaatcacattcactcatgtttctccgatgtcacctgctttctcttaccacatccaggactccaggtggccacaagccctgactttgatgggaaattaaaagatatggctggtgaattcaaagagcagttacaggcactgataccgtatgtattaaacccatctaagttaatggaaaaggagatcaatggctcaaaggtcacctgtcggggactactggagtattttaaggcatatattaaaatttatcaaggagaagatctgcctcaccccaagtccatgcttcaggccactgctgaagctaacaacttagcagctgcagcctctgccaagggacatttattataacaacatggaagaggtttgtgggggagagaaaccttatttgtctccagacattctagaggagaagcgctgtgaattcaaacaacttgctctggaccattttaagaagaccaagaagatgggtgggaaggatttcagctttcgttaccagcaggagctggaggaggacatcaaggaattatatgagaacttctgcaagcacaatggtagcaagaacgtcttcagcaccttccgaacccctgcagtgctgttcacgggcattgtagctttgtacatagcctcaggcctcactggcttcataggtcttgaggttgtagcccagttgttcaactgtatggttggactactgttaatagcactcctcacctggggctacatcaggtattctggtcaatatcgtgagctgggcggagctattgattttggtgccgcatatgtgttggagcaggcttctttctcatatcggtaattccacttccggccactgtgagggatgccgtttgttgggaagaccatccctgggataaaaaaagctccatagcatcttaacgtgaagatccaaccaagaacacaacaagcccctactgatttctgggtttctgccacggccacaggttcatatccagaggaatggcagatctgagacgatccaggaagagctaaaacatggcccctgtaataaatgagcagacctctcctgtggtttcaaattattaaacacacttccatttctcttggaagcatttcttttccttgctgttatagatgcaagcctgtgtctattttcatattactctgctttgtgcactttatggaggaggaagcctagaggaaaaatggaaatgcagcttttaagttctttatgtgccacttagtgccttttaagattgattccatgggtttgcacacacgtgggtagtaagtggtagcgcc

SEQ ID NO: 244215 - DNA, 574 bp, Homo Sapiens
  misc_feature (88)..(121): n is a, c, g, or t
ccgaagtgctggaattacaggcgtgagccactgcgcccagctacctgtcatttctaatatagcctgcagggggaaccaaagcctgacnnnnnnnnnnnnnnnnnnnnnnnnnnnnnnnnnnctatgggaaatagtgctctcctgggaggtgggtttccaaatctctgcttggacacatgaatttgagggttgtgctctccactaacccaagaattcccatgctggggagggtagcttggccctccgcttgcttcccagttcatacagatggtcctttgctccctctatttctcaccttgttctaatgcctgtttctcaattattttgcctgaagtttcctggagaatgagggtgaggggagacctggagtgggagacctgggtgtggattactgtagcactaaggcaaaacaggattcctgcggaatagccaagtgcacatcaaaggcaccaccaactccagtgccccttcccggtccatgtcctgctccacccaaccttcaatcagggaacacaaacaacagcgaagtttgccaaagaattcgagtatcagtgagatgttctgccgtggggta

SEQ ID NO: 244216 - DNA, 358 bp, Homo Sapiens
gcaaaaattggaaaagagaatgcaggaatttcggagctcaggatgtggcggcctgattcaggtggaacattgagaatttatgcaggatagtcttaaaaccaaagtattccctacaagacgatcctgctgtctactacagatcctgcagactttgctgtggctgaagctttagcagaagtatggtctggaaaaggaaaaccctagggattactgcatcgcccgggttatgcttcctcctggagcccagcattctgatgaaaagggtgctaaagaaattattcttgatgatgatgagtgtcctttacaaatcttcagggaatggccaagtgacaaagggattttagtctttcagttgagt

SEQ ID NO: 244217 - DNA, 864 bp, Homo Sapiens
  misc_feature (360)..(395): n is a, c, g, or t
acctacctaacccacgcagacagatgtggtgcactacagactccagcctcccttatgaagccaggttcctgctgctttctcccgtttagcctgtgaaccctaggggcaggattgggatagcggatcgaagtgtacggatgtgcatatgaatctgaggtggtaatatattggatggacaaaggtgctctggtgtatagacttgataaaaaacctttaaaaccaataagagacgttatttctttgaaatttaaagccatgcagagcaatggaattctacttcacagagaaggacaacatggaaatcacattactctggaattaattaaaggaaagcttgtcttttatcttaattcaggcaannnnnnnnnnnnnnnnnnnnnnnnnnnnnnnnnnnncaccctgggcagcctgctggacgaccagcactggcattccgtcctcatcgagctcctcgacacgcaggtcaacttcaccgtggacaaacacactcatcatttccaagctaagggagattccagttacttggatcttaattttgagctttgggggaattccgacacccggaagatcgcgggcattcagacgtaaaagctttcatgggtgtttagaaaatctttattataatggagtggatgttaccgaattagccaagaaacactaaccacagatcctcatgatgggtaatgtgtccttctcatgtccacagccacagactgtccctgtgacttttctgagctccaggagttatctggctctgccaggcaactctgtgggtaggacaaagtgtctgtcacttttcaatttcgaacgtggaacagagcaggacatttgcttttctgcgtacttcgatcgtgggtagtaggt

SEQ ID NO: 244218 - DNA, 1009 bp, Homo Sapiens
  misc_feature (161)..(198): n is a, c, g, or t
gacattcggagctgcgctcccgcccaggccggccctgccgcgggcctcgtcagccagtaacagggagcagaggtgggagttagcgaggcgaccacgaaaacggtgaaggtcggaaccgacagcctcctccgagaagggcaggagctgggaggaggcggcannnnnnnnnnnnnnnnnnnnnnnnnnnnnnnnnnnnnnagctgggaggaggtggtgacggtggcaacggcagcgtcggggacgatggcgcgactcgtggcagtgtgcagggacggggaggaggagttccccttcgagaggaggcagattcccctctacatagacgacaccctgacgatggtgatggaatttcctgataatgtgttaaatctcgatggacatcagaataatggtgcacagctaaagcagttcattcagcgacatggtatgcttaagcaacaggatctaagtattgccatggtggtgacatcacgcgaagtcctgagtgcactttctcagcttgtcccatgtgttggttgtcgtcgcagtgtggagcgtctcttttcccagcttgtagagtctggaaatcctgctcttgaacccctaacagtagggcccaagggagtcctgtctgtaactagaagctgcatgactgatgcaaagaagctttatacattattttatgtacatggggtccaaactagatgacatgatagatgctattccaaaaagtaagaagaataagagatgtcagttgcactccttagatacgcacaagccaaaacctttgggaggtcgttggatggatgtatgggaactaatgtcgcaggaatgcagggatgaagtagttttaattgactcgagttgtcttttagaaacactagaaacatatctgcgaaaacacaggtttagcactgatagcaaaaataaagtcctccgagcatacaatatccttattggtgaacttgactgcagcaaagaaaagggctactgtgctgcactttatgaaggcttgcggtgctgtccacat

SEQ ID NO: 244219 - DNA, 615 bp, Homo Sapiens
ggtaattcactaagaaaagttccacagtcaaagtcaatgagtagtgctacttgaggctcaaattcagatcttccaattctaaatccagtgatctttctattataccatgttttgtacagtcctattattcatgcgttgtgtttctccattttacttgttattttgacctttactctggtttttccagaatgttagggaaatttctctgcatgtttggaaattcaggttataagaagacatctgtcagctacttatgtaaccagctttcccacctttccactaaaccagtattttctagacagtaaggcactatataaatacaaggtatcattttgtttgatgaatgatgaatagacaaacatggttgtctacagttcatctcatcacacctgcagggcaggtttacctacccaatcataaggcacacagaggaataactggccccttacccaccaccaaggcttagaaacagcgtaaaccatccaggagcttttctctctccctcagtcttccatagggctccttcaatatcaagcctggggccaggagaggagcaagtacctgtcatcatatggaggagatcctcttgccatccatgactcgtggggtagtaat

SEQ ID NO: 244220 - DNA, 914 bp, Homo Sapiens
tttaatccaagcacttataattttgatgccacttgtttgttaaactcgggagttgttcatttaacttgtactggctttcagaaggagactttgacttttttaaagaaatcaggtccatcactcaatgaactcattcctgatggttataatcgatgtcttgtagctggccttctttcccccagatttgttgatgttcagccttccagtttaagccaagaagaacagttagaagctatattgtcagcagcaattcggactagttccctgggacttttgactggttatatccgaagatggataacagaagtacaaccaaattctgccactaatttgcgctttgttcttgaatggacgtggaataaagtggttctcacaaaagaggaatttgacagactatgtgtgccattatttgatggttcgtgtccatttcatggatccactaactatacagtctatccagcaatgctatttgcttcttagcaatcttaatatagtcttgagctgttttgcatcagaagcccgagagatcactgagagaggactgatagacttaagcaataagtttgtggtttcccacctcatctgtcagtatggcacaagtggttctttggttctctcattctgggcttttaccagaaggcatagatgattctgtgcagttgtcaaggttatgctacaactaccctgtaattcagaactactacaccagtcgtcgacagaagtttgagcgtttatcaagagggaagtggatcccgattgcttgatgattgatggactggtttctcagttaggagagcgaattcgagcagttgtgatacgagatgagggaggcacaggaagatatcctcctgctagtctgcatcgtatcttgatatgtacctattagaccgcgattcatgacgaggtacgctgaa

SEQ ID NO: 244221 - DNA, 443 bp, Homo Sapiens
ctggcccaaactccctgcgccaaagcatgcggggcgactcagacacaaaagggaggaaggcacagtctctgcccagagcccacggtggcaccaagaaactccttttaccactgaagaagaaaaggaggtccagtcttttggaggcaagacaaggtcacctacagagggcctcagccgagcaactcgctagaggttgttttctgcatgaccaccttccctgcaccgtggatccctggggtgggtggtttaggggctttccaggtaagagccagggtcagcgccaggaaatgatgacaagtctgtctgaaccctttccagcagacactactattgacctcctgccatgcccagcgctgctccagttagaatctttactacaacgtacataggcaaatgtctagctgtcattctactctcacacatgaaagtgtcaaaccgtggta

SEQ ID NO: 244222 - DNA, 1568 bp, Homo Sapiens
  misc_feature (74)..(74): n is a, c, g, or t
  misc_feature (95)..(124): n is a, c, g, or t
  misc_feature (137)..(147): n is a, c, g, or t
  misc_feature (172)..(172): n is a, c, g, or t
  misc_feature (177)..(177): n is a, c, g, or t
  misc_feature (193)..(193): n is a, c, g, or t
  misc_feature (198)..(257): n is a, c, g, or t
  misc_feature (259)..(259): n is a, c, g, or t
  misc_feature (264)..(264): n is a, c, g, or t
  misc_feature (273)..(273): n is a, c, g, or t
  misc_feature (275)..(275): n is a, c, g, or t
  misc_feature (283)..(284): n is a, c, g, or t
  misc_feature (287)..(287): n is a, c, g, or t
  misc_feature (290)..(290): n is a, c, g, or t
  misc_feature (292)..(292): n is a, c, g, or t
  misc_feature (294)..(297): n is a, c, g, or t
  misc_feature (299)..(310): n is a, c, g, or t
  misc_feature (312)..(312): n is a, c, g, or t
  misc_feature (314)..(316): n is a, c, g, or t
  misc_feature (320)..(349): n is a, c, g, or t
  misc_feature (1128)..(1140): n is a, c, g, or t
caaatgggacgggagtgtgtcgcggggcgggtgatcaagagaagacgcaaattcaaaccggccgccaggagganccgggcggcaaggagggaaannnnnnnnnnnnnnnnnnnnnnnnnnnnnnacccggtggagcnnnnnnnnnnngaccagcccccggccccaaaacacncacancaggacacccacccancatcnnnnnnnnnnnnnnnnnnnnnnnnnnnnnnnnnnnnnnnnnnnnnnnnnnnnnnnnnnnncnaaaanaaagccaananacaaaaanncanaananannnnannnnnnnnnnnncncnnncatnnnnnnnnnnnnnnnnnnnnnnnnnnnnnncccctccccccaaacaacaaaattcagagtatgtcaaaggaaaaaggtttgttattgtattgatcaaaacccagtggaatcaacaccatctatcttagcttagcaggtatgctgttttgatcttgagtctatattaatggaatctattgttgcattctgaaataaagaattttggatataccattatgttttaaagtcctagaaacaatttcgaaaagcattattttgttttgttttctgggatgggagaggagagaatctacagatttgcgtttagttaaaaatcaaaactccagcataggaaataggcagttcacatagccggtcaacatgtgaggtatcatcagtgtgagacaaggtcccggtctgttcctattggcctagctgacgctaacaaaatgggaggcttatggctctgcacagcaaattccagcaggacaagatgactttaagcccgtattcagagccctagaagcagggcactactgagtatgtaatatttagaggtgaaaatagtgcaagagcccctgatggtgcccctctacttgctttgtccatgcagcctgatcataactgccttccacaaaggagcagaaaaacagcttttctagatcagtacactaaacccagccaagaatctgcaaaaatgctactacaccgcttcacaagcaacacagtcccttcactactcattgggttgcacgatgtctctcttctaccctgttatggcctgtggacacatactcactaggcatcattgttggttttaaaccagggannnnnnnnnnnnnaatctcaaaaaacctagtaataacaaggcaatcagtggttaaactgaactttacatatagggggcagtttggaaaacacataccacaagcatttctcaagtcgaaaatatgtgaatttgctgctgctcctttgacggttcctgaaaattcagagtacaagtcctaaaataaaaattttaagctaccagcattctctgatactagacagaaaatcagagtaacgctacagcccacaattctacagggtgtaaaaagtacgctcactgcctggacatctttattgatggcctggagtcctcccttttagaagacaagtttctgggataaccacttagcttcattggttagggaagagaagaattcgactctcaggtaagttgagaagagactcctcttaaaatgccatttctccactaatttatcaaaat

SEQ ID NO: 244223 - DNA, 491 bp, Homo Sapiens
  misc_feature (165)..(166): n is a, c, g, or t
  misc_feature (292)..(292): n is a, c, g, or t
tataagaaccttggccaaaacaagattgtccccattgccatccagctcaaccaaatccccgggtgatgagaaccctattttcctcccttcggatgcaaaatacgactggcttttggcctaaatgctgggtgtcgttccagtgatcttccacgtccaccagaccannttcacccaccttctgcgaacacatctggtgtctgaggtttttggcattgcaaaatggttaccgccagctgcctgctgtgcaccccattttcaagctgctggtggcacacgtgagattcaaccccanttgcaatcaacaccaaggcccgtgagcagctcatctgcgagtgtggcctctttgacaaggccatcaaggcccggggcatggagagcaaagaagacatcccctatctacttctaccggcacgacgggctcctagtgtgctggagaacccatcagacgttcacgtccgagctggtagaccatctactacgtgggtagaggt

SEQ ID NO: 244224 - DNA, 828 bp, Homo Sapiens
agcagaagcgcatttcagctcagcggagacagatcaatgaggataacgagcgctgggagacaaaccgcatgctcaccagtggggtggtccatcggctggaggtggatgaggactttgaagaggacaacgcggccaaggtgcatctgatggtgcacaatctggtgcctccctttctggatgggcgcattgtcttcaccaagcagccggagccggtgattccagtgaaggatgccacttctgacctggccatcattgctcggaaaggcagccagacagtgcggaagcacagggagcagaaggagcgcaagaaggctcagcacaaacactgggaactggcggggaccaaactgggagatataatgggcgtcaagaaggaggaagagccagataaagctgtgacggaggatgggaaggtggactacaggacagagcagaagtttgcagatcacatgaagagaaagagcgaagccagcagtgaatttgcaaagaagaagtccatcctggagcagaggcagtacctgcccatctttgcagtgcagcaggagctgctcactattatcagagacaacagcatcgtgatcgtggttggggagacggggagtggtaagaccactcagctgacgcagtacctgcatgaagatggttacacggactatgggatgattgggtgtacccagcccccggcgtgtagcttgccatgtcagtggccaagagagtcagtgaagagatggggggaaaccttggcgaggaggtgggctatgccatccgctttgaagactgcacttcagagaacaccttgatcaaatacatgactgacgggatcctgct

SEQ ID NO: 244225 - DNA, 623 bp, Homo Sapiens
ttatatgcattttgaagacgttatctcaagtcctgttgtgtcactgtcaacatcagccagctctggttggactgctcttggaatggaaaatgaccaaaaggaaaatgaagcttcaaccaagtcaattcatccactttgcttgcgtccttgggatagtactgtactgtgtgtgatttggtacaaagttcatgggcgtcttcctgttcatgggactactggatggtcctgaatgccttacagctttcttggaaagactatgttttgaaatgcaaaaaggatttagggagaccatgctgcgacttatcctgtcacccctgaatgtgtttgtcagtgataactatcagcagcgaccccctgtggatgaagtactcagggaaggtcacatcgatttgtcaggtctccagctgagagcacacgctatgttctcagcagaaggtcttcctttgggaagcgattccttagaatacgcatggttaattgatgtgcaggctggaagtcttacagctaaggtcacagcaccacagttgagcttgtactcctgggccttgtccaaccttcagatgatgtgaaatatactatgagttcgtgtctcagtacaaggatacctctagaacagcgataca

SEQ ID NO: 244226 - DNA, 1141 bp, Homo Sapiens
gatctcaggagctactcatttcagttccagaacgagttgtgtttaaatatagccatgcttatttataaccctatgccttttccttctctcatcataattctcttgacatttgtgtcaatattttccctgtattctgttcatctccttttgaagactgccaatgaaggagggtctttattatatgaacaattgggatataaggcatttggattagttggaaagcttgcagcatctggatcaattacaatgcagaacattggagctatgtcaagctacctcttcatagtgaaatatgagttgcctttggtgatccaggcattaacgaacattgaagataaaactggattgtggtatctgaacgggaactatttggttctgttggtgtcattggtggtcattcttcctttgtcgctgtttagaaatttaggatatttgggatataccagtggcctttccttgttgtgtatggtgttctttctgattgtggtcatttgcaagaaatttcaggttccgtgtcctgtggaagctgctttgataattaacgaaacaataaacaccaccttaacacagccaacagctcttgtacctgctttgtcacataacgtgactgaaaatgactcttgcagacctcactattttattttcaactcacagactgtctatgctgtgccaattctgatcttttcatttgtctgtcatcctgctgttcttcccatctatgaagaactgaaagaccgcagccgtagaagaatgatgaatgtgtccaagatttcattttttgctatgtttctcatgtatctgcttgccgccctctttggatacctaacattttacgaacatgttgagtcagaattgcttcatacctactcttctatcttgggaactgatattcttcttctcattgtccgtctggctgtgttaatggctgtgaccctgacagtaccagtagttattttcccaatccggagttctgtaactcacttgttgtgtgcatcaaaagatttacagttggtggcgtcatagtctcattacagtgtctatcttggcatttaccaatttacttgtcatctttgtccccactattaggaatatctttggttttattggtgcatctgcagcttctatgttgatttttattctc

SEQ ID NO: 244227 - DNA, 422 bp, Homo Sapiens
atagcgacaccgtacccaacgtgggttcgtgagatttttcagggaacattaactaatgaaaccagatgtcttacttgtgaaactataagcagcaaagatgaagattttttagacctttctgttgacgtggaacaaaatacatcaattactcactgcttaaggggtttcagcaacacagaaactctgtgcagtgaatacaagtattactgtgaagagtgtcgcagcaaacaggaagcacacaaacggatgaaagttaaaaaactgcccatgattctagctctacacctgaagagatttaaatatatggatcaacttcatcgatatacaaaactctcttaccgggtagtttttcctttagaacttcgtctgtttaacacttcaggtgatgccaccaatccagacagaatgtacggtgtcgctat

SEQ ID NO: 244228 - DNA, 501 bp, Homo Sapiens
ataagcgaccgtacagacagtcatggtgaatgcagcactgcttatagcatcaaagtgaaactacaacgagtagcatctcccacagtgccttcttacgatggagaccacgggtgtggcatggacactgtgctgtgctgctgtgaaggtgaaggagtcctggtgtgctcacaggagaggtcaccaggtcagattgttagaggagaaaagaaaagagcaaggcaaggcacagctaccacatttcaatgattccgtgagcacagtttccctgcagcttgttactgatggcactttaaaattttcgtattttttcatattttcatctctgaaatcgagctgtattttataattattggcaatgtgaacaagaggaaatacctaggtagggtgggatgaccacagctgtcttcaatgataaaaagaggcacatgtgtatgtttatgtgcccatgaaaatacatgaaggaagataataaggtgtgtgatcgtggtacggtgtcgctat

SEQ ID NO: 244229 - DNA, 395 bp, Homo Sapiens
ttcaaaatctaagaaagtcttttcacttctgtgttatagaacattctataattagtacttgatctattttgctccatacatgcaactgcgttggcattagaggttttataccattaaaagagtgtgacaatgtattgtagtccatcatcactcaaacctgaaacttcagcatatttgttctaaaaactaatcctgttataagaatgaaaaagacatttaccgtcatccctatcccatcactttgtgtcatactggacaagacgcttaactgctctgtgctataattttttaatttatgacatggtaatataagagtgcagcagtttgacacactttcaatcaagaggtggaatcaacatccctctgttgtatacaggaatctacattcatctgta

SEQ ID NO: 244230 - DNA, 462 bp, Homo Sapiens
  misc_feature (87)..(162): n is a, c, g, or t
cctgaaacttcatcatatttgttctaaaaactaatcctgttataagaatgagaaagacatttaccgtcatccctatcccatcacttnnnnnnnnnnnnnnnnnnnnnnnnnnnnnnnnnnnnnnnnnnnnnnnnnnnnnnnnnnnnnnnnnnnnnnnnnnnnagcagtttgacacactttcaatcaaagaggtggaatttacatccctctgttgtatacaggaatctacatccctctgtgactgcttcgcccagtagaatatggtagacgtactgctgtgctggtttcttgactcagactttactggtagggttacttcatctcatgaaatgacagaactgtcttgttacaaagtctggctactttgctgaagagaccacatgaataggccctgaagctaggtagagagggataggcacttgctgaaccctgtcttcttgacatccaccaagataccagaca

SEQ ID NO: 244231 - DNA, 514 bp, Homo Sapiens
tacagagtgaatgtcgttagcattttaggaatcactggcagcgtccttgccaaagaagatggtacacttgaaactcttaagaacattgggtgctttctgcttgaagttaccaccaaagatccttcccttgtggtagcaggagaagctttggatgccctctttgatgtttttgcagatggtaaagaagccgaaagagcctcgattcaaattaaattattatctgctctgaaagaattccagccggtctttaaaatgaagatacgtaaagaagggagaggtaactatagcacagatcagctgtgtgttcttgacaatgtgaaaatgaatttgcgaagatttattgcttatcaagaaactgttgagaaaagactgacttcttaaacaatccaaaaaagaaaccagttcttcccccaaagtattcaatgcttagaatactaaaaggttttctttgaatgtatatgtttctgaaagtcattttttaatgattacattcactctgtacattcactctgta

SEQ ID NO: 244232 - DNA, 389 bp, Homo Sapiens
gtacagagtgaatgtgaacacaggcagagcgaaagtaaacacaacactcagcgcctgctgttttattttttaaagtcttcggaaaccatgttaagtgaaactctttgatgagagggaatcttacttggatcactaaagatacttcactggatacttctgttcttttagccccataattaaagatacatttgactaagatacaaggtatagtaaatgtaggcaggtcagagcaaatgttcagcccaaaaatatgtctgtgaataatgttcagccgaaataatgttctggggaaattattggcaaggtcatgttaaactattgcgtcgttctttggtggcaccccagacctaatataacttgacatttggtgagaacacattagctgacat

SEQ ID NO: 244233 - DNA, 356 bp, Homo Sapiens
attaaactaatgaagtaagtttgttgcctccaatcagagtgaaagagaatgttaaatttcagttagaggttagtagatataaaggtaatttctttactgtgcgatgtcacagactaaagtttatattgtatttgaatgtggctaggaaagtagataatatgcagcctatatcttggggcgccatttcctaaattagatttgcagcagcaggtacatcgagccattctttcttgattaccttcccatgtggtctacttgattggtccaaatgtaccaaatgaaatatacttcctatatgtagaaggaaaatttgggagaagttgtaaaatcgtgacagttttgacattcactctgta

SEQ ID NO: 244234 - DNA, 428 bp, Homo Sapiens
ttcagccatttgatttacctccattattttacatgagattatcctggtaggaaagataaaattatggaacctctcacaaccgaaaagggccctcaaagttccctgtttttaggcattttcattatcactgtcattttattgatgaagcactaaggacatgagttaagctgactgtccaaggtcacccagccactaagtcaatttaaaacactctcatttgtgctctcagcagtcccctagtgttcgaagtagtgaagataatttcctgctccattggatggcctaagaatcaggctgcctctgtatataatttataaaacgagataaaggtgcgtaagccaaagggatcatgcactaagtaatcaaagtgccaactcataaaataattagacagttatgaaaatgataatgaagacattcactctgta

SEQ ID NO: 244235 - DNA, 903 bp, Homo Sapiens
aaacgagtgcctaatcatgccattctgatgtaagcctttaagagacaatgtgcaaaataatagagcgggaggcagcaatttcttaaatagtgaccccataaatgtgtcatctgtaaataatcttttaaattaatcttaggctactcctttttaaacatttaattttttatatatatatatttctatttgtataaaatgcatagaattaattactaaaaacactgaaacttgtggggaaaattaagtccttcattttcagtgtgactaaaaatgtactgctggtttttactttatgatctaatactgtaatttttaaaatcaatttcaggcacatttatttcattgatgattattaaataaaacactgcttgtgttaatggagtgaagaaaacttatccattattagcttattgtgaacgctgtactagagctgtactagtggtatacaattcatttatcaaagaaacgctgtaaatccaaaacatctagagttttacactccaatgctttgtactgtttattccagtaaatgctgtaagattatattccagatttttaaggaaaaaagttaagtcaagcctgcaagatacagctttctcaagtgtctacaatgccagtatgaaaataaaaaattaagttacactgatacatccaagtttttttaatatgcagtgatgagcacaaacattaatagagataaaatactgatgcaaataacacaccccaaagtaacaaatgcaattattttccaccatttacaatacagtagttccaatgacactccaaacagaaaagcaaagtaaaaaatcaaaaccccaatttctattcatgtaattagacttatacagaaattagaaggctaaataacaactagtaatcacctaatttcacagtatctaaggt

SEQ ID NO: 244236 - DNA, 821 bp, Homo Sapiens
ttagcgacattcaatgttatagagagagtgggaatggaaggtttgaaactggaacatccatttagaatatctgatgtccacacccataggacactatgaaatggacacaatgggatacaagaagaagaaataatttaaagtctatccaagctattggctcatgtgcagctgggctctcctattcatgccctgacagctggggcctctcttggtgcaaagtcctaaagtggttttcagcatatagactcacaagcattcaattactagctactgatcatccattgtgtgccaggcagagtgctaggcactgggtgtacaggagcaaaccagaaaaccagcagatatgctctaaaagctgcttcccagagagatgaataggaggtaaacacgcaaagggatgacggtgttgggaagcaggcgcaagtgaggacagtgttccagaaagtggggagagaatgagcaccctcagaagggaaggaacagggtcccctctgggaacagaaccagctgagggatgaaaacaacagactgggctactctttcttgtctgactgctctcacctgtaggttggggtgatgggggaggctttttggggacaaccctctttttcttgtgcttcttcaccagctctggactctgtttttcctccagtcttttgatgagtttgttgagagtggatgtgagagccagcattgcccgatcccgctctgactccttcttcagcccatctgggtccagctctttctctgtctggaatatctcatagacgaatgagagtgagttcaacgggttctaggggtgtggacgcagtcatacgggc

SEQ ID NO: 244237 - DNA, 769 bp, Homo Sapiens
gctaatgtaaaagatcatagaatatcagagatagtgaacattatcatttccataaatgtacattttccacacgctgagtactatctaaattttctattgataaactctgaccacttcttcaggcaattcatgtacttactttagcattatcattaaggatgaaggttctagaaccattaggaacaagggtcccatcttcacacaagttacttaactgctgggaggctctatttcatcttatgtaaactatagataatacctactcacctcaagggtgtatcaagggtttatgtaagctaaatttgtagaaagcagttagcacagtgccaggaaggatccaagaagaaatggtacttactatgatatatttgtacatatatatgtatgaatgttaatgagctcttattagttgtgttcattaaaggttttctccatcctgtgatttgcttttagattttggaacacatttcattgtgcacattccatttttattattaacataacaacatttattaccataattatcatcaattcaatcatatctaccgtatcactgatgatgaccatgattcttttaataattataagactctcttcccttcatcacggggtaaataacctatcacaatgctgtaagtctccatcagcaccccaggctgcccctgctcacttaccagatctgctactttagccagatcaatcatcatgttaatgtcacacccacattcaataatggtgagtctgcgctttgtacctacacatcgtaaac

SEQ ID NO: 244238 - DNA, 381 bp, Homo Sapiens
ccgttgacacttcggaatatctaattcttttacagtttatttgggctatattagcaaactttaaatacagatgctgtcttgatacaacaagcagatgcatctgagacagggcactgtaaagtaggatatttttgtagagggccagagggttgatctgcatcatccttagcaaatggaatttgaaaccatatggctgaatgaagaaagactgttggcaaaaaatcagtagcgcataaagcagcagtggaaaatgaccacaggatgggaagtatgagcagtgtgtttcagagggttgggtgactggactatgcatgggatggccttctcaaagcgggtggacaaccccaacggccagtccctccgtacctttccattttgcac

SEQ ID NO: 244239 - DNA, 178 bp, Homo Sapiens
cagaaggtgcattttaccttttgacaaggagtagcctagccctactagtctcaaactccaacacatatggcctagactacgtacataacctaaacctactccaatgctaaaactaatcgtcccacaattatattactaccactgacataccgagcgtgcaatggtaccgagctgattc

SEQ ID NO: 244240 - DNA, 959 bp, Homo Sapiens
ctgatggattccaggcatttgtgtggtggttactaggtattggggcattgacttttgctcttctgatgtcagcaaggatggggatattccaagagactctctacaaacgatttgggaaacactccaaggaggctttgttttataatcacgcccttccacttccgggtttcgtcttcttggcttctgatatttatgaccatgcagttctattcaataagtctgagttatatgaaattcccgtcatcggagtgaccctgcccatcatgtggttctacctcctcatgaacatcatcactcagtacgtgtgcatccggggtgtgtttatcctcaccacagaatgcgcctccctcaccgtcacgctcgtcgtgaccctacgcaaatttgtgagcctcatcttttccatcttgtacttccagaaccccttcaccctgtggcactggctgggcaccttgtttgtcttctttggggccattaatgtacacacgaggtgtggaacaagcctaagggaccacaaatagtgagcctcagaatggacagcaagaagaactgaggcctgtgctggagtacgtagaccagtgtcgtcgtgagggtgggaccctgtgaaggtttgaccaccgttttcgcttttgttaatgccgagctacccgcagtgctgagccagccgtgcaaaaagaaatcttcaggaggggacttctcacggtgctcagacggacacttgtagactaaatagaaaccccctcagcccttaaaatagaaaaagaaccggttcgcttcccccaagcacccccgtggaattcctgttcgggccgcctccggcccttgaaaaagcttttcctagacaattcggtttgggggccgcggggccacagaaagggaaaagggaaacaggggcccataactgggtttcccatagggaaaatcctggggcaaggaacaacggcgctggggaatttcccccc

SEQ ID NO: 244241 - DNA, 201 bp, Homo Sapiens
cagaggctgaatggtaaagagaaagggtttcctggattctgattacagaatggacctgtgggggtctcagattgaggcctaacagcatttaaaaggagcaactggtagaacagatttggggaaatatttatgggtagaagagaatgataagtgagctacagaaataggtagaagcccatcagcctctccatcacctactgt

SEQ ID NO: 244242 - DNA, 701 bp, Homo Sapiens
tgctgaatggaaaagatcactccaggactgagtgtgaggaacctgaaggcccttgcttctttctggtagtgtggcagtgtaggttagttgaggattgcacctaggccaggaatgaagtcctcccctcatgattcccagtacgtgtgtaacctatccagagagaaatcacatccttttgcatccacattggaaccaagacacagagcaggagacctcagaattggagtctctgtatcaggccagtcttcaggcttctcaagctggctgttctggatgggggcagcaggataccgcctggcacccacttagccaaacaggctctgcagatggcatggggaggaggttgcactcagcccatgatcctggtctctcaaaaacttcaacagcagaaatggagcatggtctccatgaagccagaacagtgcgtacttctcaggctacaccttgccgaggcctcagcggggagtgtggggaggatgagcagtacagtgcagagaatttatgtcgcatctcacgcagtctcagtggcaccgttgtctcagagagggaggaagctccggtttcttcccacagttttgattcatcaaacgtgaggaagcctttggaaaccgggcaccgttgttccagctcctcttccctccctgtcatccatgacccttctgtgtttctcctcggtccccaactctaccctccccgggata

SEQ ID NO: 244243 - DNA, 658 bp, Homo Sapiens
  misc_feature (374)..(383): n is a, c, g, or t
  misc_feature (432)..(533): n is a, c, g, or t
tcaattcacaaaggtttattttgatgatttataaaagaaacattgccatagcaatttaaagctatttacaaatttaaaaataaatgtacataaatgtattcacatcacattaaacagttttaaaatattacacgtagtgttgaacaccaaacattaactaagttttaagccacataggtgttctgaaagcatgctcaacaaccacagccactggaggatggtccactgggaaaatatgaatttcaggaacccagaagtaaagatgattaccctagtctcaggtgaatgtggccctttaaaagtcactgttaacgtttaaactgcaacaccaaacttagatgaagacagactggaccaacagtgagaattaattnnnnnnnnnnttctcgtgtagcttaaaaacatagaacaggctgggcacagtggctcaannnnnnnnnnnnnnnnnnnnnnnnnnnnnnnnnnnnnnnnnnnnnnnnnnnnnnnnnnnnnnnnnnnnnnnnnnnnnnnnnnnnnnnnnnnnnnnnnnnnnnataccaacggaccaaacacagcacatagaaaatttaatactgtgaatccaatgtgagagtagatttaaaccaggatgatcttaatttgtgaattgactgggcatcgcacttttctttctttattc

SEQ ID NO: 244244 - DNA, 428 bp, Homo Sapiens
  misc_feature (403)..(403): n is a, c, g, or t
  misc_feature (413)..(413): n is a, c, g, or t
cctcctagccctcttacctaagtaattgacagacaagaacaactgaaaaagagagagagagaaaatgggaaaaatgtgtagtttggatcttaacaagattaaaagtgtcagtgatgatatgagatatgagtttctgaaatcctacacttgaaagattccacctgctttttttatagaccagactgagtgctccttaagttgaataccattgaagaagtgcctgccctaaaaccctggttttgcttgtcactaggaggcatcttattttcacttgaacacagctatttctagaggattcagggcctttgattgtgtttctgtttggtttcctttgtgtttgtgtgttgctggttgtgctgagatgtaggaatgccataggaaagtgtcaagtgatcctgctganggggtaaganggctaggaagggggt

SEQ ID NO: 244245 - DNA, 832 bp, Homo Sapiens
  misc_feature (191)..(199): n is a, c, g, or t
  misc_feature (631)..(640): n is a, c, g, or t
gaaatacatttttgacagaggcttaatgttttaacaaaagagtgtggacatttttattttaaaatttaggcaaaagtcactatcaaatggttgcttatttgtctcacacagccatatagtttttcctggagggttttgttttgttgttgttgaaaagactttgcttacagctagatgaaactttctatagnnnnnnnnnttgttgaaaggtccagttctcagtaccatgtgagttaatgatactacaactaagttctttttaaaaagtgattaatgtattttataaattaccttttcacatatgcaaaatctgtttctactacaatgttatttttactaatgccttattgttgcactctttttgaaatatcctgcagtgaatgtatgaatcaatttgggcttaaaactgaaagccagttggctgaaaggtttgaaatacgtaccccagtaaaaccattcaatcaataattggtaaataatattttaaaattgtttttaatctgtatagatgacattttgtagctttgtacatgttgttaattaagggcatataattttacactcaaagtataattgctgaactcaggggtgggtagacttcaaaaatatgtctgctatagaaataacttgnnnnnnnnnnttaaaaccgtggccagccaccaaattgtggacactgtttatatactgctagttaacaattaccacttttaaaaaattataaccgtttttgttctatcttgcctagataaattctctactatgatctctgtcagttttactagtggcctgttcaatcctagacagtaagtctttgtattaccctatatccttg

SEQ ID NO: 244246 - DNA, 857 bp, Homo Sapiens
  misc_feature (632)..(636): n is a, c, g, or t
  misc_feature (639)..(641): n is a, c, g, or t
  misc_feature (643)..(647): n is a, c, g, or t
  misc_feature (650)..(650): n is a, c, g, or t
  misc_feature (652)..(652): n is a, c, g, or t
  misc_feature (805)..(814): n is a, c, g, or t
gggagcgacgggcgcggaggtccggccgggcgcgcgcgcccccgccacacgcacgccgggcgtgccagtttataaagggagagagcaagcagcgagtcttgaagctctgtttggtgctttggatccatttccatcggtccttacagccgctcgtcagactccagcagccaagatggtgaagcagatcgagagcaagactgcttttcaggaagccttggacgctgcaggtgataaacttgtagtagttgacttctcagccacgtggtgtgggccttgcaaaatgatcaagcctttctttcattccctctctgaaaagtattccaacgtgatattccttgaagtagatgtggatgactgtcaggatgttgcttcagagtgtgaagtcaaatgcatgccaacattccagttttttaagaagggacaaaaggtgggtgaattttctggagccaataaggaaaagcttgaagccaccattaatgaattagtctaatcatgttttctgaaaacataaccagccattggctatttaaaacttgtaatttttttaatttacaaaaatataaaatatgaagacataaacccagttgccatctgcgtgacaataaaacattaatgctaacactttttaaaannnnnaannnannnnnaananaaaaaacttggcggcccgccttcgcccctcgaaaaatttcctaaaccatttcctttggggccccggggcccctaagggaaagggaaaatgggccaaaactttttcccaaggaaaaccccgggcaaagaaaaaggggttggaattccccccacnnnnnnnnnnccccccggggggaacccgaagggtttttaaaaaaaatccccaa

SEQ ID NO: 244247 - DNA, 550 bp, Homo Sapiens
  misc_feature (505)..(505): n is a, c, g, or t
  misc_feature (508)..(508): n is a, c, g, or t
  misc_feature (518)..(518): n is a, c, g, or t
  misc_feature (540)..(540): n is a, c, g, or t
ggtattaagcttactttttcccccaccatcagaagatttattttatttctaattaaaaaacatacagttggcaaactcaggtttaaaactaagcatgccaataataaatcaatcatttctccaagtacacagtgtttcccttgggaaggactgttatttcacaacatttttttccctctgatttagaaaaaaagataacatttaaagtattacaatgcctaaacagtgataccagtaatccagtttttatactgatacttgtatttcaacatttattatcaccaagactaacttaaagccaactcctttagtgaagagatttctttccccatttcagtactagacgcaatagttctgaatgtcactgagcaagtaatgggatatgagttattgataaaattaaattactaatggaagaggttttatctacctctttataattagctaggtcataggacttaaaaccaaaccatggaccaaaaccaaaccctatttcttacccttnaanggcgcatttncctttcacttaccggaaattgngaataaaatg

SEQ ID NO: 244248 - DNA, 265 bp, Homo Sapiens
cagcttccataatcctttgcttcaatctcctatcttagactcgactcattccacttcaagctcactgctttgactccacaagtccatcccttccactaccagtgcttcttaaacttccctgaaggtaaaaattacctgggatacttgttaaaaacataatttcctggactctatccacacatactgaatcagaatataggatgattttaatacatgtccgggccaggcacagtggtgtgtgcctatagtcccaacactagtagga

SEQ ID NO: 244249 - DNA, 358 bp, Homo Sapiens
ctgctcacagctgtggctgtgtggaggggctctgaggcctctgaggccagatgtgtaaacagtgctgaggttcagtaataggatgagtcttcaggtgtggagcagcccaccttggctctatcccatgtctctgtgttacttctcatattctgctgtcctttcaaacttcaaggacagtattaatttatactagtatttcttcctcagttttgtgacttgaatgcagtgagtgccttagaggatccaaggatgaaggaatgcgggttggtggttctctctttcagaatgggaacttcccaaaaatggggctgcgtctcgcctctcagtcggttccctacctctgggtcttccacccttc

SEQ ID NO: 244250 - DNA, 650 bp, Homo Sapiens
tggccggtctgcacaaagtactcatcttctcccagatggtgcgctgcctcgacatcctagaagattacctcatccagagaagatacacctatgagcgaattgatgggcgagtacggggaaacctgcgccaggcagccatcgaccggttctgtaagccagattcagaccgctttgtctttcttctgtgcaccagagcgggaggcctggggatcaatctcacagctgctgatacctgcatcatatttgattctgactggaacccacaaaatgacttgcaggctcaggcccgatgtcaccgcataggccagagcaaagctgtgaaggtgtatcgcctcatcactcgaaattcctacgagcgcgagatgtttgacaaggccagcctaaagctggggctggacaaggctgttcttcaggacatcaaccgaaagggcggcaccaatggggtacagcagctctcaaaaatggaggtggaggacctactccggaaaggtgcttatggagccttaatggatgaagaagatgaaggctccaagttctctgaagaagacatagaccagattctgcagaggcgaacgcacaccatcaccatccagtctgaggggaaagggtccacttttgccaggctagctttgtgcagcaccggccccgct

SEQ ID NO: 244251 - DNA, 271 bp, Homo Sapiens
gggggagaaaaatgttttagtacattataggcccagcagcttttattcatgtccaccagctagttgcacagagaatcatgtgtacctaactaaggatgatctaggataagtaactcctgttttatattgagtattttagggaagtctttaaaagacttgttttatatctataaatctaggttattacaaatacaagaattttgtaccttaaataagcctcatttctatttcttcttcattaattctccatctagtcttgtgtaaactgatt

SEQ ID NO: 244252 - DNA, 364 bp, Homo Sapiens
aatcagtttacacaaatgaatgctcatatgtaattgaaatacttcagatcacatgaaaatgctgatttaacatttaagtatcacagcattaaaagaaaaagaaagtaaaccagtcctttgtattcagttacctaatggggtgccatcaataagctgcgatacagccctggagctcagtcagccacaccttcctgcatcctattggccttattcattttaaatgagttaatgaatctgccagatctgtgaatgatagagattatgctaaattaatgctgattctttgtgtgtgtgggaaatctctgtagagcaccttttctttcttagactaagtaacccagtacaatagttgtgtaaactgatt

SEQ ID NO: 244253 - DNA, 255 bp, Homo Sapiens
aatcagtttacacaacgatgacagtagcacaaaatatacgtaatttctagatactgagctaataaatcactgtagttaaaaacaaaatagattcactgaaaccaagtcgatagttaccttggagtagtggactagctgcagaatgtcacggacccacttcctttaaaacaacagaatgttgctatcagtttgtcttacgtaaaatcagttcttaaaccacctactattgtgtaaacagattggtccgagctcgat

SEQ ID NO: 244254 - DNA, 847 bp, Homo Sapiens
cctggcttaactactcagccacagtcttcttagcagatggcaagaagctctgccaaagattttagtctaaacagacccctaggctgctgatgcaacatcaagcacagcaaaaggtcacccctttccggggggacggctactgaaccctggcattccaattagaaacgtgtttcaaggacacagttactccggcctcagaactctccaatgtgagtaggtaagtacaggggggattacaagtgaagccacaaaaaaacagtatttgatcagcaacaaaatatctgagactttcttaagctacctacggcacatactattttgttctatttctcatttctatcgtcagccgctcactcagctaaccccaggattcaaataggaccgctggtttttaatttgtgaatattcttatttaaaaacaaaacaagctctacttcagatgtccaaacaaaaatcacacagtagtaaaactgctacaaaatggtactgtcaacaggctggaggtgggggtatgggtgccttctgtgtgtctcagtcacaccgggggagttttgcttacctaattctgcttctgaaataagcaacatcaaaacagccaggtgtcaggaatgtgccatttaccgggtggtccccagactctgctgctccttcccagcattactaaggtttctctcccagattccccaccacccaccatacagctccctttgtgggattgatgcaaggtaggccccatcttgaagagtgacctagaacagggtaccagggcctccagctggaggcagagagagccacccctcctcaagaaacacccttgggtcgctagaatccgtagggtaccgagctc

SEQ ID NO: 244255 - DNA, 717 bp, Homo Sapiens
agctgtacttcaagaaggattgctcaaatataggtggacagcatgtggtgaagtacaagacttgcttgtgaggctcctctcagctgctgtatgtgatccaggtctaataacaggatacaaggctaaaacagctcttggagaacatttgctgaatgttggtgtgaatcgagacaatgtttccgagattttacagatatttatggaagcccactgtggacaaactgagcttactgaaagtctgaagaccaaagcttttcaggctcacactccagcacagaaagcttcagtcctggctttcctgatcaatgaactggcatgcagcaagagtgtggtcagtgaaatcgacaagaacattgattatatgtcagacttgaggagagataaatgggtggtagaaggtcaactccgcaagctcagaatcattcatgctaagtatacaggctaaagagacacttcagcgtggcattgatctgggagcagagcagcatcccttggtcactcccactccaggatgcaagcgtagaaggaagggaggatactgtgattatgacgatgatgatgacgatgacagtgatgaccaaggggatgaagatgatgaggatgaagaagataaagaagacccaaaaggaaaaaagactgatatctgtgaagatgaggatgaaggtgaccaagcagcagtcttgagacactcggggtcctctagagtcacctcagcat

SEQ ID NO: 244256 - DNA, 260 bp, Homo Sapiens
cagtgttcttcaagagcactgatttggcattaacgtaatcattgtatctttgaagcagaaaagttttcaccttatatgcctttgagtgcaaatactctctttgttctattcttttcttcagtaatttctgctgtcctgatacattagatctccattctttgtcctatatgtcactttttctgtcatcactttaatctgtttttgcttttcttctgcattctaggaaggtttctcaagtttgtcatcttgaagaacacgtc

SEQ ID NO: 244257 - DNA, 499 bp, Homo Sapiens
cgggtacccgaggtgtttcgtcaagacaaagtgtgtcttaagaatgattatatatccttacaagtgaccacatccttcgatgtgtggatctgatcctccttcacctagaaggctggggataagtcggaggcgacactagcataagtatgcattccgtgatcccatcatgaaaccactgaagcatgccaccacgtgctgaggctctattttagggtacctgagatagttaataaaacggtacatcctgccttgaaggagtttctgttcacatggttgcatcaacacagaccatgacatttgcaaaggaacatctcttgggtcatcgggaagcgcagctggtcctgtagctgatatgccttgcagagattagtttaaagactattgtcaatctattctaatttgtctagttgtttcatgatctagcaagaattattagaaccttcagcaatgcctggcttggatccaactgtccttcgagacactcgggtcctctagagtc

SEQ ID NO: 244258 - DNA, 223 bp, Homo Sapiens
ttactgtcagtgaaaaatcacaatttcaagaagacaattacaacaaactcatagagcacacataagaagtcaagttcacttaatggcaacaagtcagtatctgctgatcagtgacaggcagtgaaagtgcctttatccaggggtaaagtgaagaggcaaactatcctgttactttgcacacttgaattgttgcgctgatcaacactacaatcttgaagacact

SEQ ID NO: 244259 - DNA, 384 bp, Homo Sapiens
  misc_feature (117)..(117): n is a, c, g, or t
agtgtctgtcaagatctttgtctatttcctcagtggcatcaatcacctctggtggtcttctcccttggggaaaatctcccttccggttgctttcaaatctgtttgcatttcacctangaggcttaacctcctctagagccattttcctgctggggatatttctatttcagtttcttccaaatctatctctatttcctcaatggcatcaatcacctctggtgtcttcccccttgggaaactgtctcttccagttgctttcaaatccgtctccatttcacctagaggcttgacctcctctagtccattttcctgtggggatacttctctttcagtttcttccaaatctatttcctcagtagcatcaatcacctctggtgtcttctc

SEQ ID NO: 244260 - DNA, 103 bp, Homo Sapiens
gaagctggggaaggaagcttactaggtctacctctgcatctgcacagttctcctcctgcagtccctaagatctttacaaaaagccaaggcctctgaagacact

SEQ ID NO: 244261 - DNA, 499 bp, Homo Sapiens
gttctgcaagatcacagttaaacttgaaacccttgtttaatgaaaaaaggaaggttagggactagagaatttttgaaacaataattatgataggaatatcagtaacaacatgtttcctgaagctagtaaatgtaagtctaaagatatgaacagtcattgactcaatccagtctttgattaggactagttttttctctattagggctcttattttctactagcacttacttgtactcaacccttagtacatattctctcactttttagtaaccattgttatgataaattgataagccattcaaataaaattttgtgtgaattaatctgtttgccagagtgaaaagagtagtaacaatagggtaaacagtacacttgtggctctgagtcagggacttaaagtggtgcgcttagctgataacgcttctggtcacctacagtttgtttctgaaaactgaaaggagtttcagtggtgatagccgggatcacagtctgtctgtca

SEQ ID NO: 244262 - DNA, 530 bp, Homo Sapiens
cagaggctgaatggaagttaggccctgatagttctgttcgtactcctggggagtctagtgcaatatccatgggaattgtcagtgttagttctcctgatgttagttcagtatctgaattaactaataaagaagcagcttcacaacgacctcttagctcttcagcaagtaacagactgtcagtgagttctttgttggctgctggggcccctatgagctctagtgcaagtgtacctaacctgtcctcaagagaaacatctagcttggagagttttgtcaggagagtggcaaacatagcacggactacctgccacgaacatacatgcaatctagagccgaagacagcagtgataacaacactaatactttggggaggaatgtgatgagcacagcaacttctcctcttatgggtgctcagagttcccgtaagtctgaccacacctggtactacatcaacagtgactatgttaacatccagtgttactagcagcagcaatgtagctacagcaacaacagttttatcagttggtcaa

SEQ ID NO: 244263 - DNA, 265 bp, Homo Sapiens
ctaacgttactgctctcacacctgagaaaattctgcttttgtatttgcagctactagaagacagttctatcttcgtcgttgactcctagagccctctatgtgattcacagagtgacttagaatacttcttactctgttgaagtgtttaattgtacagaatatatgtactctacagtatatgtgaatcagcactcaaagcagagaagtgataacatcccaagcttcccccatacttctactgacatgccctcagtcttgaagaaca

SEQ ID NO: 244264 - DNA, 618 bp, Homo Sapiens
ccgacacagaatatatgaccttaggtataccatctactaaaaggtcaaacagcaatttcatcactcaagggagcttttccagagacataaaagagaagctttaagaagaaaaaggagctttaagtatatataaaaagttaagtctttatttaagataggttttcctatcctggtaattcagtgtgttcttttccataattaaatgatttttcctaattcatagcaacataatattctatgatatgcatgatttatactaacatgacattttaacacaatgcactatcgcagtttgatcctacataagtaactgttagattgccaatgccatttggttgatagcagtagcaagtgcccaagtgatctaaatacaaatgttaattagggataaccctaataatctagctaaaatgattccttagaaaggtagtccatgtttatactatttagtaagtaataaaacatcaaaatgcagaaaataactaaataatccagatatttcagtaagcaaaaatatggttactcacctagagtataaacttaaaaatcactacctaaacatctcagagtatttacatattaaacctaaatttaaaatgttttatttcctctactacc

SEQ ID NO: 244265 - DNA, 235 bp, Homo Sapiens
agtgtctcaagagatcctggactgaaattatgcgtcctggctttatcacaggatgtggccttctggcctcagtttttcagagtagagaatttgcttttggcttttctaggacgtgtgcagatgagaacttgctacaggcagatatgcttgagagctcaaaaggaaatggtgggaaagcctagattatatcaagtagttgtgtgatttcagtgaagtactattaaatcggttttat

SEQ ID NO: 244266 - DNA, 165 bp, Homo Sapiens
ccgcctggaaggtatactgaaccgttgccagaaggagtttgaaaaagataaagcagatgatgatgtcttcagtcagcattttgatgtttaaagagttctccaataaacttgatgttgccaatggatctccgccgggctttgtccttggcttcttccagttcatca

SEQ ID NO: 244267 - DNA, 204 bp, Homo Sapiens
tattctctactgttaattaattgagaagccataataaaatatctcagtgccatcatgcattagatcaagtttatgttaccacattatttttttggacattgtgagtcaatattaccaagtggacaaaatcccaggcattttttcctcatgtaaatttttaattttcatgcttatatacttagaacatttatcttgaagtacact

SEQ ID NO: 244268 - DNA, 257 bp, Homo Sapiens
gctttagaggagagaatcctgagttttaacgagataagatagcatgatgtctctcatttttaaaagaggtttacacattaagccattactcatcaagttcctaaccgttgaatgttaacaaagaatagttttctgaccagacagagccctttttctcccccagagacttcatccaattaaactaaactaggtgtgcttctttagtacatacgtagtgtagcataactgctatttcttcgtgcatgtcttgagacact

SEQ ID NO: 244269 - DNA, 609 bp, Homo Sapiens
ggactcccgaggcatccccagtgttgtaaagagttagattgagtggcaagcacagaagaaacattgaggttgtcgtatggccagaattatgcttctgtgtgtctgagacccgaaggcctctctgggttcaagaagaacttgatagaagatgacataatctcagatccagatagtcatttccctgcctggagggaatctcagaacagcttggatgagtctttaccttttaggggctcaggtacagccattaaaccactgccaagttacgagtaatttgaaacaagaaactggaacgttagatctgaggatcaggggagttttacagaggacggtatgttttgggtgaagaaagcaccatatcacaagactcagaagagcatgattccacctttccactgatagactccagttcccagaaccagattagaaaacgcatcgtacttgacaagttgagtaaagtgttgcctgggcttctggttcctcttcagattaccttgggagatatttacacaccacttagaagtcttgttcgaactttcaggttaacaaatagaaatattatacacgaacctgcggaatggacttgaattgctatggtgttgctgtcat

SEQ ID NO: 244270 - DNA, 154 bp, Homo Sapiens
ttccaatttttttcaatagggtattgatgcttctcaagtgaagtatcattaatggttccttaaatgtggccaaaccagtttaagtatttttgtttccatattttaggttgatattttgatgtttttttgtcacatgggggaactatctgaagaa

SEQ ID NO: 244271 - DNA, 330 bp, Homo Sapiens
tgttttcaagacgttgtgtccggagcttgttccttcagatgttcagatgtgtctggagtttcttccttccggtcggttcatggtctccctgacttcagcgagtgaagccgcagaccttcgcagatgagtgttacacctcttaaaggtggcgcgtctgcagttgtttgttcctccgggtgggttcgtggtcttgctgacttggggagtgaagcggcagaccttcgcagtgagtgttatagctgttcaaggtggtgcgtccagagttgtttgttcctcccagtgggttcgtggtctcgctgacttcaggagtgaagccgcagaccttcgtag

SEQ ID NO: 244272 - DNA, 332 bp, Homo Sapiens
tcagcctggaaggttatatttaaaaagaaagtttctcttttgaatattgccacaagaataacgggcggtgggaaatctggaacagtgtcttctcagaaacaaccagccttgaaggctacaagtggcaaggcagattctgttttgaatatagctacagaaataaaggatggactacaatgtgggacagtgtcttctcagaaacaaccggccttggaggctacaagtgacgaggacgattctgtttcgaatatagccacagaaataaaggatggagaaaaatctgggacagtgtcttctcagaaacaaccggtcttgaagaacactgggtaccg

SEQ ID NO: 244273 - DNA, 284 bp, Homo Sapiens
actagcccacctgaatggttcgctctgccaagaggtgaatgggctaaaaggctcactcttggagtttactttcaccatgtaatctttaggtttagagtaaagggaagcaaacgtatccataaaactatgcactgagcatatgcgctgtgtgcacatgaagtcactgagggaggagacacttaattttgctaccagcaacatttggacaatcggtagatgcagggcctggatagcaaagccgcattttaaaagggcgctctgtgtccggccaggtggggctacgt

SEQ ID NO: 244274 - DNA, 975 bp, Homo Sapiens
  misc_feature (700)..(700): n is a, c, g, or t
  misc_feature (812)..(831): n is a, c, g, or t
  misc_feature (836)..(839): n is a, c, g, or t
ggggctgctctgctgcctgcccggggtaccaacatggcccagaagcgtcctgcctgcaccctgaagcctgagtgtgtccagcagctgctggtttgctcccaggaggccaagcagtcagcctactgcccctacagtcactttcctgtgggggctgccctgctcacccaggaggggagaatcttcaaagggtgcaacatagaaaatgcctgctacccgctgggcatctgtgctgaacggaccgctatccagaaggccgtctcagaagggtacaaggatttcagggcaattgctatcgccagtgacatgcaagatgattttatctctccatgtggggcctgcaggcaagtcatgagagagtttggcaccaactggcccgtgtacatgaccaagccggatggtacgtatattgtcatgacggtccaggagctgctgccctcctcctttgggcctgaggacctgcagaagacccagtgacagccagagaatgcccactgcctgtaacagccacctggagaacttcataaagatgtctcacagccctggggacacctgcccagtgggccccagccctacagggactgggcaaagatgatgtttccagattacactccagcctgagtcagcacccctcctagcaacctgccttgggacttagaacaccgccgccccctgccccacctttcctttccttcctgtgggnccctcctttcaaagtccagcctagtctggactgcttccccatcagccttcccaaggttctatcctgttccgagcaacttttctaattataaacatcacagaacatcctggannnnnnnnnnnnnnnnnnnnaaaannnncctgtcggccgcctccgcccctgaaaaactttctaaaccatttcttttggcgccgcgggccccagaaggtaaagggaactgggccttacctggttccctaagaaaaaccctggccatgaacaagggcttgggaatt

SEQ ID NO: 244275 - DNA, 997 bp, Homo Sapiens
gagtctcgtaccactgggaggcacatgacttcgggagccgaaacccgggacaggaggactgcttcacgagatcggtcccctgtcatcgccctcactccatgaggagatccacctatgaccttgggtcctcagatcaaccagcccgaggaacatctcgccaatttcaaatcaggtaagtggtcttttcactctcttctccagcctctcgctacccttcaatctccctctcttgctatccttcaatctccctgtccttccaattcccgttctttttcctttctagtagagactaaggagactcattttatctgtggacccaaaactccagtgtcagttatggacttgggaagacattcttcccttggtgtttaatcactgtggggacgcctgcctgattattcacccacactccattggtgtctgatcactgcggggatgcctgccttggtcattcacccacattcccttggtggcaagtcagttgcggggatgcctgctttggctgctcacccacattgcagcccagggctgctcaatgccccccgctgccccacccgccttctccgtgcctctaccctctcttttctcgggtttacctccttcactatgggcaagcttccaccctccattcctccttcttctcccttagcctgtgttctcaaaaacttaaaacctcttcaactcacacctgacctaaaacctaattgtcttattttcttctgcaacaccgcttggccccaatacaaactcgacaatggttccaaatagccagaaaacggcactttcaatttttccatcctacaagttctaaataattcttgtcgtaaaatgggcaaatggtctgaggtgcctgacgtccaggcattcttttacacattggtccctccctagtctctgctcccaatgtgactcatcccaaatctttcttctttctctcctttctgttccttcggtctccaacccaagttccgagtcctctgaatccttcttttctatg

SEQ ID NO: 244276 - DNA, 449 bp, Homo Sapiens
agcccacctgctgtagaacgaaacctctggctgctgccctgcaccttataggccagctctctcaccccttatcactgagcataaagatcattctcacccaggccacaaacatgctctttgtttccagggcttagagaatcagggaaggcttctaagcaaagtgccatctccaatcctgtaggagcagccaggccagggtgagagtgctctggggagggaggccagcctgtccaaaggctttgcagtgagcaaaagcaggatgcactttgggagctggaataactgaggcatggctggaacagagttggggaagtgtcaagaaatgaggccagggaggcaagcaggggcccttcagttccctactcctcaaagtgtagcacaaagaccggcagcactggtgttcccaggaagcttgttagaaatgcagaattgcagatttagtgaataca

SEQ ID NO: 244277 - DNA, 326 bp, Homo Sapiens
tcctcccattctttcggtgtttgacttgggtgttctcctatagaattaatacatactaggtatggtagaattcttatttttagtcactggccttactgttccttaaacatttcaagtttttgccttagggcctttgcatttgctgatatctctgtctggaacattcagcgcccaaataatcaggtggtttgccccttctgtacccatagttaatgtacacagcttgctagcttactacatttatgtcatgcttattccttgaccctccccacccaaatggtgcccccccttccatcactctcctcttacccttctgtcgtcttctc

SEQ ID NO: 244278 - DNA, 539 bp, Homo Sapiens
ttttgatatagaaatgtaccattttattacaaagaggctcacaaaaatgaaaatagtatctcaaaaaggaaactagactagcaacctccacctgcagaattaggagaagacagacagagggcaggcagtgtttcttggctcacttgaggccagtgggaaggtacgaaaacagaaccaatctaaaaatggctgatgttactttaggagcctgaaaaaaacaggagatccttgaagacccagccaccccttctagaatgttcaataagggcacctttccaaagctactaagcaggcacttggcatttcaggagtttgtcttatggttgcataaaagtatccctttcacccagacctggcaccctttatggttcaaagttaagaacgggaagaatgggtggcaaggtggctcctgaagagctcaaccatcacagctgccctgagctctgggccttggtttctgtcccctgggatattaatatataattaattttatataaattcacagaaaaattgaaaatttaaatttgagggggtgggga

SEQ ID NO: 244279 - DNA, 928 bp, Homo Sapiens
agtgaactcgtgatccgcaacttgtaccacctgagtccccccgtacgaggcaacaagtataccccaccaggccctgagtgactagaggaagaggacgaggcttgttggcactagatttgggtattttctgcatgtcataacatatcctaactgctatttcagaagaggcagcttgtaggtgattgtacaagtgagaattaaagagagaacagatatttaaccaggtgctgtattagtaacagccagtgccctttcagcccttgcatctattaaaaggagattcaggattttatatggcacaggcccttcttagtaggaagaaagggtgcttagcttttggacctgaccgggtgtgtgtaaaaccatggactgagtcacagcagacactcgatggtggtaaatgtgatgggtgcttacacactgtaccttttcctttcatactgatgctgcagttcagggctggagttgttaaggcattgacctccacccacctgccccatgtccactgggctgcccaagctgcatgtcacctgagggctggcaggaaggggcgagaaatcccagggcattgtaccaaggacctagttccttctagggatataaatttccaggaatgtgtatttttaatgtggtgagatgcactcttttgttgtaccaaatagggctccccaccccacccctgcgacaagtgctcttctagaacaggttcctaccagcagcactggtgtgaatgaaagagagacccagccgcgtctcacacaggtggaattgcacttcttaacaaaaaggaactttataaaagtttgggattttttttcctaatcataaaaatagccccagaaagagcctaagctatgttcagatagaagcctcgaaattcctgtgaattgtttactttatgatgtttacatacacgttttcactttgg

SEQ ID NO: 244280 - DNA, 634 bp, Homo Sapiens
tgcattagaggatccccacctctaccccacggggactggtcattcaagattatgatgctgataagatgtttccagcttttggttttggcgctcagatacctcctcagtggcaggtatcacatgaatttccaatgaacttcaacccatccaatccctactgcaatggaatccaaggcattgtagaggcgtatcggtcttgtcttcctcagataaaactctatggaccaactaatttttctccaatcataaatcacgtggccaggtttgctgctgcagccacgcaacagcagacagcttctcaatattttgtgcttttgattattactgatggtgtgatcacagaccttgatgaaaccagacaagctatagttaatgcctccaggctgcctatgtccatcataattgttggagttggaggtgctgacttcagcgccatggagtttctggatggtgatggtggaagtctccgctccccattgggcgaagtggccatcagagatattgtccagtttgtgcctttcagacagttccagaatgctccaaaagaagcacttgctcagtgtgcttgtccagttgtgagctgtcctcggtgttaccgaggctgtgcctagagagtggagatttctgatgaaag

SEQ ID NO: 244281 - DNA, 1342 bp, Homo Sapiens
  misc_feature (129)..(129): n is a, c, g, or t
cgagctgctcttgaggatcccattcgtcaccagggctggctggggactaggcgtctgttcctgatgcatgtgtgtggcaccaacctgcattccagagtctggcggagacaacagcgtgtttgacatctnttgaactcaccggggccgcccgcaaggggtctgggcgccgactggtgaagggccccgacccttccagcccagctttccgcatcgaggatgccaacctgatcccccctgtgcctgatgacaagttccaagacctggtggatgctgtgcgggcagaaaaagggtttcctcctttctggcatccctgaggcagatgaagaagacccggggcacgctgctggccctggagcggaaagaccactctggccaggtcttcagcgtggtgtccaatggcaaggcgggcaccctggacctcagcctgaccgtccaaggaaagcagcacgtggtgtctgtggaagaagctctcctggcaaccggccagtggaagagcatcaccctgtttgtgcaggatgacagggcccagctgtacatcgactgtgaaaagatggagaatgctgagttggacgtccccatccaaagcgtcttcaccagagacctggccagcatcgccagactccgcatcgcaacaggggggcgtcaatgacaatttccagggggtgctgcagaatgtgaggtttgtctttggaaccacaccagaagacatcctcaggaacaaaggctgctccagctctaccagtgtcctcctcacccttgacaacaacgtggtgaatggttccagccctgccatccgcactaactacattggccacaagacaaaggacttgcaagccatctgcggcatctcctgtgatgagctgtccagcatggtcctggaactcaggggcctgcgcaccattgtgaccacgctgcaggacagcatccgcaaagtgactgaagagaacaaagagttggccaatgagctgaggcggcctcccctatgctatcacaacggagttcagtacagaaataacgaggaatggactgttgatagctgcactgagtgtcactgtcagaactcagttaccatctgcaaaaaggtgtcctgccccatcatgccctgctccaatgccacagttcctgatggagaatgctgtcctcgctgttggcccagcgactctgcggacgatggctggtctccatggtccgagtggacctcctgttctacgagctgtggcaatggaattcacagcgcgccgctcctgcgatagcctcaacaaccgatgtgagggctcctcggtccagacacgactgccacattcagttgcggtatcaccaggatactctagacagctctgca

SEQ ID NO: 244282 - DNA, 520 bp, Homo Sapiens
tagcttgattgccaccattagtcagatttgaataacgaggttttgaaaggataaaaccttttctcctatgacaggattatataattgctattggcaatgtagcctggtgcttcatgagacctatgctaaatgttactggagagttcttgaagccagggataccatatcaggtactattcaggatctatgatattttctgaggtaactgggtaatagaatatcaaattgctgctatctcggacctattgttagaggatgatgctttgcgtatgtaataggatatatcctaatgtggggatgtgtatatttcagggactttaattcacaagtatatattgatatctgatgtgtgtatagtacatctgttggttatgtacatttgagtttacatgttgtgtagaacatagatgagaactctgggaaaacttgggaagggaaccaaccaaaatcatttttaagtcatttattagaaatttctcaatatggtgtctttttcgttttgaaactctaaacacttcag

SEQ ID NO: 244283 - DNA, 813 bp, Homo Sapiens
  misc_feature (103)..(115): n is a, c, g, or t
  misc_feature (269)..(269): n is a, c, g, or t
tttttagggaaattattccgcttcaaagagcagttggaagtggagagtgagggattaatagaatcagtaactaggttgctgagagaagtctcctgtgattagnnnnnnnnnnnnntgtagtaattacattctgtggagactaagagaactcagaaaccatggtctgcgcttcatctttatttctaatggagagagatgaaataaaatctgtggatgtaccagaaggtcatttaaggccttccctgtgatgagtaaagcaatcctgttcncagagggaggaaagatacgtagagaaagcttccttcaaacacttaaactgctgaaatagttataattcccagtaaaagcaggagcaagagaaaagctgcaggagattctgtcgggaggtccgtgaacaggcctggaacctggggcttttgccacttgatacagagtgagggagaacttcaggggccttttgacttggagagacggcggctgtggggaggatcaagtactggcaggggagtgcagtctctggaatcagacaaatggagttccaagcctggctccccttgttgctccagcataggtttgtgccaaatatcccacacctctaggcttcagcatgattcttctatgaaaggggttaataataaagagggaaggcaatgaacacctggtagggagggactccctctgccttccctcgcaaatgtgagggttcatgatcacagctgatacagctatcgtagccatggtggcgaatagtccacttgatcactagatgtgtggagagtgtggactgctcacttcaactccatccaacaacat

SEQ ID NO: 244284 - DNA, 379 bp, Homo Sapiens
gtggtgcactgtgtcgtggtgcactgtgtcgtggtgaatccaagagattatctggggccagcattaactatgggtcagcatggaacactgagtatgatgtgcagcaggcacctcaagaagatggaccttggaccaaggctgtaactccacctgtgaaagatgataatgaagatgttttctctgccagaattcagaagatgctgggaagctgtgtatctcatgcaacttttgatgatgatcttcctggtgtaggcaatcttagtgaatttaaaaagcttcctgagatgataagaccaacagagtgccatatcaagctttagagtgaagtcccgggtcccaacccgacacagggaatcctgggagtacctcagcatctgct

SEQ ID NO: 244285 - DNA, 548 bp, Homo Sapiens
  misc_feature (124)..(135): n is a, c, g, or t
taaagggttttttgggagaaaagagagacacacagagttttggattttgaaaattttgaggaaaactttataaaacccctggggagaagagaattagaaggggggggccacgagagaggccacnnnnnnnnnnnngcttttgtttccacagtgacattctgaaagttccctaacctgaacctataccagagcgctaaagaaccttctccggaaaaaaattccaaaaaagaaaaggagaaggagaagacccgaccacgatctcggtcacgctccaaatcaagatcccggacgcggtcccgctctccttctcacactcgacctagacggcgccatagatcccgatcaagatcgtattcacctagaaggcggccaagcccaagaaggcggccatctcctcgaagaagaactccgccacagaagaatgcctcctccaccaacggcatagaaggagtagatctccagtaagacgaagaagacgttcgtcagcatccttgtctgggagtagctcatcatcctcttcatctcgttcacggtcacttgtctgagta

SEQ ID NO: 244286 - DNA, 434 bp, Homo Sapiens
aacagtctgtactttcatttattaaatgcagctttcgctggtcacattgcaactcaatacaaacagcccagcagagggtagggcattaactcttgttctcatcaatgtaaacacaatattaatattgaagattaaagaaaatgggtaaaaagtccagtgtctcctcaatctgtgtgaaggtgaaggtggttgcctacccttggacaggtgccaaagggagactgaggttgtcacctcttcccatccacagtgaagcaggcaagaaccagaggaacccaatcactttcttcctgtaggtctccagatggatacgtgaatcttcagaactgggctttcatgaattatgaaagttcttcgaaaggcctgagaggttcgtaccttgtgtgtgcactgaagtagttccttcaaagccctttcccatgaatcagtcactg

SEQ ID NO: 244287 - DNA, 622 bp, Homo Sapiens
tcaactttcagttccccacttcagttatgagagagaagcagcatttgctgagcatagacgagcctctcttccgatcctggtttagtctactacctctgagtcacctggttatgtatatggaaaacttcattgagcacctgggtcgttttcctgctcatatcctggactgtctttcagggatttactaccggcttccgggacttgagcaagtcttgaatacgcaggatgttcaggatgttcagaacgttcagaacattttagaaatgctgttgcgactcctggacacttaccgggacaagattcccgaggaggccttgtcaccaatcctacctgactgtgtgtctgaaactgcatgaagccatctgcagcagcacaaagctacttaagttttacgagctgccagccttatctgccgagattgtctgcagaatgattagacttctatctctggtggattctgcaggacagagagatgaaactggaaataattcagtccaaacagtcttccaagggagccttgctgctacgaaaaggtggctccgagaagtttttacaaagaacatgctcacatcttcaggtgcctcattcacatacgtcaaggaaatttgaggtctggaggcgg

SEQ ID NO: 244288 - DNA, 611 bp, Homo Sapiens
cgaatggctgaatcgatgctggccattctatgccacatcctccgaggagaaccctgtgattcgagagagactaagcaaggagaaggaggggtctcgaggagaagaggatacagggcaagaggaaggtggctcccgccgggaacctcaagtcaaccagcaacaactgcaacagctcatggacatgggcttcacaagggaacatgcaatggaggcactgttgaacaccagcaccatggagcaggccacagagtaccttttaacccaccctcctccaatcatgggaggagttgttcgggatctcagcatgtctgaagaggaccagatgatgagagcaattgctatgtctctgggacaggatattccaatggatcaaagggcagagtcacctgaggaagttgcttgccggaaggaggaagaggaacggaaagctcgggaaaagcaggaggaggaagaggctaaatgtctagagaagttccaggatgctgacccgttggacaagatgagctccacactttcacagatactatgttgccaggctgcttccaccttcttgatgagctgccagtacacagtataccgtgtgtgtgacctgataatgacggtaccgactc

SEQ ID NO: 244289 - DNA, 441 bp, Homo Sapiens
gggtcagagatctgttggagagagagaataaagagattatttttcattatttttaaatggttgtttttgttttaatttgcacagctacacagaggaaataacttaggcactttctgttttttttaaaaaaataataaggtctcatggcttcatttagagaccacagtaacaacagcagcccaccaatcagagaagctggttgttattaaccaagctacagattcacactttctggcctaaaccctaatgggatgaggcttttcaccccaggccatgctggtggtgattttttagcccctaaataaaacactggactatttcctgtttacttcattgattgcaactacaaaggtggactcaaagcaaagcacaatcatgccagcgaacattccagatttctgctgagaactccaagtcttgtgacggtgagaggtttttaca

SEQ ID NO: 244290 - DNA, 1042 bp, Homo Sapiens
tctcagcaacttcctgaagagacttggccctcttgaaactaaaggctgaacaagaggctctggagagtcagagacaattagaagaaacccgaaacaaagcagctcaggtccatgcagaatcattacagcaggtggttcaatcacaacgggaagtaactgaagtcctgcaggaagcaacgtgtaaaatagcagctcagcagtcagaaactgctcgcctcaccacagacgcagcacgtcaaatctgtgagatggcagagttgactagaactcatatctcagatgctgtcgtggcttcaggagctccccttgcaatactgtatgaccaccaacggcagcaccttccagactttgtgaaacagctgaggaccagaactgaaacagataggaaaagtccatctgtttcactctctcagagtaaagaagggacccttgactcaaagcatcagaagtattctgcttcatatgatagttattctgagtcttcaggatacaagaatcatgatagaagaagtagcagtggtagcagccgccaagaaagtccttcagttccatcttgtaagggaaatgagaagaaacttaatggtgaacagatagagagttccattgatgaacaggttcagactgctgcagatgagtctctacgaagtgatagtgttccatctcttcctgatgtaaaagactcaacgtctattgcaacagaatattctctgaaatttgatgaatccatgacagaagatgaaatagaagaacaatcatttcgatcattactaccttcagagagtcaccgcagatttaacatggaaaagagaagaggtcatcatgatgactctgatgaagaagcttctccagaaaaaactacactgtctactgccaaggaactgaacatgccattctcaggaggacaagatagcttttctaaatttactatggagatggttcgacagtatatgaaagaggaagaaatgagggcagctcaccagtcttcactcccgcgtctccgtgtaaaggccttgaaggagaagactaatggctgaattcgcct

SEQ ID NO: 244291 - DNA, 640 bp, Homo Sapiens
agggggaaccgcccccaatatatcaaagtaggttctttctattttccctaagtgtcagccagctgagaaatacagagaaagagtacaaagagtggaattttacagctgggcctccagggatgacatcacctatcagtaggaccgtgatgcccgcctgagccgcaaaagcagcaggtttttattaaggactttaaaaggggagggggtgtacgaagagggagtaggtcacaaagatcacatgcttcaaacagcaaaaaggagaacaaagatcacatgcttctgaggccagtaaagaccacaaggcaaagggcaaagcaaagatcacaaggccaagggcgaaatcaaaaactcctgatatggctgtattctgcccaactccttaggcagtcacaccttatggttgtcttcccttgttccctaaaattgctgttattctgttctttttcaaggtgcactgatttcatattgttcaaacacacatgttttacaatcaatttatacagttagatacaattatcacagtggtcctgaggtgatgtacatcctcagcttaggaagataacaagattacgagattaacgtaagacaggcatgagccactgcacctgggctattacatctgtaatgttactatatcaca

SEQ ID NO: 244292 - DNA, 423 bp, Homo Sapiens
tctcctcttctgatccaactgaaatttcctctggccagaaacataccatcataccctgacacccaagcagtcaatgaatacctacggaaactgtcagatcattcagtaagagaggactcagagcatggtgaaaagccaatgccatctcagcctcttttagaagaagcaattcctaatctccacagcccgcctaccacaagcacctcagccctaaacagcctggtggtctcttgtgcatctgctgttggtgtgagagtggctgctacttatgaagctggtgccttgtcactgaagaaagttatgaacttttatagtacaaccccttgtgaaactggagctcaggcaggcagtagtgccattggccccgaaggtttgaaagatagcagggaagaacaggttaaacaggatcaacgggagcaacgg

SEQ ID NO: 244293 - DNA, 427 bp, Homo Sapiens
  misc_feature (53)..(53): n is a, c, g, or t
  misc_feature (104)..(104): n is a, c, g, or t
agggaggctctctgtaggcacagagctgcactatcacgagcctttgtttttcnccacaaagtatctaacaaaaccaatgtgcagactgattggcctggtcattngtctccgagagaggaggtttgcctgtgatttcctaattatcgctagggccaaggtgggatttgtaaagctttacagtaatcattctggatagagtcctgggaggtccttggcagaactcagttaaatctttgaagcctatttgtagttatcttagaagatagcatgggaggtgaggatatccaaaaacattttatttttaaacatatcctcgtgtaacaccttggctctctggtacctagtgaggttagctatcaatgttctctcccagggttagacattcatatcagacgctccagttttgcatattggattgtgtaaagta

SEQ ID NO: 244294 - DNA, 285 bp, Homo Sapiens
catcccgtcgtgaagttagtaataatccccaactctcctgttcctcctcacttattaagacttcagataagccacttatgtaccgccttcccttatctaccccctcacctggaaatggttctcaagggtcccaccccctggtttctaggacagtacctagcaccactacctccagtaactatttagccaaggctatggtgtcacagatctccacgcagggtttcaaatctcccttctcgatggctgcctccccaaaacttgccgcatctcccaagcctgccacat

SEQ ID NO: 244295 - DNA, 393 bp, Homo Sapiens
gatatttactgcctcacccaggactatatgatgagggatggatttgaagttacattctcttagcctaaaactgtctacttaaagctaaggaaagtattggagataaaagcgtgcaagcagactctacacagttgggcaagtaaccttttgtaaaattttaactttggccaaaatgcccagttgctttttctaaagaaggtgcttgtattagagacaaaaaataaattactaactatattaaatgatgtgccaaaataggtaccctcacatttaattgtacctttctctggtttatattaacaaacacaatggtttgtcagaatttttccttaaaacaaagttttgggtggggaaaagagttattctttaattcatacaagaccgcgcttggca

SEQ ID NO: 244296 - DNA, 782 bp, Homo Sapiens
  misc_feature (173)..(173): n is a, c, g, or t
ttattcactcaagtgtttagatgtagccttgcacacaatttgcttcaactacataactaactgtttcaacttcttgagaaattagaagcttaagctgaaatgtgcttgagtatttatatgcactatgatgctagtttttcacattctttgtaaagttaagggctgggggaggncagaggttattgaaaccagtaaaaggatacactacaccagttatctggtatgatataaagacatgtgattaaatttgggtgatttaaaacatgttttctagaatgaaaatcacaaagattcactttggtgaaaacatttgctaggtatcctattatattcaattaattaaaaacaaaaacaaaatcaaatgaatgcatcccccttctccaaataaaacaaagctctaattttgtctgtaaactgaagtttagatgacacataatttttatctcagaatcctttgggttaacattgaagattggaataaccaaaagtattaaactattcttttaaagaatgatgttttaaaacttactagtcaggcattagaaaagttatcaaatcttttcacagtatcagatttggcaaatttgcatcaaggtaacgtggcaaaaatcctataattcaaactatcaactcatttgtctccctcatatcttctttcacatactgggcgactgagtaacatgcattaacttgtattctgagggaggagctgatctttatgagacacttgactgcggacgcgtggtcgacgatatcccggtaactccgggccgtaccagcct

SEQ ID NO: 244297 - DNA, 450 bp, Homo Sapiens
  misc_feature (228)..(240): n is a, c, g, or t
gatagaagctgtcaacaggtgttactattaaccacttgcaattgattgtaaggccaccatcttttctggaatggatggtcaaaatagctaataatttcttgtgtccctggaagttttaggatgaatttaaataggaggaaaacaggaagaccagtattttcccaaacatgataagacaatcattttttttaaactataagtgatacctcagacacatggagttggtannnnnnnnnnnnncctttggtgtctgctcccagactagaactaaataaccaaagtaaatgcttggcacactctcaaggaagcacagctctgccttgcaccagtgccagaagcctctagaacagtgacggaggcaaccagatgaagaagacgagacattcctctcccagcagcgtgagagacacctggcgactgctggcaggaatcagcatttcacattgggcg

SEQ ID NO: 244298 - DNA, 406 bp, Homo Sapiens
  misc_feature (174)..(225): n is a, c, g, or t
aaaacacaaaaagcaagcatctacaattttttttgataaagactttttatgccaggaatggattaattaccaacaaaatttatactaatcaggctgatgtcaatctatttttgtaatgtatcattaacaaatttattttggaaaagataaaaatattgccccttgataataaannnnnnnnnnnnnnnnnnnnnnnnnnnnnnnnnnnnnnnnnnnnnnnnnnnngatattctaagacaaaaaaatggttaatcttcagattaataaattaggtcattataataataaattaattttttttaaagttcagcaacctctgtccaagtatttacaacaatacttgaaagttcctttacaaaacagaacacattttcttttcacgttaagcatactgggtatctgtgtc

SEQ ID NO: 244299 - DNA, 137 bp, Homo Sapiens
aaccttaatatactgtggactaatttccatattgtagatactcctctgatttcttgaaatacctgtattctgttgctttataccgtgatttatttgaacacttctccgttgttaatggagttttgccatgtcacact

SEQ ID NO: 244300 - DNA, 400 bp, Homo Sapiens
tagcgacggcacagtgaactctgaattttggctgctttaacacgaagcaagcctattcttcattttcctttgactataataaattgtatattttcttgtattatccgtatttcaacagttcaatctttaaagcagaacattgcttctacttccattaacatacaaaacatagaaatcactttggtaaatttaaacatacaggctaattagcattctcttaaatataggtttataatggtatcaaatgaaatccattcataagccagttgattagtaagttttagtccacttccattttactaaactgcttggtgtatgtatgcatcaactagaatttcctgcaaatgcttggattcatttcaggattcattaggcataagacattaactttggttccctt

SEQ ID NO: 244301 - DNA, 564 bp, Homo Sapiens
ggtcgtcatcttctgaatccgagtgtggggggattctcgacctgctaacagaactggacctttatcgtgggagccaagaagaaaggtttgctcccgggtggaacagggattatcctcctcctccccttaagagtcatgctcaagagagacactctggcaactttcctggcagagattcacttccctttgatttccaggggcattcggggcctccttttgcaaatgtagaggagcattctttcagctatggagctagagacggaccgcatggtgactatcgaggaggggagggacctggacatgatttcagggggggagatttttcgtcttctgatttccagagcagagattcatcacagttggacttcaggggtagggacatacattctggggattttcgggatagagaaggaccacctatggactataggggtggagatggtacttctatggattatagaggtagggaggcaccccatatgaactacagggacagggatgctcacgctgtgacttcagaggtagggatgctcctccggtactgagctcgattcgtatatgtat

SEQ ID NO: 244302 - DNA, 749 bp, Homo Sapiens
tctgcagcggctgattgacagtcagatggagacctcgtgcaaattacatttgagtttgtagaccaggaacagttgaaagatccagtgtgctaccttaagaaggcatttctcctggtacaagacataatggaggacaccatgcgcttcagagataacacccccaatgccatcgccattgtgcagctgcaggaactctctttgaggctgaagagctgcttcaccaaggattatgaagagcatgacaaggcctgcgtccgaactttctatgagacacctctccagttgctggagaaggtcaagaatgtctttaatgaaacaaagaatctccttgacaaggactggaatattttcagcaagaactgcaacaacagctttgctgaatgctccagccaaggccatgagaggcagtccgagggatcctccagcccgcagctccaggagtctgtcttccacctgctggtgcccagtgtcatcctggtcttgctggccgtcggaggcctcttgttctacaggtggaggcggcggagccatcaagagcctcagagagcggattctcccttggagcaaccagagggcagccccctgactcaggatgaccagacaggtggaactgccagtgtagagggaattctaagctgatcacagaacagtctctccgtggaggaacatatggggcgtcaccacaaccctcctggcatctcctggatgggttgcctccacagagtctgctgcagagtgacacacagcgg

SEQ ID NO: 244303 - DNA, 625 bp, Homo Sapiens
  misc_feature (505)..(505): n is a, c, g, or t
  misc_feature (572)..(572): n is a, c, g, or t
  misc_feature (603)..(603): n is a, c, g, or t
  misc_feature (610)..(610): n is a, c, g, or t
cgagtgggtccctgctgggcgatggccaggccggctctctcgctgtacattctgtaaaggtgtcttctcttctcagactcttcctctgtcacacgtctgactccttcacgtcaggctcaggttccatgggaggacgaagcagtggacgcattgtgggctttagggacagatgagttttccagatagtgtcagcttatttgaagattaattttctttgttaacttaaaataactattttaacccttgagtggcttctttttaaaccaaaaaccgtctttctttgcttttttatcacagcagaatcaggatctctttctcattcaagggggggaccaccccaggtcagcgctgcgcctgctgtggccgccgcgagccacgccctctgggatctctggtaccgtcactcttgcttgtgccttccacaccttctcggtgcagatccctatgggggaagctgcctcacgttctctgactggtcagagcagcgcctgggtggggtgttccngggcccactcttcctcttcttccttcttgcagtttttaaaaccacagtcttataaaggcccgagttnaccaggggacggccttttctgggcaacaganagggggnttgcttttgggaagc

SEQ ID NO: 244304 - DNA, 520 bp, Homo Sapiens
cgagtgggtgcctgcagagccttcacatctaaatgggccgtcttctgacccggaggccgcttttttaagtagggatgtggatgatggttccggtagtccacactcgccccatcagctgagctcaaagagccttcctagccagaatctaagtcaaagccttagtaattcatttaactcctcttacatgagtagcgacaatgagtcagatatcgaagatgaagacttaaagttagagctgcgacgactacgagataaacatctcaaagagattcaggacctgcagagtcgcctagaagctatgaaattgaatctttgtataccaaactgggcaaggtgccccgctgctgttattattcccccagctgctcccctttcagggagaagacgacgacccatctaaaagcaaaggcagcaaatctagtcgaagcagattaccttggggaataaaagcccccagctttcatggtaacctgtctggtcagagtgcagattcagtcttcacccccatgcaggacccact

SEQ ID NO: 244305 - DNA, 978 bp, Homo Sapiens
aggcgtatcagcttggggaggagtgtacatgccgcacagtgaagtcggctgagcatgacacacatctatcagcagagatgggctggagcgcggagccgagccaatgacaataaacagtgtttgccaaagcaattcagagaggtcggcgaaagatgaagcagaagcctgtggaaagtccgtccttcccaaaacagacccgcgccatttcgcaggcacggagtctgcgaaaacaaaacggggtctttgcccttcgtggcatcatctcaattccagtagtccgcgtgcctctcacacacgttaggccgtttatatgtatcatttggaccgctgcatacttagtaatttccttcaaatcacttcatttggtgtccaatcagcactctcacactggcctcttgaattttcgccctgtgatccatacatccgtcaatgccagtgggtcaaggctacgcaccatggaggggacttcagctcctctgtcctccctcacatatgtcccagcagcttcaccctcaggacacatccaggtctgaccacttcccatcatccgcctgtcaccatcttggtccaagccaccactgcctctgcctggaccttgctggaacctcgtccctggtcctcctgcctccaccttcagcccatcttccacagcagccagaaggatcccattaaatcacaaatttgatcaagccccccactctgagcaaagccctccagtggctccacatccacctcaactaaaatccaaagtccttgccatgccctacaaagtcctataactgtctcctgtcctgctccgtgactgcatctgcccccactttccccccagcctcctgtcctggggtctccctctatcctaccagcaccccaaacccaaagctcatacctgccccagggcctttgcccttgctgttacctgaaagaaatcaccttcctcagatacctgcatgggctgcttcctcacctttcccagctata

SEQ ID NO: 244306 - DNA, 364 bp, Homo Sapiens
gtacctgctatgcggcccggacgaattctgagtcacgatcgcgagaaagcgggctgagccgccattttgaagcctggcaaaccgaagcaagaaatgctgccgtgttggatctttgccagccttcgtgccgaatgggagcaggttggagggagggagagccaatatacactatgggctgattaagcccggttggctgccatgttgttaacgagcaccgatttcctctacttttgtcgaagaagtttattgtgggtcagggacgtcaggtcgcttgccttcgtttactgtggtcatgattgagcatatgaggacggccattattgttgggggcaaatggaaatgctctaggcggggccgcgtagca

SEQ ID NO: 244307 - DNA, 688 bp, Homo Sapiens
  misc_feature (244)..(252): n is a, c, g, or t
aaatatcccttctcgcttcacagtccagtataatatgacatcttcacacccactagagtgtcctggcacaaccatgggaagacatccaacaggagacccaagaattggttcaaatattgttctgtgtagacggattctgtagaaggatgtggcttttagagaagtccagtagaagaagcaagaactagctgcagggaaagttccttctgtcggtttttagacacagatctctctgcccaaattnnnnnnnnnctaaacaaaacactaaagtttttgacacaattacttgctaggtactgggttcctgattgtctttaaaaagaaaaatctgaatctttatttgcaactggaattgaagttctattttaggggctaatgtttagaggaacataatttccactgttcaaattaatattaatgtatttttaaaatggtgcaatcacaggtgtttgacaagattgtcaacaagttaagtcacatagatggaaaggcaatcgagagttggttagagaagcttccagagaaaatagcactttatattgatcaattcactcattttgtggtaattgctagcaccaagcattgcatctgaaagggaagccagttatatttattattaaatgtacaaccttgaaaagcagccagcatgctgcctaactaacatcgccgcaggaccactcggtaagac

SEQ ID NO: 244308 - DNA, 732 bp, Homo Sapiens
tgccacttggcctgcaaagcctaaaatttttacactccgcccttttacagaaaaaaaattgccaacttctggtttacaccctacaaatttaaccaagagatacctttggatcgcccctgggctctctctatccctgaggaggtaaaatattatctcactccactctcagctatctgttcaaagatcagaatcctatgagaggggacagtccaaagatagaatctgaaaaacaaaagtaaacgttaaagaaatggagaatgggaacttacctggttggcactgtagttagtggccatgatcttgtgctgtttacactcgttgcttggcaactgcagaaggccgacctcctgggactaccaatgagcagaggctgcctttctcttctgcttattattattcacttccttggctcacactgcccccatttgttttctctggaacttagattcatttttattttacagacgggaaagactgagtaaatgtgagaaaattagctgaatagccactactttttttctggcataacctacccctgcttaagaacttccacgggcctttgattggggtttttaaccactttaacaaaccatgtaaccctgagagctatgcttgttggacaacatggtgtaatgtaccacaggctgtagagccagatactggggtttgaatccttattcaacatgggaacataggagctatatgacattaaacaactgtcttgtcttcact

SEQ ID NO: 244309 - DNA, 680 bp, Homo Sapiens
ataatatgatcataaatgtttcgagaaccttctttctgatagaagctgttaaaccttctgatatcgaaaagatttttagtaacatttcagatatacatgaattgactgtgaaacttttaggtttgattgaagacacagttgaaatgactgatgaaagcagtcctcatcccttagctggcagctgttttgaagatttggcagaagagcaagcatttgatccttatgatacattatcacaggacattctttcaccagagtttcatgaacatttcaataaattgatggccagacctgcagttgctctacactttcagtccattgctgatggttttaaagaggcagttcgttacgtccttccacgtcttatgctggtgccagtgtatcactgttggcactactttgagttactaaagcaattgaaagcatgtagtgaagaacaagaagacagagaatgtttgaaccaagctattactgctctcatgaatctccaaggtagcatggaccgaatttacaagcagtattcacctagacgtcgacctggagatcctgtttgccctttttatagtcaccaattaagaagcaaacacctggctatcaaataaatgaatgaaattcagaaatatatcgatgtatgggaaggcaagatattggacagtgttgtaatgattcattatgcaaga

SEQ ID NO: 244310 - DNA, 1301 bp, Homo Sapiens
  misc_feature (137)..(147): n is a, c, g, or t
  misc_feature (176)..(185): n is a, c, g, or t
cgggacgcgcagcgacacacgggcgtgccgcgatacgacggaagcgcgcgcggccccgtgccattctctcctcaaaggccgggggcggcgcgggagcgccgcgcggcaggaggtggcgcgccgcacgttctgttggnnnnnnnnnnnacggggcacccacacgggaccggccccannnnnnnnnncgggcgtgttctcccgcaggaagggcggataggcgccccgggaatttaggtcagagccagcagcctctcccacaaagcaggccccttcaggttggcagcatcaccccattcctggtgccttcccagttggtttaagacttcacacaggctgagggcagactgcgctgatggcaatgccggaggtgagaggaggagctacctggaagaggcctacctttcagcttcccacagcacccaggaaccttaagagctgctgacctgctggtgggcctggccagagccttctcaccaggcacagctatgcctggtcgtcaagacaaccaacaggcagccagaactacggaaaataaacttttttatctggattccaggacccttatcctaaccttttactttactatagtacctctgcaagctacggggcaggaagaagagggaagaagaagatatctggggaagaaaatacagcactgtttgggagctcctttggcgcggcaggaaagtgccaccccggccttggcttcctggggccaggttccagatgtgtgttgacaaactgcagcttcgatcatctccgtgtggcaggatcttgtggccgcggcaaagcacctcccctatctactcttgcagcacttactggcctccattataggcagtaatcagccttgtagtgcattatcagcttgttgtcaacaaagtagaagctgtcatagcgggtctcggaaggattttcaatcattagacgaactgcaagtcaggcaaagggggaagaaaaaagcaaagaattatgtatgagtctgccccacagggtaggtgggagaaaactttgcatcccctccaaaataagccagcgcttcagagtatactctgccagaataacgatgaggtcagaacagagggaggcagcccttgacagctggggagaccacagagttcccccagctgaacatgatctccatttcaacataaggatgcaatcaactctccaccatggcctcctctgtcatctccagcctggattcttcggccaagataccagggaaatgtgctcacccctcattccaacatggaccccacaactctccctccgtgctctcagctgacaaagccagcctg

SEQ ID NO: 244311 - DNA, 678 bp, Homo Sapiens
cagctgggggcgccatcctgctagcagcctctactctcctgcaggtggcaccatccaaggttgatggcacatcccacgtcactgggaataggagttacggttgaaacagtcttttctgtggatgagttttctgcatctgtcctcactggtaaaactgaccacatgtcttccttccaattgtctacacaattgtgtttgtggtgggtttgccaagtaacggcatggcccgtgtgggtctttcttttgccgaactaagaagaagcaccctgctgtgatttacatggccaatctggccttggctgacctcctctctgtcatctggttccgcttgaagattgcctatcacatacatggcaacaactggatttatggggaagctctttgtaatgtgcttattggctttttctatggcaacatgtactgttccattctcttcatgacctgcctcagtgtgcagaggtattgggtcatcgtgaaccccatggggcactccaggaagaaggcaaacattgccattggcatctccctggcaatatggctgctgattctgctggtcaccatccctttgtatgtcgtgaagcagaccatcttcattcctgccctgaacatcacgacctgtcatgatgttttgcctgagcagctcttggtgggagaatgtcaattacttctctctctggc

SEQ ID NO: 244312 - DNA, 696 bp, Homo Sapiens
cacatcgtcagcttttcataccaggagaagaacagaacttgcctcccaaggtagactgggagcaacaccattggcctagagatgctcagagctagggaacgtgttgccctttctttgatgaaatctcaggcagcaggtggcattctagcatccagtgtttattccagtaacaactcttcgtgcaggtcaatgagaacccagtcatgggtgatcaactacaagtttggatttagtgacccaggagccaaatcgccagctccctgatggaacaagatgatgtcccatgcaaaaacagactctcgggtttagagattcaaaggaggaaagaacttttgaggtcccttcatttgtcaacttttgctaagcattaatatgcccctcgcaccctcctaggataccaggtatacagaggtaagcaaaactaattccccgcccccgcaagcacacattctggtttattatcccgggagtccaattcattcatcgtgaacaattggtggtattgccctgcatgtacctgtgcttcctaagggcgctaatttccatttgcagaatcttggtggctctggggaacctcacaacagagtcagatgtgaagcacatgaccaggggagagtcaatcaatgtgtccccccgcacccaagctactgccagagtgtggtctaggggtgacatactgcaggacccgttcgcccc

SEQ ID NO: 244313 - DNA, 720 bp, Homo Sapiens
cagcgaactagcttttgtactatcttctgcacagcataacttcagtctccctttactaattcaaggaaatctcagttgaacaaattgtattagggtagatgagctaaaagctcactgagtcattaatttgtcataactcatctctgtacaatgattaggcttgtgtaggtgtccctagtttctctttctaaatcatgtcttagtagggacagagcaataatggtggatcgtggcaacgggaaggaagatgatgtgtcagttatctattgctgtatgacagtcgcaaaaccttagtacttactacagaaacaatgatttgtcacattttgtgggttgtctggatggttgttttgcttatatggtgcaggctgagattactcatgcagcttcacagttcttttgcttatatggtgcaggctgaggttacacatgcagaggaaagatgggctctgttcctcattcgtatgcctggggccttggtgcgggttgtggcaatggcgtcttggttctccatgtgccgtctctccagcaggataaacctgtagttttctcacagcatgacagctgggttccaggagaatcaaagcagaagctgctagaccaattaagaactagggccaaaacttgcagtgtcacttctgccacgttctgttcctcagagtaaagtcaaacaccagccaaaggaggagaataacagactcaactctttgagcaggacca

SEQ ID NO: 244314 - DNA, 701 bp, Homo Sapiens
tctatccagtaagaattcgaattggaacgtgtttatttcattccaaagaactcacccccttaaagtcctaaatcaaaggcataaactaaaatatttttagtgacttcctaactacttataatttttactagatcttttgcttgatctacatgcccagtgtatactttttcttttaattgttactacagacttcagaggaatactataagctctgtaaaagccttttcttccttctacccagtaccacaaggcagagcatggatttataatagcaactttctgaggaagagtagacaattgaatgtagactttatggttatctaagccccaagaaagaaggggagatcctccccatagtttaaccataaagtagaagtcaataatgattttccttttacctcatagagttgtgcaaaaatggctgaccatctaccagctcattctttctctattaatgtgaaatgtttatgcttatgctatggtgttaatatgtgacccctccaaaagtcattttgaaatttaatttccattgtaatggtattaagaggcaagacctttaagaggtgattaggctgcacgaggcttcatcttcatgggtgggattggtgttgctataaaaggatgggttcagccctctcttgctctatctctccatttcattttttgtccatgtgagacacagcaagaccagtcggtccgcc

SEQ ID NO: 244315 - DNA, 624 bp, Homo Sapiens
ctgctggcccttacgcgcagtggagaccagggccagaccatccggcagctgatcagtgctcatgtgctcaggcgggtggctatgtgtgtgctctcctctccccatgggcgccgccgacatttggctgtcagccatgagaagggcaagatgcgccgttgtgcagctctctgcactcctgaagcaagcagattccagccaaaggaagttaactgtgacccgcttggcttctgccgcagttccttttactgtgttgagcctcacaggaaatccctgccaggaagactacttggcggtttgtgggctaaaggactgtcatgtgctcacctttagtagctccggctctgtttcggatcacttggttttgcaccctcagttggccacggggaacttcatcatcaaagccgtgtggttacctggttcacagaccgagttagctattgtcaccgcagactttgttaagatttatgatctgtgtgttgatgccttgagtccaaccttctattttgctcctgccaagcccaaagataagagatgttaccttccttgtcaatgaggaggggaagaacatcattgttataatgtctctcggctgggtacatctatactcagctatggagaggccgc

SEQ ID NO: 244316 - DNA, 696 bp, Homo Sapiens
agaaggaaccagaaacagcgaagcaacggactcaggacgggtgagaaagcagcacctcgctcaaagaaaaggaaaaaggacgaagaggagaaacaagctatgtactctagcactgacacgtttacccacttgaaacagcagctctctctgctccctctaatggaaccaatcattggagtgaactttgcgcactttcttccttatggcagtggccaatttaatagtgggaatcgacttctgggaacttttggcagtgctaccctggaaggggtttcggacgactattctcagttgatctacaagcagaataatttaagtaatcctccaacaccccctgcctctcttcctcctacaccacctcctatggcttgtcagaagatggccaatggttttgcaacaactgaagaacttgctggaaaagccggagtgttagtgagccatgaagttaccaaaactctaggacctaaaccatttcagctgcccttcagaccccaggacgacttgttggcccgagctcttgctcagggccctaagacagttgatgtgccagcctccctcccaacaccacctcataacaatcaggaagaattaaggatacaggatcactgtggtgatcgagatactcctgacagttttgttccctcatcctctcctgagagtgtggttggggtagaagtgacaggaccattcggtccc

SEQ ID NO: 244317 - DNA, 449 bp, Homo Sapiens
catataaataaatgtataaaatacacaagaatgagggaatgcttcaccagttaatttacaatcacataatgagtacctttaataagcccagtgttaactgctatagagcacatgggtaaaacataagatgggcaaaacattcttagtgaaaaagggagttctgaggtcaaacgtgtttgggaaatgcaaggtggacaaggctaaaataggtttcttcgcaggaagaattctcagagcctttaataggtcaatatgcattgcagatctctgagggggaagagattaggcagcgcttctcaaatttacttgaccggaaaactcttgttttacaaagttccccttattgcctacagatacacttggacaagagaatacatatcaaatatatgatgtacttcaatcaaagagcttataatcttgttggggaagcaaagcttataaatacgcat

SEQ ID NO: 244318 - DNA, 707 bp, Homo Sapiens
atttcttaaaaagaatattcgggatgaaggttcccctggccgagggactcaaagaagagaagctcaacagagccagaaggatccaaggaaagagccctggtccatatctggcaggcaggatcctttcccataacaccagagagattgccaggctggggaggaaagactgttttgcaggcagccctcggagtgaaacatggagttcttctgactgaagatggtgaggtctacagctttgggactcttccctggagaagtggaccagtggagatttgtccaagtagccccattctagaaaatgccctggttgggcaatatgttattactgtggcaacaggaagcttccatagtggagcagtgacagacaatggtgtcgcgtacatgtggggagagaattctgctggccagtgtgcagtagccaaccagcagtatgtgccggaaccaaatcctgtcagcattgctgattctgaggccagccctttgttagcagtcaggattttacagttggcgtgtggcgaggagcacactctggcattgtcaataagcagagagatttgggcatggggtaccggttgtcagttgggtctcattaccactgccttcccagtgactaagccgctaaaggtagtacatcttgtctgggcgagtgctgcttcaagttgcctgtggtgctttccacagcttagccctttgtactatgcctccgg

SEQ ID NO: 244319 - DNA, 409 bp, Homo Sapiens
cactcacgggcggacagtgtattgagcagatagtctatgtcatccaccacgcccaggacctcggcgttgtcaacctcaccaaccacctgcaccagacgcccctgcacctggcggtgatcacggggcagacgagtgtggtgagctttctgctgcgggtaggtgcagacccagctctgctggatcggcatggagactcagccatgcatctggcgctgcgggcaggcgctggtgctcctgagctgctgcgtgcactgcttcagagtggagctcctgctgtgccccagctgttgcatatgcctgactttgagggactgtatccagtacacctggcggtccgagcctcaggtgcactgacctgctgcctgcccccagcccccttcccggaccccctgtacagcgtccgtagcgg

SEQ ID NO: 244320 - DNA, 131 bp, Homo Sapiens
atgccccgatcgtgagaaggggacagattcaaatgttatcttgggacactatgtagtaacacatctgaatggcaatctatgtagatttttgcagtgtgtctgtgtagtgtgctggcgtcctagcgccggat

SEQ ID NO: 244321 - DNA, 402 bp, Homo Sapiens
ccgctacggacgcccagtctccctccacagtcccacaagcggaagtattctacctgattccagagttcattccaacatgcagtagaatgaggtgaatgaagaaccaagtgtgggttttgttttcacagtgcacttggtcaatctagtttctctgagtagtgggctgtattctaagaaaagctttcacgtagacgtcaaagtctgcaaaagagatgagttagccactttacaaaaacctgctctgctttacaaaagatgcacaccaggcttcctttacaagtgaactccaaggctgcttgtaaagtaccacccttcctgcagactttgtgggtcgtgtcacttggcctaaacaagtggcctaacatatgcatgctcacagctagtagcatccctcagcgaccg

SEQ ID NO: 244322 - DNA, 647 bp, Homo Sapiens
aatgtttgatatgagttggagtggactgaccacacaggccaagagaacagttggaaacccaaaaaagccaggctgaaaaaacctggaccgccttgggctgcttttgccactgatgaataccagtggttacaaatagatttgaataaggaaaagaaaataacaggcattcctaaacaagtcgtaaaactggaagctttgcaagaactcgatgttgctttcaattctttaactgaccttcctggatgtggcagctttagcagcctttctgtattgatcattgatcacaattcagtttcccacccatcggctgatttcttccagagctgccagaagatgaggtcaataaaagcaggggacaatccattccaatgtacctgtgagctaggagaatttgtcaaaaatatagaccaagtatcaagtgaagtgttagagggctggcctgattcttataagtgtgactacccgggaagttatagaggaaccctactaaaggactttcacatgtctgaattatcctgcaacataactctgctgatcgtcaccatcgttgccaccatgctggtgttggctgtgactgtgacctccctctgcatctacttggatctgccctggtatctcaggatggtgtgccagtggacccagtacgg

SEQ ID NO: 244323 - DNA, 366 bp, Homo Sapiens
ctgtggtgctccaaaaatgacaataaacaggtaagattataattctcttacctgtttattgtcatttttttgagcaccacagtcagccaaataagattagagaaaattgtgaaggagaaagcatttctttcaattcagtcctttcattcaactctctttgtactttgcctccttcattttctttcgtttgctcatcacattcagaagctcacattccctcatcttacatgagggaagctatatatttccctttttgaaatagtcatctgctatctgtgtaactatgagcaagctgcttaacctctttgtgccctggttttcttatttgtcaaatgataatagatattacctgtgtcattatgtctg

SEQ ID NO: 244324 - DNA, 877 bp, Homo Sapiens
  misc_feature (303)..(320): n is a, c, g, or t
ggtacctcgatgcattctggcgtgactacatcaatggctctttattagaggcacttagaggtgtcttcatcacagactccctcaagcaagctgtgggccatgaagccatcaagctgctggtaaatgtagacgaggaggactatgagctgggccgacagaaactcctgaggaacttgatgctgcaagcattgccctgacctattccctcttctcactttggggactgttcccatcacccacctctggagcttacactgttctggggtttgttctctacccttccaaccaatcacacccctgccnnnnnnnnnnnnnnnnnnaaagaaaaagaccaaagaaagtggaagtggtattccccacccctccctgcacccatgtgcctgggcttcccctttatttcccttttccatttaccccgtaatgtgtctctacagctaccttaccactgagccgtaagacaaatgtataggaagaagcaaagtctacagcacatagtctttgtaagggattgatgtgaacacttttttttggatgcactaaggagttatcaatacttctggctttatgagagctcttaaattttgtctaaaaaaccaaagggctgtggagtaagggtagctatggtgggaaagtgggactcctgaagtgtatttttgaaaatttaatcgccccccctcttccaaattaaagaattttttttaaaacaaggctgtgggcccctttcccactcctctccctggacctctggtggctgctccctctcctgcccacttttccccccgttccagggcttgggaaacctcctggcctggaggagggaacacacttccttttttcccatattggtccaaacccttcttctcaaggggggaaagag

SEQ ID NO: 244325 - DNA, 663 bp, Homo Sapiens
gcctttgctcatgctatcctcatagcgcagaatattcttgctctgaattccatggacccaaatccttgtttctcctggccacctccttcaagaagccctcctgactgtctccctcctttccactcccatttctttctgtatctcttttgtaagtactatcactctctaccttgattttttacctagtagtacttatcattttctatggtttattattttatttcatgggctcctttaagagcacctcgaggttgaagactgagtattactgtatgattaatctttgtattctatcttttttggcaggcaccacagattgccacgctatagacattcctctcttctttgctaagagagctccaaggtctcgtagctaacagatggactgcttggcttcaaagttcttgaaccttagcactatgctatcaagcaccccgtgtgcttaacactatgcattcttcagcttttcttggaggaggaaataatcagttgagactattatctccatcattctggcctgtgaagcgcgggaatagccatcattccaagtacaaggaatggtctgggtcaatgtggctcactgcctgtatacccatgcactggtgaggctgatgccgcggtaaacctgtgtcctgtatagctgtttccctgttatagctttcc

SEQ ID NO: 244326 - DNA, 761 bp, Homo Sapiens
caaaatttacagagcgccctcggcctggagttcaaatgatctgttctccttttagtgctggtggaatgtttctggcgacgggaagcacagatcatattattcgggtttatttttttggatcaggtcagccagagaaaatatcagaattggagtttcatactgacaaagttgacagtatccagttttccaacactagtaacagttttgtaagtggcagtcgtgatgggacagcacgtatttggcaatttaaacgaagagagtggaagagcattttgttggatatggctactcgtccagcaggccaaaaccttcaaggaatagaagataaaatcacaaaaatgaaggttactatggtagcttgtgatcgacatgacaatacagttataactgcagttaataacatgactctgaaagtttggaattcttacactggtcaactaattcatgtcctgatgggtcatgaagatgaggtatttgttcttgaaccacacccgttcgatcctagagttctcttttctgctggtcatgatggaaacgtgatagtgtgggatctggcaagaggagtcaaaatacgatcttatttcaatatgattgaaggccaaggacatggcgcagtatttgactgcaaatgctctcctgatggtcagcattttgcatgcacagactctcatggacatcttttaatttgtgactttgggtccagtagcaaatatgaccagatagcagatcagatgttctttcatagtgattactcggccaat

SEQ ID NO: 244327 - DNA, 194 bp, Homo Sapiens
cccaccccgccgctgcctagcatactgcttggccaattagttcagcctcagaccatggcactttagagggggtctctacctccccatcaacagctgcagggggaccccagtgccaacttcctctcccactagggccctgccttcagctggcttgctgcgattcctgtgccttatgaacgccttcgcccccgcgg

SEQ ID NO: 244328 - DNA, 269 bp, Homo Sapiens
cgggggacgaaagggaaaaaattgagaccataaagcctgaagaaccattgcaccccatagccaagtggcgacatgaatccactggaaggaaagcaagactctcacgtaggaacggtacacgcccagctacaaaggcagcaggctaccgattactcccaagagcagcaaggaaagctcctgagtacctcgaagtttaggaagtacggattctggttactgtttcacgggtcggaaagtgccgagtcaaacatgagtccaccaactccctg

SEQ ID NO: 244329 - DNA, 493 bp, Homo Sapiens
  misc_feature (54)..(64): n is a, c, g, or t
  misc_feature (85)..(372): n is a, c, g, or t
gtacgcgggggacgaaagggctccatggggatgcagtagatacataaaattacnnnnnnnnnnntaataaagatagattgtactnnnnnnnnnnnnnnnnnnnnnnnnnnnnnnnnnnnnnnnnnnnnnnnnnnnnnnnnnnnnnnnnnnnnnnnnnnnnnnnnnnnnnnnnnnnnnnnnnnnnnnnnnnnnnnnnnnnnnnnnnnnnnnnnnnnnnnnnnnnnnnnnnnnnnnnnnnnnnnnnnnnnnnnnnnnnnnnnnnnnnnnnnnnnnnnnnnnnnnnnnnnnnnnnnnnnnnnnnnnnnnnnnnnnnnnnnnnnnnnnnnnnnnnnnnnnnnnnnnnnnnnnnnnnnnnnnnnnnnnnnnnnnnnnaagatatattgtacctaggaagcagtatttcggaaaggtggtgccatggcaaccctggggcgtgaaggtgtcgccaggttacatgtaagccgtccaaactccagaaacctttcgtcccccg

SEQ ID NO: 244330 - DNA, 400 bp, Homo Sapiens
accatgagccgctgacagggcagtgcttgccactgattttcttgtctctgctttcctcaggtctggattctgagcttttcatcctctcctcttttgcctttgcccacactcctgattcttctccagttttccatcagttggtcaagccagactcccttccctctcctctgacttagatttctgatctccacttgaccccctcactgggaaccacagtggcctacagctctgtgtgtacatgacctggtccccattacttctgatggaccccatcacctgctgctctttctctcacatactctgatctggctgcattgcctccttactgttcctcagacactccaggcatgtcctgaattctttgcacattctcctcaccctttcatcgaacgggggatcc

SEQ ID NO: 244331 - DNA, 190 bp, Homo Sapiens
gattctgtcaaacagttttcctaaggggctatatcaattttaaatcccatagacagattttaagtattaattcattgtacttaataatgttttacttatgttttccatttcattttttgttcatttacagtatacaatagtttttggaggctgctactttgtgtaacttttgcacgacgctttaatcacg

SEQ ID NO: 244332 - DNA, 357 bp, Homo Sapiens
acgcggactgacgctgattagtgcctcagtataccttagtggaaaaaatgaccagatctttggcaaagtatgattgctaaaataataacccactcagcttacactccatgtgtttccaacagagagggatacgcacttgatagaaacagaaaattataatcaaatagaattcttctgttggcagagcatacatatttatacattcttctgtgtttagctcagtggttagagaacacttcctggaaagactgcagtacacaaatgttttcaatttgagcttgtacatttcatctcattggtccctgagacaaggttcactgccctggaggtgacttggctcagtcttttcacacacac

SEQ ID NO: 244333 - DNA, 100 bp, Homo Sapiens
ccacaaaaatgttacgtctgtattgtaagaaaactagaatacgctgataaacatgaggaagaaaataagaatcactttaattacactacccagagctgcc

SEQ ID NO: 244334 - DNA, 406 bp, Homo Sapiens
ggggctctccaagtgccagaggtgggcaggtggtggcactgagcccccccaacactgtgccctggtggagaaagcactgacctgtcatgcccccctcaaacctcctcttctgacgtgccttttgcacccctcccattaggacaatcagtcccctcccatctgggagtccccttttcttttctaccctagccattcctggtacccagccatctgcccagtggtgccccctcctctcccatccccgctgccctcgtggccagcccggctggttttgtaagatactgggttggtgcacagtgatttttttcttgtaatttaaacaggcccagcattgctggttctatttaatggacatgagataatgttagaggttttaaagtgattaaacgtgcagactatgcaaacc

SEQ ID NO: 244335 - DNA, 578 bp, Homo Sapiens
tccacatcaaaagatacggactcaaccccaaaggagctagctggagggcccagccctgacagtatgtccaggcatgaactggcgagctctgctgctagccacagcatcacagagaatggagacattagtcaaatgtggctactgaacattagcaccataataaacatagctcatacagctaaaactagattgtttcccgacaaggtaacattcatttatagctctaatgctgaaagagcagctttttaatgtaacagatgatctaggtacacaagtcataggtttctcttcctaggataaaaacgttcaacaaaatacaaactaaacagcatcccagaggcaataaaatctcattgtactgaaacatatacaaattaaggctaccttgatatataaatgatttagaaattatgatggaacattcccataaaattatttaaatataagaattcaatttgtcaaagaatcagtagtgggcctcagttcaaacaaattaatattaccatcgttacattcaacttaatgacccacgcgtccggacccacgcgtccgcgacgcgtgggtcgacccacgcgtcc

SEQ ID NO: 244336 - DNA, 353 bp, Homo Sapiens
cacccgtatctctaacattactaaaaagacaggaccccttagtgcccagccctctgttgaaaaagagaacttggcaatagaaagtcaatcgaaaactcagaaaaaagggaagatatctcatgacaaaaggaagaaatcaagaagtaaagccataggctcagatacttctgacattgtgcacatttggtgtccagaaggaatgaaaaccagtgacatcaaggagttgaatattgttttgcctgaatttgagaaaacccacctagagcatcaacaaagaatagaatctaaagtttgtaaggcagccatcgccacattttatgttaatgttagagatacgggtgcgagctcgatgg

SEQ ID NO: 244337 - DNA, 426 bp, Homo Sapiens
aatagctgaggtctttatttcaatttctatatacagtaaaagtgctgctgagaatctgcagcgaccagacagaacataaatttaaatctctctcaacaattagcagcttaagatctatcaactacagtgttaacgttcacacgttcacaagtgtcatttctgtacgtttcaattcgtgcaagtgagtttttattcttacacactttgataaaacacacagtctagtagtcaatccctactgaggatatcacctagcatacacgacatacagacagcaatgttaactcttagagccacattcaaaatcccaggtttcatttggggttggggtgtgggaaccataattttgcctgtgtcagattacaataatgtttggttttgttttagatgcatattttccaaagctgaaaggcagctcctcattgg

SEQ ID NO: 244338 - DNA, 297 bp, Homo Sapiens
  misc_feature (78)..(87): n is a, c, g, or t
tatctctaacattacggcagatattgttttgcaccccgtagaaatgtacagccttacttctctgagagttgaaggagnnnnnnnnnntggtgagttggaagtaatacttcatggagtacagggtctctgtggggctgtttggaattgtgcagacagagggaagacaggagggcattgccatgagagggtggccaccaagtgagagcaattcttctgagctctagatttaaagcccgttctagttggcagaaagagggactggaaagtgttaggcaatatttagagatacgtccacta

SEQ ID NO: 244339 - DNA, 296 bp, Homo Sapiens
tatctctaacattaagcaagaggatctttgtggagaatttactgttaatattgtttgcatatttacccaaacagcttgatataagggtttgtttttttgttgttgttgttcttaaattaccattttgagatctagaaatttttcccagcccaaataacaacaaaatcgtttactcattttaaaactttattgtttaaacaaaccccactaacaaccctaaaatgaatgactccgtagttatttttaccttctttttatgaattccctcagctgaaattaggataatgttagagata

SEQ ID NO: 244340 - DNA, 723 bp, Homo Sapiens
  misc_feature (24)..(24): n is a, c, g, or t
  misc_feature (35)..(35): n is a, c, g, or t
  misc_feature (103)..(103): n is a, c, g, or t
  misc_feature (112)..(112): n is a, c, g, or t
  misc_feature (157)..(157): n is a, c, g, or t
ttccttttcttcccaattaaagangcaaaatcaanctttctcgtcctcttcctccaaatgtttcctgagataagggcaatatgtcccctcccaattatcccanaatgcagcncagccaatcttcaaccaagcatttgcagagacgtgtgccatcatncaaccactatccaggtcaagctcctagaagaatcaacgtgggtgaaaaatgcttgattggtattaagttttcatattccccccccaaattttaaagatccaaagtaagcgtgagaagaatggagtaggattaagacttctgaagaaaggtaaaacttttataatagaaaactggtagaaacagtgaaggaaccatggtagtgtgacttgagaaaggtgcttagtctttggttagataactctggagaagccttgaccgggctgagaatttcagaccaattcaaatgcaataaaagctcttaggaatttcaaagcagagtagtggtaagagagcaactctttgctcactgagaaaaagagcaaatattgccatatttatgggcctcccctgatctgctgagcaagcagctccgtaattaccaaaaagcttaacaaaaattttctttcaacttactaaatcatagtcaacagataacgagtttaactaaattctacctgttgatgacctccaaatgaagatcctatctaagtaactattgagatatagcctggactatagttagggtc

SEQ ID NO: 244341 - DNA, 330 bp, Homo Sapiens
  misc_feature (59)..(132): n is a, c, g, or t
cctgtacggaatataaatccatagctgggggagggagaatcttgccttgtacacttctnnnnnnnnnnnnnnnnnnnnnnnnnnnnnnnnnnnnnnnnnnnnnnnnnnnnnnnnnnnnnnnnnnnnnnnnnngaatgatggcagatgaggcgctccttagggtaggatgagtggggaagcagtgctgtggaggcgctgtgtcctctgtttctggcacagagcagacccatcaccccgggaggaagccctggccataagaggcccactgaccctttgaccagatagcactggctacaaaaaacctgggggtgtggggcgtgctgtcaatca

SEQ ID NO: 244342 - DNA, 455 bp, Homo Sapiens
tcggtaccctgatgcatgtagcgacctgctttcagccatccgtcaaggttttcagctgcgcagggttgaggagcagcgggaacaagagaagcgggatgttgtgggcaatgacgtggccaccatcttgtctcgtcgcattgctgttgagtacagtgactcagaagatgactcctctgaatttgatgaggacgactggtccgattaactctttctgcctgctgcccaccttctttttctttccttcctacctgccttctttgatgccaaccccaacagacccgtagggggagaaaagggaggaaaaaagtaattttaaggggccaaagctttccctgaagcaaccaaagatatatccaagtgcttcctccaagtcaacatgtatttcctctccccattttcaggccctgtggggctcctgaggttcagtagctgggatgttccctctttccttcaag

SEQ ID NO: 244343 - DNA, 523 bp, Homo Sapiens
agctcggaccctcttctccgaaaggcaacatttttgggcagaggaggtgagacattctttagaggcttgatgcctcctggaataaagggcatcccaggcatagagatcgcttagcaaaaggcaggcccaccctgctgattagggcagagggtgaggcagtctggcccttggacccttcggcctactctgccctttcagtgcgcgggaaaggggtcagctgtgttcattcagaccactccccgttttagaaccagaaggtggctggcattcgaagtggctgagggcacaggttttagaaggctgtagttgaatatggctcctaagggaagccccatctccaacagaaacccgatcaaaggaatctgctttgggatttctccttcctttcaatatgcaacaggcacttgaaggaaagagggaacatcccagctactgaacctcaggagccccacagggcctgaaaatggggagaggaaatacatgttgcctttcggagaagagggatcctctagatcacccacaa

SEQ ID NO: 244344 - DNA, 478 bp, Homo Sapiens
aggctttacatgatattcatagacatggatggttttaaaggaatccatttcgatatctttaaattccatatacactctttccttcagctgatctgagaatgtaacctgtgatagaagtacacattattttttctgtaattctccgttatagtcaacctcccattttacagaacagcatacttctcacttgtatgcaatattaccatggtacaaaatgtttgatatcataaagggacactatgagatactggattgagaacacgaatgactcaggcacagtcagttctttccacaagtacaattacttgctttcaacaaaatttagaggactttatgtagatgttgactgattgttaaatttttttgatggttcactgttacattctatcatataactcaaaaggagttcagagaatttgaatggcgtggaataaaattcattctatctactcattaatgtgaacaacatttctcagtg

SEQ ID NO: 244345 - DNA, 485 bp, Homo Sapiens
cgaccgggattggcaggcccagtggcttttcatggtgaactgaggcttgcatcttggacaggttgcatgtggtagggacagcagggttcccaaggaagctttgcacggtcatgggtagagccatcccttcttcatccatagtgaatatggctggaaatagcgggtagtcttggatttgacctccctcccatggaagtgctgtctccagctcactcctggaaaaactgctttctccccaaagtgtgtctgagcagcagatttaagcatgaagttggttttgtggggctacagtatggactttgggaagatggcgccatctgtatttctgattctaccgtccctctgtctgtctttggaagtatcctttcacttgtttgggagactgagaatgattttctgcaaacagtgagccagaccatgctggtctcaagcggcagagcagttattaacagaatccccggtcgaccaatcggtgaaatccccgt

SEQ ID NO: 244346 - DNA, 424 bp, Homo Sapiens
gattggatctttctggaactatatttacatgatcataatcatgtaaacactttattgcccttaaacttttagaaatgaccttctggcaaagtatggatgacttaattatggttatagaaccaagtgtaaatatttaaccttgttaattataaaagtgcagttgacaagttaaaagagaggaaagggagagtaagtctattagttaaaggtagaaagataaggaatagaggatatataattagtgacatggctatattggaggcatgggaaaggcattcgggtggtataaatagcaggaagttaatagagaatgactaaaattgatcaataaaagttgataaatagaaaaatctgtatattggctgagcgtggtagctcacgcctgtatccccgtcgaccgggatcctctggagtgacctcagca

SEQ ID NO: 244347 - DNA, 596 bp, Homo Sapiens
ccaccagaaagggcagtgtctgaaaatttatttcatttcctttcagtttaatgttagaaattaccctgctggtacctagagtccattttcatccattgttttttaaaataaatgttcttaagctgtctatttaaccttacttacgcttcattagaaaatacctgtgtgtcaaccatacatattttatgaatttttttctgcgtagttgatcacagccgtagtgtaaacttgacattaaagactccttcacaagattcagactatatcaatgcaaagttttaataaaggtatgtactaactttaaatggtgtttctctgccatattaatgtctttctgacatactgagtttgtgtaaaaactttttgaattgctcaaacatgataccatactagcaaaagaaataaaaataaagccactgccctggcacaatgtttttatatgctttccttctagccttcttattcatatagataaatagtttctacttagttttgtgatagcagagataacattttcttttttatttcttctttcccatggaagtcttacctattactaaattattttctcagttatccctttggacaaaatgacg

SEQ ID NO: 244348 - DNA, 354 bp, Homo Sapiens
tcgaccggggattcctcctgctttacagtagttctcaacaatctccgtgtgtttctcatatttgactggctgactgttagtccatgattttctccacactcccagtgatattaagaaacaaaatcatgttactccttctcgccaccgtaactctagcagcgaatctgctatagttcccaaaactgtgaagagtggagtagttaccaagcggtcttcccttcctgtgtccaatggaaaggcacctggaggtcaaggtcaatgtaactaggtacggagtttgtggtcattgaagatgtgtcctgcttcgactccaatgccattattctgaaaggcaccatacgctcagcgtataat

SEQ ID NO: 244349 - DNA, 330 bp, Homo Sapiens
  misc_feature (43)..(52): n is a, c, g, or t
ccggggatacaggcctagtcagtactggtcttcttcttcttcnnnnnnnnnnaataaggaattgagttgactgctctgatatggagagacctgttagtcttgtatatagtgcccagccggaaaaagcatctcttgaaggttagggcattttgtgaggagagctctagggctatatcagtctggaggtatgatctctgataaagatcataattctcatctcagtatatcttctttagaacagaaacattcttcattgtaagcttctcattaactggaagccacctggatctgagatttgtgggctcttagaatactctttgttactgctca

SEQ ID NO: 244350 - DNA, 448 bp, Homo Sapiens
ggtgattttaactaatttcagtcatttgtagattcagtgtatcaccacaccctgaggctaaagacaaaaagaactgaacaaataccgaaagcatgcccggagtttccatcgggtaagggcagggacttctgaaccctttacctgtgttgtaggactcagcaagtcagtaaaggcaccatggatgatggggtccaggttcttactgtctaaggagttacaaaggtggacggggaagggagaacgctcactgtagcacaggagtggggctgggatatctgtgggaactcacggcttgtacatagcaattagtgtgtgtaggtggcaggcgctcgtgtgcacatgctcacacccccactcctcctgctctgctgactgagagggcctaaaagcaatgccatatggcagtgtccaggtctgggtttctgaacaccactgttgaagaaagagg

SEQ ID NO: 244351 - DNA, 212 bp, Homo Sapiens
aactatcattgtgttcactctagtgtcacattgactattgctgtgtttcctttaaaaaattaaacccagggcactattgtgaatttgctgtaccacattccagtttagatgctatatgcaaaaggatttgtaattcactgaagacctccagaagtcacgtaggagtacagtattttaacgggtacctctctgaattgaaatccccgtcgctc

SEQ ID NO: 244352 - DNA, 498 bp, Homo Sapiens
acggcgtatgtaaatttctctcgtttcagcctcaggtgcacacatccataaaaggatcataataccatctgtctctgatcattctcggtagaacattagaacctctgggataaccaagcctttacagcaaattcagaatgaacatgcttatcaggggtcccaagaccaccatagggttagtgatttgctaggaagactcacaggactcagcacacagttgaattcagttatgacttattacagtgacagtgttacaaagcaaaatcagcaaagaaaacacggtgcgtggggcaacagtccagtggaacccaggccaagcaagggcagctgtcagaggcagagaagtcatcagagctttcagcgatttcaaaggatcggaggcacaaaactgacgttcagagctgccaaggttcctagttactttgcagcttgattcacttacatcattttcaaagtcaagcaggctggaaggcagattatactccaatccccggtcga

SEQ ID NO: 244353 - DNA, 277 bp, Homo Sapiens
ctctagaggacgcgtaatcagagtcgacatgctcatatgggagcttggttgctggtggccaccatcagttcctgcctaccatcgatatgcatgcattccttctctaagagagaaatttcctttccttgaagctgagctgggcttgcttgatctgacgttggtgcaagtgatgtcctcgggatttatggaggctgtcgtaaggaagcctgatagcttctgccctgggatctcttctgacctgagcacacaccaccactggatagactgctttgcgtca

SEQ ID NO: 244354 - DNA, 428 bp, Homo Sapiens
tttgtagggtagtcatactggtagaagtagttcttgaagtagagatcgtaatagtaagacttgatgttttatgtgtatggccgtgcggtatgaagttggggctggtttaaacttaagaatagtttaaatttttaaaaacctttaaatttcatttttctacttagagttgcttaactgggtgtctggacataccttcagaagtataagtaataggtgtatgctttagatttccaaaagtatataaagaatgtggtggtctccaaatgcctgtgttctctcccttggttgggagttcagagtatttccgcttttgtgattcagtgtttcatggaagccattgccctaacagtgaatcagtcaacttggttgtctgccatttgtagagagtacttgtgtctaattcccgtcgacacggatcctctagacgg

SEQ ID NO: 244355 - DNA, 310 bp, Homo Sapiens
tacatataaattgtttagcgtagtgcctggcacatattaaatactcagtgaatgttaaaattctattataatttctctgctctagaaccatttgaagaatataagaaatttaggcttataaaagttttttgaaaaaccatcttggaactggtgccttttttatagtagatttttgggaacttttcccatttttgccatggcattaatctgttttggctcttgtgtcagatttttggaagattttccagttcatcctgagttatctttcattatttaaaaatgccccgtcgacccggatcctctagatcga

SEQ ID NO: 244356 - DNA, 205 bp, Homo Sapiens
caagtagtatacgtattgttaatggaatactgttacccagaaatcctggataatgccataaacattatgttgataactacttaccttataaagaaatgttttcatagctgttatatttctgagtaaaactgcatgttagttcaattttttcacccccgctacataatagaagcatcagttatcccgtcgaccggatcctctagat

SEQ ID NO: 244357 - DNA, 972 bp, Homo Sapiens
  misc_feature (168)..(219): n is a, c, g, or t
gactcttgaggatccccctgcatccggggagagaaagaggtagactagttttgtgtttgtggcttttttaatagagtagcacaagtaatcaaaaaaacagtaggctgttttgaatttactggctgccccttatgagttcacagttagattggactgtcctcaatgtannnnnnnnnnnnnnnnnnnnnnnnnnnnnnnnnnnnnnnnnnnnnnnnnnnnaaacttcataaagagctctctgatctttcctttccaaacaatgaaggtttatcctttgtaaactacctctgtactccacaggctgatgatatgtgatatccctatatcattaaagtaaagcctaagcacattctgtggcttttgtgtctactctgttgttgctgagcttatgaactattagaaataactccctcttgcattttcacacatggggaatgtgatgttctcttgggtattatgctaatcatattttggcaggtttctctggagcagatgcagaaatgatcataccactttccagggtgtattattttagctcctttgacttgggccctaagtctgttttacctgatgttcctgaaagatgttcctgatgtccttcactgttctttcatgctggatgttcttgcctatgctgcctcctcagctatcaccctctcttcccctttttaatgtagaactcattcttaatgatttgtcaaaggcaccctatttcactgaaatgccttctgtattccctaccctccaagtggattgtagaccttctaaggtcttttgacatctgcatatctctagcgcagcacttatcacggtgattatttatctgttcatctttccgagtagacactctcattttaactcccttccctagtcgccagcatcggcagcatagtgcgtgtcataaaatgtgccacaatgaaaatttgaaaaatgaatgaacgtgataaacatagatgagatccccgtcagcga

SEQ ID NO: 244358 - DNA, 676 bp, Homo Sapiens
  misc_feature (516)..(574): n is a, c, g, or t
atttaacagacagatatttattttttttataagcattagaaaaataactggctttccagtacccggtttgtgattgaagttgccgccttaaatatatttaaggagaaaaaaagagtcagtttgaattttttaaaaaatgtaacatttggtaaatagcagtacagatggtccacggacataaaggtgcaacgcgagactgaaacgtgtgcaacgccgtcctaagagaagcccctcgcccgctggcggggagcggacagtgccccgcgccgggagcttggaaagccggccggatcggacgctggcgctgagctacgtggtaaacccgggaacagttcctctccccgttctctgggcccgaggtccgcgcctacaaaacgcgtggggtgtcacaccacaaggagacaccccgagaatgcggtcaggggccgcgagacggtggcgggggacagcgctcagtacaccgctcggcgctgcacgcctggagaacgcccggtgccacgggacgccttgggcccnnnnnnnnnnnnnnnnnnnnnnnnnnnnnnnnnnnnnnnnnnnnnnnnnnnnnnnnnnngtttcgacagggggtgcgggatgtgcggctcaaccagagaagccttgaggactcctagtgaccgaccgttcgtgcacagacaggcggctgcgatgcgacgcc

SEQ ID NO: 244359 - DNA, 344 bp, Homo Sapiens
ggtgactctccaggatttcttattcgtgttgcaccaatttggaggagttaatagctaaataggatatagtgcctagttagggaagtggaaagatgagagagaaatattctaggaggtagaatggatgagagacaagactggatgatgtaaagaatacaacctttggtcaaaaacaaggtatgagtaaagtcactggttttattgagcagctcaaactagttctgaaggcaactgttcagaaggcgttcccaacagcttttgagcgatgcacagcctccctataaaaccttagaaagtacatctgttaatgtgcacattagtcttgtgcaacacgaataagggat

SEQ ID NO: 244360 - DNA, 594 bp, Homo Sapiens
ccgggtcagtattatagaaggtcattggtttaggattgagctcctgcactaggttcaacagatcaaaccaaaatggagacactcatgctaaagttccatgcttccaagcccaaaactaagttgatatctgatcttctgagatatcaggagagagattaatagccatatccccttactacccagttttagcccacctgataatggaagtccccctctactttaacctttaacttagaaatttaatcaagttaatcaatttaatcaactagctttttgttttccgtttctgattttctcagtcctttgtctctgaaaacaacctctgctcagctcatcggaacactcacgctattttccataattagatgttgtttgattgtagattcacgaataaatgccaattaagatcttctcactaaatgtgttgcaattttgtcttttgacaatccttacgtgtcatgatgcctacgatttgttttaatctctttaagtttcccaaactacacgcaagtatggcaatcaataatcattggtgatttgggtgacaggaattcctgtattcgttctctcacttttatatggcaacacgaataa

SEQ ID NO: 244361 - DNA, 433 bp, Homo Sapiens
tctagaggatcccttattcggttgcacagcagagtggatattctgtgtctgtgtttgtgtgtttatatcttctacttacacattgtataatctctaaagaaaaaccaggtgaattaaggtcatctccgtgtaatgtgtgagtctttcttggaatttggaaaaaaatactaaattatcaatattgctataatctgcttttgtccttttctgttacactttaggacctaaagtgatccagacttctgcggctaatttttcactaaataatagcaaaaaggtaagactgggtctgagtggcagctgggtggtggggtgcattataaacctcaggtcactgagaaatggttccgcttagagtctttaaggtagccttcccttgccttgcggcattctcaggcaacacgaatgagtgcaacacgaataagggtaccga

SEQ ID NO: 244362 - DNA, 407 bp, Homo Sapiens
acccttattcctgtttgcactgaggtgatattatctctcccgacttctggtatttcaactttactaatagcacatattaatttaacaatcaaatatcttcatgaagcaaaattacctaatgattgcgaatttcttgtttcttatgatgtttgatgctatatactatggaataatttgtgggtgtctttgcttcccaaattatttcctgatttctgtcaattgaatagtcagttcagtcagtactcctttgaatcaattttctgattttcctctaccagattagccatctaatatattattatttttcaataatattcaggacaagaatactgtattaaatacttactctgtgcccagaattatattagacattgtggaaggtgcaacacgaataagggatcctctga

SEQ ID NO: 244363 - DNA, 481 bp, Homo Sapiens
ttattcgtgtgcacttaaaaaataacttctataaatatgacataatatctggaggccacatttatagctggtcaaatgcactgttagccctacaaaaggctggctcataattatgaggcaataacatgtaaatttccctttctgatgagaaactaaaggtcacataggtcctgagttgtattaagactgcattaatactgttcgttagacatttcttttctcagtctcaacaagtcaccttaaaatctatggtatatagcagatcctgagcacctacatgaaaagcaagtactcaaatgttagagacctgaattgaaatcaagattgagatccatccaacttaggagttactgctggttcaatgagtccagggaagaggccatttaatgattcctccaaggaccattaagagttccagggtattcccttggatatctggaaacctgggttacttgatctgagcatggtgcaacacgaataa

SEQ ID NO: 244364 - DNA, 213 bp, Homo Sapiens
attgaacacactgttagtctgtgattccactaaggtgaaacagccagtaagagggattgtgtctctcattcaatgattcaattcattctaaaaatgtgacttgtgtacttggatttaacatacaggaggtgttgactctcataccaagaattggggtatatacaggattgttagtctcatccttggtctttccttcaggtgctacacgaataa

SEQ ID NO: 244365 - DNA, 151 bp, Homo Sapiens
gcccagaggatcccttattcgtgttgcacgacagtaaagattgtcctcttttcacatgaatacaatccactggatgttctgaatctcatatccagagacagttgcaagttggaaaatttactcttataagtgaatccagtccaaagttaag

SEQ ID NO: 244366 - DNA, 431 bp, Homo Sapiens
gagggatccctttattcgtgttgcacatccataatgatgatggtgtgtggctgaggctgaatgatgagacaataaagaagtatgtccctaacatgaatggttacactgaagcctggtgcctctcttttaatcaacatcttggcaagagtcttctggtccctgttgacgaatctaaaactaatactgatgactttttcaaagacataaactcctgctgcccacaggaagcaacaatgcaagaacaagatatggcattcttgcgaggagggccaggcatgtacaaggtagtgaagacgggaccttcaggtcacaacatcagaagctgccctaaccttagaggtatcccaattggaatgttagttctgggaaacaaagtcaaagcagtgggagaggtaaccaattctgaagggacatgggtgcaacacgaataa

SEQ ID NO: 244367 - DNA, 215 bp, Homo Sapiens
ccacattttttgcccaaagtgccttcatgatgattatgctccacttggtgcataggcttcactgttagttacctttatccgtttctctttaagtggcagcacattccatcttttaatggctcctggcaccagggcagtacaggtctcctgatcagcttgtggatttcagtgatgtccattattgaagggtcttttttcttgtgcaacacgaataa

SEQ ID NO: 244368 - DNA, 413 bp, Homo Sapiens
gtcgactccgaggatcccttattcgtgttgcacacaagtagtgatagagccaacgggaataaaatgactccactagaagagataactgctacaacctgacaaggagaacacaacggctgcattttccagtgttccaaataggtaagtatactcactgcttaagacaaaattcttttgcaaaattttctaacccatgagatcaccagaaaggttggctttgtaaaaattacaaagttgtactgaaaatgtcaactgattttgaaaagatttctctaggtagaaatctgaagaaatggcattacactgtgaagagtgggaggaagtagggttaaaactgacaataaatatttctaatcttaacatctcaggaatattctaggacagaatgctgtatgggggtgcaacacgaataa

SEQ ID NO: 244369 - DNA, 344 bp, Homo Sapiens
tagaggatctcttattcgtgttgcacatatatatatccatgtattggggggacacctacttgttgaaatgaatctaaaatgtctgaaagttgagtgagatgtttcttaagaaatgttcttgtggtgggtgtgtccagaagtaaatacattaaaaacgttgaaaacttattttcttctttttgcttgtttatattttctaaaatgtctataatgaacatatatcttgataggaaagataatgccaagaaatcctaatttaacacccttttctcttttcctggacttttcccaatttgtttctccacttaatccctagcctcaccctagaggtgcaacacgaataa

SEQ ID NO: 244370 - DNA, 418 bp, Homo Sapiens
  misc_feature (55)..(55): n is a, c, g, or t
actttgttttaaaactgtgaatcctttgagacttaccaatgaggaccaatcgatntgttctctcagtgtcattcttccagctcacttgtagtctcctccagatcatagagctcatggacaccctggatcaatcacttgtttgtgatttgtctttgattgacaccaatccctgttcaaaggtagaattgattgaacattgatctagtcctcagttcaaactttaaagcatgaaatagagcatcattgttaatggattaattactgatattcacttataaaatacaaactcttaagctgagaaaattacttaatttcaattatttgtgaattacaagaagtttcttaatgtttttaattttcaaaataggtttctgtgtattggttttttttagaccaatcccctttactaatgatacag

SEQ ID NO: 244371 - DNA, 469 bp, Homo Sapiens
attcgtgttgcacttattcgtgttgcacttaattgcatgtattgatcaaaccattctaactcccagcaattatttgtatgccaaacataaacagtctggatctatacataattagatattatagaagttttcaaaaccatctactgggaatgttatcctctttacaactgttgcctggcgttataaacaatttctaaaataaacaagttaaagaaatcttaattggtatccccaacagaatgcatattaaaagagaattctgtgttatcaactttaatcaaatgcttataggaagaatagaaagactgagaaagcagtgattatgattgactagaaatatttaaaaattgcctgcacagttgacatttaaatagcttcatatttgaaatgttatttaactataatttttatattccttacagtgatttcatttgatgggtcgtgcaacacgaataagggatcctctaga

SEQ ID NO: 244372 - DNA, 456 bp, Homo Sapiens
tattcgtgttgcacttattcgtgtttcacttcgtgtacattattaaaccattctaactcccagcaattatttgtatgccaaacataaacagtctggatctatacataatgtagagtattatagaagttttcaaaaccatctactgggaatgttatcctctttacaactgttgcctggcgttataaacaatttctaaaataaacaagttaaagaaatcttaattggtatccccaacagaatgcatattaaaagagaattctgtgttatcaactttaatcaaatgcttataggaagaatagaaagactgagaaagcagtgattatgattgactagaaatatttaaaaattgcctgcacagttgacatttaaatagcattcatatttgaaatgttatttaactataatttttatattctttacagtgatttcatttgatgggtcgtgcaacacgaataa

SEQ ID NO: 244373 - DNA, 435 bp, Homo Sapiens
tttattcgtgttgcacgttatgtcttataaataagagtcacacacacgctcaaggcagcaccctgcacttcagtgaattcaggtttgaatgagacaaactgagttagaatctcgcttctgtgatgaactatctgtggtatcttaggcaagctactcagcctctgagtggtcatttccttgtctgcaaagttttggagatcacagaagcaaagcaccatgtgtattgcaggcactggaggctgggattctcctaaactgacaagggtggcataaataaataagacccagggcctgggactcattccctgccactatgaactgggggtggggatggagtggggataggaacatcccgaaaggggcctcttgtctgaagtgattgtgttgatggcccaagttcgtggtgcaacacgaataaggggatcctcggagtcg

SEQ ID NO: 244374 - DNA, 618 bp, Homo Sapiens
agtatgtgtgtggcaatgttggagtggtcccaagcatttttgggattcagctgtgtggaaagttaagctgtggatatacactttgtttgagtttactgggatatatctctgtggttgcagtcactttgatgtatagttattggtggccatctcactgcataaatgatatccaacaatgtggatgtcactcaaaggtacaagccctgcattgtattgagacaggagtgtgttctaacacatctggcactggaatctgcaagtagaagagcatgaaatgtgtgaaaccaaaaagtggctggtggaaaaactttccactcacccgatgtcttagcctgaacatcagcctggtagaaagacttgcatgcagggaagtttatatggagtgcagtcccaggaagcaggagttcaggacaaggaaagtgaaatgagaaggagggaaagaaaatttaaggatctgatagcgcctaggcagcaggtgttcaattccactagaacctttttaggaacctatggaatggaatgctctcagaactgtctgcttaagtacaaaatgcgggggggcgtgaggggattatcccgttgatttctcctcttgttgcatatgataactgcgaatag

SEQ ID NO: 244375 - DNA, 314 bp, Homo Sapiens
ctcgactctttaggatcccctgaccttccgcccctataacaaccatttcataaatgaagaatctaagattctgagtttaattataaagtacaaaatttcacaaactagaagactgtcaagtcacgagcagagttcatgtctgttttactctaaatctcaagctcatattctccactccacaagtactaaaaatgcaagttaaaatcatgttaagattttgggcgtgtgtgtgttatttttccagtagttaaaaaaacaatgaaaaatacaggcaaggagccaggcgcactgcagacaaggaggtgagcacagtg

SEQ ID NO: 244376 - DNA, 350 bp, Homo Sapiens
tgatcgtccgcccctccccttatctctttggacggtgagaattcgtggataatttttgcacaactgcgtagctcttgattctgtttttctcttctaatgagatatctttattgtagccttccaagttaacaagccagctacaccatcaaatgtaaaaactgttcataataacagtctacaagcacttgaagcttgttttctaagcaatcttttctgagccaggtgagggacatgctttttttcccccccatctctgtaactattcaagaagagattgcagtctttatacactgtttgttttagttttccttctgaaccagatgtgttttcaataacgactgcatgtggga

SEQ ID NO: 244377 - DNA, 116 bp, Homo Sapiens
cataggaatgtgatttcttttcttataatgtctttatgaggttttagtatcacggtgtttatggcacattaaaatgagtaggacagtaagtaatacctcttcagttttctgtaatg

SEQ ID NO: 244378 - DNA, 267 bp, Homo Sapiens
tgatccttccgtccctgtccccagaatacaccatgatcactcatttcgtttttgttcatcatccctcaatgtttataatgctgtcccatgttctctcagcctttttgaattcaatctatactactctgactgctcaccttgctctcacccatctcagctgctgcatatttatagagagtattccagtacacttaggaaggcgtcagaaagccaacaagttttcacagactacttcgttcaatatggccacggaagatcagggatccg

SEQ ID NO: 244379 - DNA, 210 bp, Homo Sapiens
gaggatccccttccgtgcctctaattgtaacaggaatgatccttcaggtaaataatgtccttgcattctgtgaaacttctacctacagacactaagaaacaacagattcctgtttggagtaataatcagttatatcatttgatttaaactgactcagcttaatgtttaataagtaaattgttaaatgtttgagaaggggccggaagatca

SEQ ID NO: 244380 - DNA, 195 bp, Homo Sapiens
tgatcttccgtgcccttcccctcatttattcatctaaaaaaattatttccaacctatgctgtaccacctgctaaaaatacaaagccaaataaggtgatctccccacgctcagggggatgtgcccaaatcccattcaactccaaggcccaattcaagtttccatgaggacttccccaacaatagcgacagcaggca

SEQ ID NO: 244381 - DNA, 391 bp, Homo Sapiens
ttcgcggtatataacgtgaataatgctgttattagagttgaagagaagcccttagaaatgggacaaacattgtaattctcttagagaactgtaacttaaacagaaatacacttaatagaagaggaaagaaaatggttcatgtgacacaaaggtcccatgtgttgacttctttggtaagatcaaataagtatttaagcctagcaatagggtcagtccagttagtatttctcctcacaaatggtgaatatcaactccaggatggctggagttttctcatggtttggttccacgccatctgcatgtctttacaagtgataaaaaccagaattttccagctgctactagtcacagggggtccccaatatgggttgtttaattatgataccgcgaa

SEQ ID NO: 244382 - DNA, 469 bp, Homo Sapiens
actctagaggatctgcttcgcggtatcataatgtagaatctcgacgctgtactcgaggctcagcgttctcaagcagtccaagaccttgaaaattaggcaggcaccagagagaagcactgaaaaatcccattggatttgtggaaaaactccagaagaaggctgatattgggcttccatatccacagagagttgttcaattgcctgagatcgtatgggaccaatatacccatagccttgggaattttgaaagagaatttaaaaatcgtaaaagacatactagaagagttaagctagtttttgataaagtaggtttacctgctagaccaaaaagtcctttagatcctaagaaggatggagagtccctttcatattctatgttgcctttgagtgatggtccagaaggctcaagcagtcgtcctcagatgataagaggacgcttgtgttatgataccgcgaaggagatcctcta

SEQ ID NO: 244383 - DNA, 842 bp, Homo Sapiens
gggagagctctggggagtctgcaccatggcttggaccccactcctcttcctcaccctcctcctccactgcacagggtctctctcccagcttgtgctgactcaatcgccctctgcctctgcctccctgggagcctcggtcaagctcacctgcactctgagcagtgggcacagcagctacgccatcgcatggcatcagcagcagccagagaagggccctcggtacttgatgaagcttaacagtgatggcagccacagcaagggggacgggatccctgatcgcttctcaggctccagctctggggctgagcgctacctcaccatctccagcctccagtctgaggatgaggctgactattactgtcagacctggggcactggcatggtgttcggcggagggaccaagctgaccgtcctaggtcagcccaaggctgccccctcggtcactctgttcccaccctcctctgaggagcttcaagccaacaaggccacactggtgtgtctcataagtgacttctacccgggagccgtgacagtggcctggaaggcagatagcagccccgtcaaggcgggagtggagaccaccacaccctccaaacaaagcaacaacaagtacgcggcccagcagctacctgagccttgacgcctggacagtgggaaagtccccacaaaagctaccagctgccagggtcaccgcatgaaagggagccaccgtgggaaaaaaacagtgggcccctacagaaaggtttcataggtttttaattcccttaccccccaaccaaggggaaaaactaaaaagctgcaaggaatccccaaggggaagaggggttttttttccttcccaa

SEQ ID NO: 244384 - DNA, 446 bp, Homo Sapiens
  misc_feature (14)..(14): n is a, c, g, or t
  misc_feature (348)..(348): n is a, c, g, or t
  misc_feature (364)..(364): n is a, c, g, or t
  misc_feature (394)..(394): n is a, c, g, or t
  misc_feature (401)..(401): n is a, c, g, or t
  misc_feature (407)..(407): n is a, c, g, or t
  misc_feature (419)..(419): n is a, c, g, or t
gtcagaacctattntacaaattggtaccagcagaagccaggacaggcccctatacttctcatttctggtaaaaatacccggccctcagggatcccagaccgattctctgcctccagctcaggaaacacggcttccttgaccatcgctgggactcaggcggaagatgaggctgactactactgtaactcccgagacagtagtggttacccctatgtgtcattcggcggagggaccaagttgaccgtcctaggtcagcccaaggctgccccctcggtcactctgttcccgccctcctctgaggagctttcaagccaacccggccacatttgtgtgtctctgtgacttctncccgggagccgtgcangtgggcctgggatggggcagataggcaagnccctccnggttcnaagggccggggnagttgggagtaacctacctatctatct

SEQ ID NO: 244385 - DNA, 476 bp, Homo Sapiens
  misc_feature (396)..(396): n is a, c, g, or t
  misc_feature (406)..(406): n is a, c, g, or t
  misc_feature (427)..(427): n is a, c, g, or t
cggcacgagggctctcgggacgtctccaccatggcctgggctctgctattcctcaccctcctcactcaggtcacagggtcctgggcccagtctgccctgactcagcctgcctccgtgtctgcgtctcctggacagtcgatcaccatctcctgcactggaaccagcagtgacattggtacttatgactatgtctcctggttccaacaacgcccaggcaaagtccccaaactcatgatttatgatgtcagtagtcggccctcagggatttcttatcgcttctctggctccaagtctggcaacacggcctccctggaccatctctggggctccagggttgaaggacgagggttgattattacttgcatgttcattggacaaaacatccccatttatgtntttggggaantgggggaccaagggtcacctntttagggtcaggcccaagggccaaccccattgttcattttgttttcccg

SEQ ID NO: 244386 - DNA, 396 bp, Homo Sapiens
  misc_feature (323)..(323): n is a, c, g, or t
ggcctgggctctgctcctcctcaccctcctcactcagggcacaggatcctgggctcagtctgccctgactcagcctccctccgtgtccgggtctcctggacagtcagtcaccatctcctgcactggaacctccactgacattggttcttatagccgtgtctcctggtaccaccaggccccagacacagcccccaaactcatcatttatgaggtcagtaatcggccctcaggggtccctgatcgcttctctgggtccaagtctgggcaacacggcctccctggaccatctctggggctccaggctgaaagacgagggttgattntttactggcggcctcatatggcaagccaggcagcaattgttaatattttcgggccgaaggggaccaaggttga

SEQ ID NO: 244387 - DNA, 446 bp, Homo Sapiens; identical to SEQ ID NO: 244384
  misc_feature (14)..(14): n is a, c, g, or t
  misc_feature (348)..(348): n is a, c, g, or t
  misc_feature (364)..(364): n is a, c, g, or t
  misc_feature (394)..(394): n is a, c, g, or t
  misc_feature (401)..(401): n is a, c, g, or t
  misc_feature (407)..(407): n is a, c, g, or t
  misc_feature (419)..(419): n is a, c, g, or t

SEQ ID NO: 244388 - DNA, 850 bp, Homo Sapiens
gggggggagtctgcaccatggcttggaccccactcctcttcctcaccctcctcctccactgcacagggtctctctcccagcttgtgctgactcaatcgccctctgcctctgcctccctgggagcctcggtcaagctcacctgcactctgagcagtgggcacagcagctacgccatcgcatggcatcagcagcagccagagaagggccctcggtacttgatgaagcttaacagtgatggcagccacagcaagggggacggggatccctgatcgcttctcaggctccagctctggggctgagcgctacctcaccatctccagcctccagtctgaggatgaggctgactattactgtcagacctggggcactggcatggtgttcggcggagggaccaagctgaccgtcctaggtcagcccaaggctgcccccctcggtcactctgttcccaccctcctctgaggagctttcagccaacaaggcccacactggtgtgtctcataagtgacttctacccgggagccgttgacagtgggcctgggaaggcagataacagccccggtcaagggcggggagtgggagaccaccccacccctccaaaccaaagccaaccaccaggttaccgcgggccagcagcctaccctgaagcctggacgccctgtagcaggggaaaatccccccaaaaagccttacggctggcccagggcccccgcattgaaaagggaaacaccccgggggagaaaaaacagggggccccccctaacagaaaaggggttcattaaggtgttcttatgtcccttgcaccccccccacccaggggggagaacttataaacctggcacaggacacccca

SEQ ID NO: 244389 - DNA, 396 bp, Homo Sapiens; identical to SEQ ID NO: 244386
  misc_feature (323)..(323): n is a, c, g, or t

SEQ ID NO: 244390 - DNA, 243 bp, Homo Sapiens
atgacccatggatttaccgaatttcgagctcgggtaccctttctcaaataaaagccttcaatctcttgatttcaccatgcaacatttgcaagaaatgaaatattttatcaatcaaaatcctacagatgcattaaaacgaggcagggttatcctggttaactcggaacacagggaagaggaatcatgatctcccttgtctccaaactcctctctgcctccctaaggacgaaatcctggagagtc

SEQ ID NO: 244391 - DNA, 331 bp, Homo Sapiens
  misc_feature (312)..(312): n is a, c, g, or t
tagggtcttagggagaaaaccaaggaagatattagaaaagttacacacaagctgttggtttagtatgaaaaacttttgattctatctgctacttagaatttatcacaattaaccaatcctttcagtaaattatctgtttgccactgtgtatatggacatatcgtggctaaatacatttaagagagagaagaaaaattcctattaagaacttttaacactggaattacctgagtttcacttacctggaatattttttgtgtggcataaattggcaacagaggtcaggacaattggacgcaaatgcccctaagncctgggatcctctaggtca

SEQ ID NO: 244392 - DNA, 180 bp, Homo Sapiens
tagggtcttagggagaggatgcataggccctggaggcactgtgattcagatagctctaagtcatgcatgtcaccattttaatgtcaaaggaatcacccgggaatcatgttaaaatgcagattctgacctggtaggtcttggttacagattcagcctccctccctaagacctataatcctt

SEQ ID NO: 244393 - DNA, 149 bp, Homo Sapiens
tgcaatcactccaattgagttttcatcctcactactttactgaaataactacattttccttctagctacaatgttttctctggtcttctgtaacttcagagtcactggtttccctcattcactctgctacttgtctgctcctccctaaa

SEQ ID NO: 244394 - DNA, 245 bp, Homo Sapiens
gggtcttagggagtgatcctttgtttatactccacaaagggccatctctggcctaggcagcactgcagaaggcaggaccatgtacctgagactgatgagctgagtcgggtgcgagcctcactcaaggagagggtagagagggtaggtacccacctatcccatccggctctgttctttgagtttatgggacttccttcatcccgatcacttgggtgccattgttacaaggggctggctattcctac

SEQ ID NO: 244395 - DNA, 311 bp, Homo Sapiens
cagacccaaagacaagtacccggctccagtgcccagaacagaggcttcacaacatggctgaatgattttcaaagtcaggccaagacctatcccataagtaagaatatgacaaaacagactgctatgttatagatttaggcgataacaatggaataggacattaaataactgaatcaaaaggtgacaaagtcattccccttcagttctttttcagacttccctattaggagagcttgtgtttggtgctcatcttgagcacctttctgatcatacctgcccatctccagttttagaggaacgagataccacgt

SEQ ID NO: 244396 - DNA, 264 bp, Homo Sapiens
tcttagggagccggaagatagtcgcaaaatgctgaatcccacagtactgagttcagcagaggttaggaactctggccaacctcacagaggggatttcatgtgtcagtgtcagtggtcgagaaataatgaaattggaactgaaaagtgattgagccggtacctgttactgtgggtgcaaaaggctgcgatacacgtgggacttgtgggctcgctgaagctggaaactgtttggattcttgtggagcactctgacctttactcctc

SEQ ID NO: 244397 - DNA, 515 bp, Homo Sapiens
tacggttataaaggacaaagactgcttctttggaagagtgctgtatacaggtaggtggttattaagtgaaccagtgtttctccaactgtgagttatctcacattaaggcttcctcaaatggtttgtgaaataatttttttgtaacagactggaatggaatggagtgggatggaatgaaatagaatggaaaaccaaatactggagtgtaccacatgttgtcagattagctattatttggtaaaacttgtgccatggtaggaggccagaatgatgtcaatttgacatttagaaaaatgtaaatgcaatgttcatattactttgaatacttcactgcattacaatgcttcagaatcgtttcaattgtaattagactaagtctcagagtccataatttatagagttaagacagattaacaaacagggtggagctttcactacaatagcaacactcttcctccctgaggctcggaaagccagcagtgacaccaacagcttgcgagaggtaacacccttat

SEQ ID NO: 244398 - DNA, 472 bp, Homo Sapiens
gaaaaactactgtttattttttatgtcaatattgtagttacattttcagaatcacatgctgtgggaaaaaatcagcaagcagaaggtttataataaaccaaaagatttatttataacattttctgaattcacttaaaaaacaaaaaggaatcccccttccctcaaaatagaaccgtttcctatggattccatccagtatgacttttcagatatctaagaagattttgctacacttattacaatggtagttttcccacagtgtaattctctgatacaggtttgaaatattgcagaaattcactctacattcatttatacagttgctttttctcctacaagagtattaaaatttaagtattgcattgtaattgaaggcattcccaaatcactgtgtttgtatcactttggttaattggagattgctccaaagtaaacgttctcaatgttggacttactcaccgggtaccgagct

SEQ ID NO: 244399 - DNA, 1081 bp, Homo Sapiens
  misc_feature (35)..(35): n is a, c, g, or t
  misc_feature (535)..(548): n is a, c, g, or t
  misc_feature (617)..(634): n is a, c, g, or t
  misc_feature (882)..(896): n is a, c, g, or t
caactttaaacaggcaaaagtgaagtgggttctgnaccccccaatcccctacctcagcaagcaggaaagggaagtgctggtctccacctgttcccactaaggccccgtggtatccctggcagaagcctctgcatgtatctgcgctctgaggatgggggtttgaaaacaaaataagaccctacgtcctactaccttgagcttggctctaaaaccacgggaaaggaagagatatattgcaccttaaaacatctctgcactaagaactgcatttcattagaccaaggaggggttggggcgctgggaggcctgaggcctgccctcagccccccaagtctcatttaaaacctgcatctcagcgaagagactgcagctcaggtcacacagaggtggtgactgcaccgaacttcacatgcaatttcctggcctttcctgcacagaattaattcagacattatatataaatagagcagtgaacatttacttctttttttcacctagacctacaacatcaatacatatatatacattctagtgnnnnnnnnnnnnnnatttggggtgggggaggagaaaggaaggaaataccaggtaagagaaaagggctggagaacaggtgaccnnnnnnnnnnnnnnnnnnctcaaacagcaagtactgtgggtctgataccaggttcacctgaagggtacatcttaacagcatccagaaggctttcttttgacaaatcacacgcaccaccgcatcaggtgggaggggtctggccatgcggctcaagtgtccaggtggagatgaatgtgtgattctcatgctaaaactgtcatcaacttcatgggctgcctgtaagcgccctgggctcatcaagccaggagctggaacccaactatgannnnnnnnnnnnnnnaacctgcctgctgctctgagcaccccatcgcttcccaggcggggagccaggcaccagaatgctcgcaatcggtgccctcaagaacctccttttctttttgcaaataacctcaagggtgaaccagctgaggaatcaggaggggatgcattcttaagagtcacctcttaaggtactgcagtgacgta

SEQ ID NO: 244400 - DNA, 240 bp, Homo Sapiens
cgagcttgcatggctggttagtccgaacttgcatggctggttagtccgaacttgcatggctggttagtccgaacttgcatggctggttagtcccaaaaagtgcgaatcaaaacagagatttgggaaccaccaggcatgcataggtagggcagggcatctcaactcgctgcaacccatcagagagtacatctcaacccactacagctcatcagacagtacatcttaactcactacaactca

SEQ ID NO: 244401 - DNA, 510 bp, Homo Sapiens
ggatccccgggagtagtccaaatcactgatgctttacatgtgttggtggccttctgtctccagccctttaacttttcattctaggaggagttttaggcttcctaggttatcttatctttctcccctgggttctttcttcactttctgtgattcttgtataattgaatatggccatgctaattttacaagtcaacaggagctcagaaatggtgcataaaaatgaaggtcatgtagctaacgatgtcacaggtgaaggtaggagtgagtcctatatgttttagacttctataagcccagggagaaaactctcttttctaggcctttgacatcctcagtcatttttatacaccatccccacctatctgtattttgcacgccccattatgcttagctggactgatgacagtcttcctagaagctgtaaccctttccacatcgattgcactctttctgtgtcatttctcccaggtagagtcaagttggactactcccggggtcctctagtcacct

SEQ ID NO: 244402 - DNA, 538 bp, Homo Sapiens
cagaggattaccgggagtaagtccaatcagctcttttaccaatgaacacttccttgtgatatagatgtttatggccgagaggatccagtatattaataaaatccctttttgtattcaatgagggaaacacataattttcatcaattagcagcttattggaatatctgcatgatggtttaacacttttaagtgttgactaaagattaattttacagaaaatagaaaaagaaatatgtttctgtctggaggaatgatttattgttgaccctaaattgaaatattttactagtggcttaatggaaagatgatgaaagatgatgaaattaatgtagaagcttaactagaaaatcaggtgacctgatatctacatctgtatccttcattggccacccagcattcattaatgaatcagatgatggaatagatcaagtttcctaggaacacagtgaatattaaaagaaaacaaagggagcctagcacctagaagacctagtttatatttcaaagtatatttggactactcccggggatcctctgg

SEQ ID NO: 244403 - DNA, 317 bp, Homo Sapiens
ttagtccaatgctgcattatgtattggtttcaggcatttgctgaataggtgatgatacatgggtatttttctgcaagtatttaaaccaggggcatatgcaaaggcagttgtaatttcctcttggaaaaagcgccaaatgtttgaaggttaaaatcaaatgctagggttgatatttaggcttataacaaaataggcttgttttctaagcagttttttcctagagttttaactgttaactcactagtttgctgctgtttgtaaaatgttactgtccaatgttggattattgttttgactactcctgagatcctgtagag

SEQ ID NO: 244404 - DNA, 187 bp, Homo Sapiens
gactctagaggattcctagggtcttagggagatatccccgtgtttattgccatgattcaggctagcggagtggccgcacggacacagaagcttaaagtaaacgagagaactggttgaaagactaacaatatgtgttggggtgggagaggaagttgcagccctgggcaccttgtttaaagttggaatt

SEQ ID NO: 244405 - DNA, 611 bp, Homo Sapiens
ctggtactaagttgtatatatccttaaaaaatgcgagtttatttctcttaaacacgttttgtttattttacattttgtaacagatccttaagtccttaagggtacattctgtttttattctattttctctgctgcctctcactcataatggatataacacagagtatgaactcttatttcactgatttccatctgcatgaaccccgaggaattagatttgagagtagcttcctctacagaagtttaatgtttgttcctggcaggcacccttgggggctataaacacaaactactttaattcattagcttggagtcttccaaacaccacaggtgaagtaaatttaaaaccacaacttgtgtgagtagacagcttagttacaaattatgagaaaagattaggggttttttttccccctctgtttaaggcaaagtcaagacagacattatatcaacttgaagataaagaggattttttgtgtcgttttgtttttctcacctgtccaccttgtcatggatatacagcccccttgtcaatgctggcttaatgccaactctcaatcttcaccttgggtcagctcaaggtcttgtgatctgtgtgtctagctattcac

SEQ ID NO: 244406 - DNA, 257 bp, Homo Sapiens
ctgtatcccggggaggaggacatggaggatggtaagtgcctgtggttcaccgcctcgcagtgggcggaaaccttgtcagaaaacaggttcagatccatgcttggtacttcttgggtacatccttgggtacttctgagcgtagctagttttcaggaggctgtaactgaggaaaatcctgtttgggttttgagtttcaagattgcctacaccattgccaggtaagtagagtctccccggatacagctccacgggataca

SEQ ID NO: 244407 - DNA, 268 bp, Homo Sapiens
  misc_feature (268)..(268): n is a, c, g, or t
ttacctttgtgttcccattccacaaattccatttgtcgggcttttgattgtgtctttgacctggtagtgaaatgaatctatagaacaattggagagagaatgacaactttactgagtcttctaagtctgatcatgacatagctctctgtttatttagttctgcagtttcttacaataatatgttatagtgttctatgtagaagtcttgcagtcttttattagataaatcatgagtacttgatattttatgtggttatatatctttttn

SEQ ID NO: 244408 - DNA, 481 bp, Homo Sapiens
  misc_feature (469)..(469): n is a, c, g, or t
ctgtatcccggggagggagacatttctttcagaagcaaggtaatactttggtctggtctatgactctattttgtttaaaatgaaactatggcagtatagtggtattcattctgcttcccataggttaactttacatccctctgtcttcacccactcttcagttctgattcttttaaaagcagccaaccaaaaccagcaagtacatactgcttatctctgacttccaccagaatcaacttcagatcttgtccaaagctccatctgaagagaggggaataacacccagccaagagccctcagggcccatcagtaagtagacatcctgtccttgaggttccttaactctgctcagcttcagaatacagaaggggttggttcttcatttgtgttgtttatatactaatagcctcctgctccccacttttttgcatagcttcttctgccatcccaccttaagcctctgcactcnccgggatacagt

SEQ ID NO: 244409 - DNA, 330 bp, Homo Sapiens
cacaggagctagtatccgggagtatggcaactttcattaatttttagcacagcatagaaggtaagtagagagagaggaagctggaggtacggccgcctgatcacaggagcccttccacacggtggcgctggtgggtcacccaagaccttagcaggtgtctccaggacgtgacatctctcccccgcgcccttaccacagtgttccagacatgctgactcattctctaaatagaagataagctgacccaaagactatgtattatttaatagaaaagattactgaaagcccagagggagccatatatcttctgtgacggctccccgggaacag

SEQ ID NO: 244410 - DNA, 272 bp, Homo Sapiens
ctgtatcccggggagctgtatgccggggagcaaaccaggtgcagccaggtgtgacctcagagaagcccttctacctccctgagtctctgcttccatctgtccacagttaccacccatccggcagcatggataggggatgaagcgggaagcgaacatgagagcacctgatgtgtcgcagctgatcaatatatcaatgctgccattgcactcacgcctgggtaacaagagtgaaattccgtgcccctccccggatacagtaacctctagacgat

SEQ ID NO: 244411 - DNA, 387 bp, Homo Sapiens
  misc_feature (145)..(248): n is a, c, g, or t
ccggggagtccaaaaacagcaccagcagatttctcagcagaatccctgcaggccataaaagggtgggataatataatcaaagtgtagaagaaaaacaaaactggcaaccaagaaatacttaactcagcaaagctattcctcagannnnnnnnnnnnnnnnnnnnnnnnnnnnnnnnnnnnnnnnnnnnnnnnnnnnnnnnnnnnnnnnnnnnnnnnnnnnnnnnnnnnnnnnnnnnnnnnnnnnnnnnataaaaagggctccctaatttgatacaataaaacttataaaagcaaaaagcactaaatggtgtaagtaagacatagtcatattcagaataatactgtaaggatgatgtgtaaaggaattttctctctccccggatacag

SEQ ID NO: 244412 - DNA, 405 bp, Homo Sapiens
  misc_feature (267)..(267): n is a, c, g, or t
aagcatctccccttttatggcataaattaatgggaataactggtacccttgggagagcatatacagaagagattaagtaattgacagaaatataccaagtatgtcagagcactttaagcctgaatactttcaggcagttgtggcacacaggaataatctttatgaaagtatctatttgactcaaatttttatatcattaccagctggatagtctcaacttaccatgttagaaggaatatggtgttatacatcttttaatattgaggncttcgtcatcaccaccccccatacccccaaaatatttatgattctcttttagaaaggaaaaagcatagtaggttccattattttatcacatgaggaaactgtactcttcatgtaccctactcccggataaaggggatc

SEQ ID NO: 244413 - DNA, 454 bp, Homo Sapiens
gttatccggggagaaaatgtgtttgagattagcacgttatcagaaaaatgtttgcacttatcttattctttgaataagttgcaagctatttctcttctttcaccaaaggcaaaatagtaagccaaacctgtaatcagaaaaatattgatatgttagatagagaaagttatttttgtgtgtttgtttcagttgttgaatcaactggtatgtatcgagtacctactgcatgtagggggattgtagagaactttcagtgtcaagttagagattttaaactttatcctagaagtagaacgagaaattaaggcactgagttagaaaggagctagaccatgatttctcccatatctcttgtgcaaatggcactagccaagccagaagcccctatgctgttcctccatgtgcccctgcccagccattcagcagccttggtgctgagtctgcctgggatatc

SEQ ID NO: 244414 - DNA, 486 bp, Homo Sapiens
ggggagtctccttcaccacccagctgggatctcagtgctttcttttctgtcctcctccaggatggggtcaaccgtcatcctttccctcgtcctggctgttctccaaggtgtctttgccgaggtgcagctgttgcagtctgcagcagaggtgaaaagacccggggagtctctgaggatctcctgtaagggttctggatacacctttaccagttactggatcggctgggtgcgccagatgcccgggaaaggcctggagtggatggggatcatctatcctggtgactctgataccagatacagcccgtccttccaaggccaggtctccatctcagccgacaagtccatcagcaccgcctacctgcagtggagcagcctgaaggcctcggacaccgccatgtattactgtgcgcgacaggcgggcaaagtagcagctggtacttaaacctactactattacggtatggacgtctggggccaagggaccac

SEQ ID NO: 244415 - DNA, 334 bp, Homo Sapiens
ctgtatccggggagctgtacccggggggccagtctttcctgtgctattcttatgatagtgattgtgtctcacaagacctgatgggtttatcagcgtttccacttttgcttcttcctcatttttctcttgccgctgccatgtaagaagtgccttctgccttcctccgtgattctgaggcctccccagccatgtggaactgtaagtccaattaaacctctttgttttcccaatctcggttatgtctttgtcagtggcatgaaaacagactaatacagcccccaacatcttaaaccttttttctctctcccgggatacagggggatcccaagagtcg

SEQ ID NO: 244416 - DNA, 490 bp, Homo Sapiens
  misc_feature (428)..(428): n is a, c, g, or t
gcattaagatggccattcgaaaacattaagcacagaagaatcccattcaggtaatcttctgttggctggctgtagaactacggagaacatctggagaaacatgtcaagggtgtgtgtgaaatcgttgagcctactcgattttgtcgtgctgttgcgcggttttcacttggcactgtcctttaaactccttctgtgccgtgactctgcagtgtctggcagcgtagtagactctactccctctatggacgtgatccctctgtgggttctctgcacacttctgtatttctcggttctttttggatttaggagtggattttatacatttttgagtcattcttaaagagcgattgacccttaaagaactgtgtacagtggtttcttttcagtaagaacatagttgtgtggcaccccctgacatgtggtgtgtntgattcttcttccttgtcttccatcgccacctcttatgatctcttcctacccccctcccggg

SEQ ID NO: 244417 - DNA, 319 bp, Homo Sapiens
ttatttaggcaatgacaggatctcattcttttttatggctgaataatactccatcgtgtatatgtaccacattttctttatccatttgtcgttgatggacattatgttgtgtccactcctattatatttttagttctctgtatatttgaaaaaaagactctggagtatagtaactgacacataaataaatgtcaatgtgtattctctttcagatttaccaaaaatttatctcctgacaagataaatctaagtacccttaaaggagaaggtgaactgaagaatttggagttggatgaagaagtactccagaatatgttgg

SEQ ID NO: 244418 - DNA, 335 bp, Homo Sapiens
ttcattaggcaaatcacttaacttgattgaatctcagttactctcactataaaaatgggaccagtaataccttcttcaatgtgatcttgagaagattcactggaataatggtgaaagtaccctatcacagaatttatagtaggtgctaaaaatgttgtgtaccttcctttccttcccttagaaagacagtctcttttatttattgattgtacttttgccaccacagggggaaaaaaatccctgtttcttataaaactttctaggaaattcatgaatttagtgtgggccctctaattctgacaaatacaatattgattttgagtttgttgctttaa

SEQ ID NO: 244419 - DNA, 465 bp, Homo Sapiens
ttagaggatccccgttcatgaggcaatgtttatagtcatgtgactataagcacaatcaagatatagaatatttctctcttccgtgtgtgagccactctacctggtgatttttgcttttcatattcacagctatgattagcgttcctttgtttttggtttttcattaatccatcacatatttttacatttgaaaagtcaaaattagtatttgtcaaacatccgttaatctcaaaaagtgctgtactaaactagaccttggattcaatgttttacgccatctaactctttatggagtgttttcacgtatattaatacctgcattgaccactttcaggcaggttgatattaactgtgaccatcttacagacaaaatcaatgtgtagagagtttaaatgacctgcctaaggttgcccaagtagtaaacaattggaaatgagataactagacatctatttgcctaatgaa

SEQ ID NO: 244420 - DNA, 327 bp, Homo Sapiens
tcatttaggcaagatcccaagactctagtcactatttctaaatttgcaggatttatgctgggagattatcgtactcagttcttgcagttatgtagaagaattcagttttgaattttacatcatttggactgcagagccaataatttgatacttccgagctacttctgaaacctagtactttttacctgcattaattggcatagttccactgtaactcatttaaaaagtaatttaccctaatttctacagtttcaaaagtatgcagttagtgttttaaatgtgaggcttaagtatggctagggaatgctgccgaatttgcctaatgaa

SEQ ID NO: 244421 - DNA, 259 bp, Homo Sapiens
ggggataacaaataatagtgtcctttttgtgagattacggtaagaattgtacgacatgataaatgtaaaatatttgcaacaatgctaggtaaaccataaacaatgatggctactggtatcacaaattcaggatgtccaaaactgaatttatttcatttgcttcacccaaacctgtgttcccattgcattccttctttcattgaaaggcatgacaggtgcaatggatctactcttaatcctctcctttcctttaccttca

SEQ ID NO: 244422 - DNA, 195 bp, Homo Sapiens
gttgtcttgtcttgtcttttctttttctttaggtggagttttgctcttgttgctcaggctgggattacaggcgtgagccaccgcacccggccagaacttcatccctttttatggctgaatgatgacccattgtatggatatagtacatctggtttatccattcatttgttgatggacacttgagttgtttccacc

SEQ ID NO: 244423 - DNA, 210 bp, Homo Sapiens
ttgaattaggcaaatccaaattgagggacgtattttaaaataacagtcttgtaatcttcaaaagtgttaaggttatgaatgtcaagggaggcctgataaactgtttcagattgaggaagaagagacatgacaactaaaggcagcttgtgatcctgaaactagatcattttgctatcaaaacatgatggtacattgcctataggaccgcca

SEQ ID NO: 244424 - DNA, 606 bp, Homo Sapiens
ttggtgggacgaagaggttggttttctgtcctctcctgtcacaagaggtcttgagtaagaccttataatatgttggcaatcagaagaggtgcttgggaggagaatggaaagggagcgagtaggaccaggaggaagaaaacaaattctatctccctcaccattttgcccagagtctccataaccacccccaagccatcactcaaatcccagactgcttacccacttcccctggctgctccactgaaatgtacccttacttcatatttcatataagcacaatataacttaccaatcggttttcgtcaaacacttcaaaaagaagccggtgctgctgaggatgaacctttgtcccacccccagagcaaatacagtaaacagtttcttaggtccttccagaattatttttctgaataatatttcttcattccactttggattcaaactctttttaatggtttttgtttgcacacttgtaagaactccattcattgggtcatataacgtcactctcacgtaaggatcactagctcccaatatatccttcttcgcaaggcctattccggctataactcttactctcacattcgtgattttcctcgccaacca

SEQ ID NO: 244425 - DNA, 504 bp, Homo Sapiens
tagtaatgtggatggcttgaataattacaatgagaacaagacttctgtttgtggtaactttgagtggtaagattcatatgggtgtctttttttctttatacttttctgtgttttccatgttttccaaagtgctgggattgcaggcatgagccaccgcacccggccagcattcattgtttagttcacgcgagttttcaggtttgcgttagtggtgtcgtgacatcttcttcatgatcctgtttgtgttttccacttctctggaaagaccgcttcataggttggtgccatcagacatgcgtaaccctagtgggtgtagccccccatcctggacggggccttgacggggcctctggcctcctcccctgccttcctcttctcagctctgaccagaggggatggaagcttgtgtccctctgggtgacagacccagcctgcccgccctacccagctcgggttctgggttcctttgtcctcgtccccagggctgcgtgtcctgctcgtcca

SEQ ID NO: 244426 - DNA, 678 bp, Homo Sapiens
agatacgaatcgagctccgtaccatataggttggacgagttgcacatgggtagcatttatattaactaaatttggttttcattttagaaacaaattcctcctttcttctttttttctgctgccaaagcccaataggcttataaataaatacacagcccacaggaaagacttgaggaggttcaggtagacatttcatttgaatttccggagcctggttttatcttaacagccctcatactccttggaccacacctgggcaagcaaagtgaagtgggaaataaaatagttggatcaatgacgtcaacaaccaacgccgctgtccaaaaccaaaacctcacatttcaagcagaggctgggtggggaatatatatttttttaacctaaatcttcttctcattttctccttttttggtgagggtagaaatatcatgtaagaggcctgttatacagataactaacgcaagagacacgtgagcagacgtcacttgagcctcattttccatgccaaaattcaggatttaaggtctaaaaccatagagaatattttagagctagatggttccagaaaatctgagacatgtggccaccacagctgtgaagtggcccactctctcccacctacccaccccagaatttcttacccttcatcgtccaacctatatggtaccgagctcgatt

SEQ ID NO: 244427 - DNA, 898 bp, Homo Sapiens
gccgtccatataggttggacgacggcagaggccgcacagctatcactttagtaaggaaattactagcttgtgttgctatttacatatgaattactgattattttgaaaagacggtgttatgcttgggtgttagtgaggctgatatgtcatgtcaatcgataaaccctactttccaaattatctaaaagattaccatttggggcccttgttttcaagttatctaactgaaatattattaatttttttaagttaatctcattcagtcttctagtaataaatgcttttttaagtaccttctacagtcttcctacctgaggggttcagaggctgctgactcacactgctaactctgttactgacaaaagcaaatcaataactctaaattctgggctgatataaagaaaaaaacaatattggatttggatttaatctgggtaaaatcagccttctgagaagggctaagaaacagttcaattaactgtataggtctttcattagaccgagacatcactagaaattctgggcactgctgtttgtggtatttgtctcagagtagcttatgactgttttggttctagctttagattttggattttcaccagtcatgtgttaatttacattagatagtaaagaatggctacactaagactgaattatcttattagtctggccagcatataaagtatacttgtatgtaatgattgcccaggttacagaattgctgacatctgtctaaaaagttttgactatcccatttagaagtgtaatttctatatactttatgctgtttatatttcagtcattacacccagtcccatttagagattatgggctttgttagcactttccaaaaaacaaagcaaccatacctcgtccaccatatggtacgagctcgacc

SEQ ID NO: 244428 - DNA, 511 bp, Homo Sapiens
gggaacgtggtattgaacaggttcacttcccttttctcacattcaactggagttcagaaaaatatcatcattctcctttgacaattattctttctaaactgagaacgtgaataactaggacaggcagggcgttggtgtggtttcatcactttttcccaatccttcctgcagttttttgcaagccttccattccacgcttcagactgccactgggtcttcagtttgtttttgattgttggagccatgtcaatgaaaaaaggctgagtttgacctctcaatatatggatactaatttattgataaaaatggagagtagaataatggtatgtatggtatacaaatattacactgtaaagaaacacattcctatttttttgtgcatccccgtggatcatctcgtgcatcccctttttgaggttcactttttagatcaggcactgcttgaggtgccagcaaaacagctaccctccaatcaaatcaaacaccaaaagcaaaatccaacttcagttac

SEQ ID NO: 244429 - DNA, 366 bp, Homo Sapiens
ttataaaataccttggggtttggagttgtgtaaatattaaatattgctttggtgacagtgtagccctttgcaaaacaaaatctttcccttcacccacctggaatgctgtgaaacacagtggagcatgcatatatttacgattttctcagtaatgtttattatgaaggaatccagggtcaggatatcaagaatcttctatgcctgttccttatagagtgactgcttcccagaccaaaggacaaaggttacgtactaaaaaatcttcccacatcacacaagttaaggactcaacttgtgcatcatcatttttctaacattcagataacccagaggaatagactttcttgagagcgagcaaaccttttc

SEQ ID NO: 244430 - DNA, 418 bp, Homo Sapiens
tttcagaaggcacatgcatatacagaagcatttacatgcacaaatatcagcacactaatcctcaagccccattacgcagtacaaaggacagaaagacagcagtgagaccaaggttatttccaataaaggatttgcagggccatagagaattagcaaataaaaacttgtttttttaaaataacaaataagaaagcacagtttggaactccttatcttgggcctcagttttctttgcctgtataatgaaggcactgggcaacatttctaatgggtttctatacccaaaattctgtgattctaacataatgggtttaacgccactgtacttcttttaacctgttaaattactctgccctttacaaaaagccacagaacccttatgattataccatttacgatttaaggggttttcacaggt

SEQ ID NO: 244431 - DNA, 365 bp, Homo Sapiens
aagataaatttctttggctcagtgttctgtcctctgagcccacccaggtggtggccaagccttctcagctctggaaagcagccctactcacctcagccctagaaaacagacccacaccctctggcactcacaagcagatgcctggctagatgaaatctggaggatatagccacattccctaggcctatgcctctgggcccaagggagaagtaacagccctgctgacctatgatctacctttgggttattcttctcttttcttgaaggataagacatgtttacagctggatagcgctattggcccattttgtagaattccagaagtccaacagccttccttcattttatcccatctcacgttcccg

SEQ ID NO: 244432 - DNA, 494 bp, Homo Sapiens
gatcgagccggtacctgctgttttcaatggaaatgtttcctttatctttttcagattgttcattgcttgtgtatgatgatgatacagctgtcttttgccaagtaggggaacctcagaatgagatacaactccatgaagaaccatctcttggtatgcaacaaggtcttcagtcagtcagtcaatcaattcagcagagctgcatgatacaagatcaatatacaaaagtcagctgtatcatcatcatacacaagcaatgaacaatctgaaaaagattaaggaaacatttccatttaaaacagcatcaaaaagaatatttagcaacaaatttaaccaaagaagtgtaaaacttgcaccctgtaaccacaaaacactgttgaaagaaaccgaagacctaaataagtggagggaaaaaatcccatgttcatggatcaaaagacacagtgtctttacgacagcaacaccccccagggtgacctgatgattcactcgcaggg

SEQ ID NO: 244433 - DNA, 372 bp, Homo Sapiens
ttttgaaaatataattttatcagtagttggctcaagtcaaagagacaaaatacagaatttctacctctcaaaattgtttaacttatttaacttaatcttccccaaatatttctcctctgacctcagatcgtatcctattcattgcctcatcctactaattacctgcattacctacaaatcacctaatatggctcacacttggctctagtattttaaaaaaaagacaatactatatagtctatcaggctgacactaagctggcaatttttaaatcagataaattccataactaataccatcagtgctacactagtagaatcctattgggatatcccatgcattccaagttcttaatgttatagtgatggtgcc

SEQ ID NO: 244434 - DNA, 330 bp, Homo Sapiens
ctgcgacagttccacttttgttcaggcataagatgtctttgagaaggagaaaacccatgtgagtaagtattgagttgtaatcgtgtattcggattatctggattttttttggctcacagtggttctgccatctagccactgaaccctcccaacctttccccgtcctcagccctcatctgtcacgttcagttaccacttcttgccagctttaccttctagatagttcttgacttcatcctctcctctccatttgtattgccactgccctaggtgagatcgtcacttctctctcctcagttgcttgtctcttccttcatcagtgatgtattc

SEQ ID NO: 244435 - DNA, 365 bp, Homo Sapiens
tcaacaggctaagttggaaggtccctgcaacttgaatctccctccaacagggatgttcagcctctgctagtatatcaccctaaaactatctcactggaacataagtttcatgagacagggactttgttttattcaatgctgtatttctaaggccctgggacataataggggctcgataaataacagttgagtgttgctgaaataatctaaaacctgcttcaggccaagcgtggtgagccatttacatattaacccatactgtcctctcaacaatcttatcaggtaggaactatcatcatccccacttttactgtaagaaatctaaggccccacttgggaggctgaggcagaaggggtgtgtttca

SEQ ID NO: 244436 - DNA, 380 bp, Homo Sapiens
aagcaatagttgaaaatactattaagttaaaaatgcattaatacacctagtctactgaacatcatagcttagactagcctctgtaaatgtactcagcatacttacagtagcctacggttgaacaaaataacatgaagcctattttataataaagtgttgatcatctcgtggttgtttacccctgtcatcgtgtggctgactgggagctgcccagcatcacaagagagtatactaccacataccaatagcctaggaaaagataaaaattcaaaaatcaaagtactgtttctagtgagtacgtatgacttttgcaccatttataaagtccaaatattgtaagtcgaaccattgtaactgcaggaccatctgtaccttaaata

SEQ ID NO: 244437 - DNA, 1055 bp, Homo Sapiens
  misc_feature (1018)..(1018): n is a, c, g, or t
ggctgagcagctctatcagtacatggttggaggacataggcgctttcaaacaggaatgcatagggagaaacataaatcaccaagttatcaaatcaaagaaggagataccataaatgtggatgtgacttgtccaggtgctactctagctttggctatgatctacttaaaaaccaataacagatctattgcagattggctcccgagcccctgacaccatgtatttgttggactttgtgaagccagaatttctcttgcttaggacacttgctcgatgcctgattttgtgggatgatattttaccaaattccaagtgggttgacagcaatgttcctcaaattataagagaaaatagtatctctctcagtgaaatcgaattgccgtgctcagaggatttgaatttggaaactttgtcccaagcacatgtctacataattgcaggagcctgcttgtctctgggttttcgatttgctggctcagaaaacttatcagcatttaactgtttgcataaatttgccaaagattttatgacttatttgtctgcacctaatgcttctgttacaggtcctcataacctagaaacttgtctgagcgtggtgctgctgtctctcgccatggtcatggctggctcaggaaacctaaaggttttgcagctttgtcgcttcttacacatgaaaacgggtggtgaaatgaactatggttttcacttagcccaccacatggcccttggacttctatttttgggaggaggaaggtactctttgagcacatcaaattcttccattgccgctcttctctgtgccctttatccgcacttcccagctcacagcactgaacaccggtatcatctccaggctctccggcacctctatgtgctggccgcggagccccaggcttctagtgccctgtggatgtggacacaaacacgcccctgctatgcccctcttaaaagttacctacaaaggccactcagtggggatgaacaaccccaaagaagaattgattgggtccctacccttcnttccaaaaactccatcctttttaagcgcatataaagt

SEQ ID NO: 244438 - DNA, 439 bp, Homo Sapiens
ttcctttcttgtaatgtgcttttcaccatcccatagatgacaaccacaagagaaacataaaatgcaggtgcttgcgaactatctaaaactagtctctacaagaaaccattagcgtggttgattccaggtaaccacataacacaaacaaattatctgaatccagaagtgtgtatatctaccaggcccctcctgcccaaaatatagggaaccatactctggctccctaccacgttaaattaaatcataccttcttcatctttaatgattggctttatatctttttcttccttaaaagagctagagacaaaagttaatgttactcatacaggaaaaaaacgaaagagcacagaactaaaaatatgattatgtgctaaaactgaatacctcccagcaaattagtcctgcaagtgggtgtgcgtttcacagtacgcgagctcga

SEQ ID NO: 244439 - DNA, 636 bp, Homo Sapiens
cacgtgaagcactcccacgctgtgatggcgtgctagtgggatggcagatgaggaagaagaccccacgtttgaggaagaaaatgaagaaattggaggaggtgcagaaggtggacagggtaaaagaaagagacttttttctaaagaattgcgatgtatgatgtatggctttggggatgaccagaatccttatactgagtcagtggatattcttgaagatcttgtcatagagtttatcactgaaatgactcacaaggcaatgtcaattggaagacaaggtcgagtacaagttgaagatatcgtcttcttgattcgaaaggacccaaggaagtttgccagggttaaagacttgcttactatgaatgaagaattgaaacgagctagaaaagcatttgatgaagcaaattatggatcttgacactttttgtagtttccgaaaattaccatctggggaaaccatatataataattgtatattttctaaagtaagattctgatatctagccatgtaaatgaaagatggagaaacacaaagttttcagcctttatttttatgcctttgattttagggtgatattggtgcatgtaattgcctgcctttatattaccatacttgaattacttacgttttaatgcgca

SEQ ID NO: 244440 - DNA, 348 bp, Homo Sapiens
acagccaccctgattccccttgcctttttctgaacccttgatatagatgactacccttctttttcttcctttaacttttgagaggttatgttctcttttataactcttcttctgttccctggtttgtcttctatacatgtaggcattctccaagttgttctccaaattcatttcccctgtcttggatgcacaatctcattattttactgtgttaaagtcatatcatatgttcatttaaattacacaaatttatccagacattcagtcaaataaaagagagaaggaatatttagcaatagcaagtgcagtagtgctggcaattctgcttacactccgtttattgaatgt

SEQ ID NO: 244441 - DNA, 521 bp, Homo Sapiens
agtatcccctgtgagagcacacccgaggttcacaaatctacttcatcacagatcaagagtaactctggttagcaactgttaaatcagcggaaagttaatgaacatggaggatgaagtccagaaagtgctgtctgcagtgtttgtgggcaggcattcgcattaggaaaccctctgtggtacaggctctctcagtggccaactatttggtgatctgcacatttttagcatagaaccttgaaatgatacagctgtgctggtcattacggaattctctttttgtgtgacagaattgtgacaggctcccaggacctaaacccagaaggaagcaggaccatattgctgcctagagaaggggatggagcagattccaggacaccgatgaaacagaagcttccatcacagtgctttctgctaccttatgagacagttcgcatctcaacagctctaggatacaaagggagcacatacatttatactttataaggtggccaaggaatcctactgtgggtgtgcttcacagg

SEQ ID NO: 244442 - DNA, 598 bp, Homo Sapiens
  misc_feature (243)..(259): n is a, c, g, or t
cagttattacttttctagaatgcctcaagtcttggtgaaattataatgcttctgacttttcaagagaaagcaggttttcctctccacttagcacaacttgtcagctcttttgtttttgtgccgatacctttcttttccccgctgggtagtgttttttttcttccaatccaaatctttaaaaatatagaattgtcagtctgttccatattccagattattttttttgtttcttaatacattccnnnnnnnnnnnnnnnnncgcgcgtgcgtatagcctttgaaaaatgacttcacctttgtctcttcatctttagggtggagggtggtggggttgatttctgcattccgttatgcagtgactactccacctttacttaaaaataatggaaatcagagtagaatgtgcttttagcctcttgggtggtgttggctggggagtcctagaaatggctataaattcatgacatgatttgcaaagaacttcccagttttgttccaagaaggtcatattctactgttttgtcattagtctgttgtgtgtcacaagctgtataactctttgtatgtcgtattggcggggtggtggctttcacaggga

SEQ ID NO: 244443 - DNA, 412 bp, Homo Sapiens
cgtaagccacccaagtaaacttcaatttaatcatttttgtgtatacttaagatgatttcaaaataaaggttttatgatttaatgtgctattacatttcaaagagttaaagacttacgccattctacaatattcattttaactggtatacttgaggtttatgaactgtgaggttttgtgtgtctttggtaatccctgttaatccatttggcttttcaaactggaacaagattcttcaatattctaaatcctattttaagattccttagccagttcagctcatgtaaagaaatcatccaaaaggaatattaacaatgtaatatttatattgtgtttgtttttacacaactgtgctttagtggttttacattatatgcttagggtgtgctttcagcaggggatactctagagctg

SEQ ID NO: 244444 - DNA, 372 bp, Homo Sapiens
catggaataaacaaatgtgaaccattggaggtgaaaggcgacctgatagtactttgggagtgcagttcccagtaggattttgggtggcctggagcacagcagcagctggaggctggggaccatccagttttaggactctggtgaccaagacctgagagaaagtggaaaggtcaggaagggtcagacttgtctcccaagagtttgtattatcatgggattctcttgaaactctggttcatgtggagaatgtgcttatcctagaagttgactagggttcttggggaatgatggtgaagccagatgcctctgtttgatccaggttctctgcatggtgaatcaccccagaaggagggtgtgctgggtgtgctttca

SEQ ID NO: 244445 - DNA, 132 bp, Homo Sapiens
cggtgaagcacaccaccacaaaatatgcctagcatgacacccacgccaaagtgaatccttttatctgccatggatgcaaccatctcccaggagtccttacttggatcataacgctccacactgcaaatattt

SEQ ID NO: 244446 - DNA, 856 bp, Homo Sapiens
gcctgaactatacgggagagaaaaaggagaaacctgctgccgttgccacagccatggccagagttcttcgggaaaccaagccaatccctaacctcatctttgccatagaacagtatgaaaaatttctcatccacctttctaagaagtccaaggtgaacctgatgcagcacatgaagctcagcacctcacgagacttcaagatcaaaggaaacatcctagacatggttcttcgagaggatggtgaagatgaaaatgaagaggtcagtgctggcttctgtctggagcccagccactcttcctagctgggcactgcatcagagcatgggggacagaacaaagaaccagccaagaagaaaaggaaaaaataaatgaaatgcctgagttaatgtgaactttggggcttctgcttcatttttacccaacaagcaacaatgccccttgtcctgtagtccacaccgatgttggcatcttggttctgaacccactgaattcaactgcaccttcagttagaaggaatcttcttggcaggtcctgctactgaaaaatggctggccttaggcaagcccttttgcaaaaagcacagctgaaagcctgagtttgggagcctgcaccaccccgatgaagctccacgggagcaaatacagagcctccaggcagtgctatggtccaggctggcttcgtttttccaaggagcctttggtgagttcaattatctggtaaatatccagcgcttcacctgaaagaatagtgcaaattggttaggatgccacctcaagaactgtaactgagagctcagaaagtgagcaaaggagcttaaatgctaaggtcaaacggagagtgacaagggttgagaaca

SEQ ID NO: 244447 - DNA, 374 bp, Homo Sapiens
acagcacaccaggtttctgatagtctcgtgctgttaccccttccattttttaaaataagaaattagcagccctctgcataatgtagctgcctatatgcagttttatcctgtgccctaaagcctcactgtccagagctgttggtcatcagatgcttattgcaccctcaccatgtgcctggtgccctgctgggtagacgaacacagaggacagggcatacttcttgtccttaacggagcttgtgatctgtgacagtaagccctcctgggatgtctgtgccatgtgattgacttacaagtgaaactgtcttataatatgaaggtctttttgtttacttctaaacccacttgggtagttactatccccaaatctgttc

SEQ ID NO: 244448 - DNA, 407 bp, Homo Sapiens
aagtggagaacttgagtttatcagaggagacaatcaaagttataagagctcagcctatactattagttagaatgcagaacatgtacctttatctcaatttaagaaaatcattttattgcaatctaatgaaaagtagataagatgaattgttttttgaagggattttaaagcttttttagctgtaagggtgagatatgttttattggctattgcctgtgtgatttgagtaggtcataaaactttctttgcctctcatcattctcacaagctgaatatgagtaacttaaaatgaagagtatcatgaaagaaagcttctagaagtgtgtgatggttaatactgagtgtcaacttgattggattgagggatacaaagtattatcctgggtactgtctgtgtgggggcttct

SEQ ID NO: 244449 - DNA, 577 bp, Homo Sapiens
gggctgggtcgtctagatgatcctcacacgcacttggcttgggcattttagcatgtgtttggtttttgtatttttgtccacttaggaccattagtttcttgagtatgttagataagaagcccttccagatcgaccgtttttcattattttcctcctagtctgcaagatgcttttatttgggttcagtattttctgtcctgtgttgaagctgtgtgaagctctgaagttgtccttagtctcacatggtcacattagcttttgttagtggtgatttctgtgtccctttgagaagaaaagtgagatggcgaagcctttgtatggtctgtgggtatttggttcctatgtcttcgttttctgtttgtggcttaggttcacaggttcaagttttcccacagtagacatgcaccctatgtgttttccttggaggttttggtttcacaattgctctttagtgttcagtggattttgtgtcgctttttgtgtcttgtgtaagggaagagtttatttcagtcctttgcatgtgacccccgtttcttccaaccattgtgccttgggtggctttcacagtaccggctcg

SEQ ID NO: 244450 - DNA, 345 bp, Homo Sapiens
ctcccatttcacaatttacgtataatttacctcttttatttctctacctcaaagaattacacatatgatcaaatccaaaatgggcaaaacaaccaatggaggatttgaggggcgaggagccagtaggacacaacctgagacgtgctcttgccaagtcagagaacttactgcggggagtggtgtcaggaccagaggggaagtttaacccatagatgctttttatagacattcagtttcctctacaaggctttcttttgctgctactctaagcagaagtgagggtaaaatatccaggtagaactgaggaatgatctggcatgccagcagcaccgtgtacaacccacg

SEQ ID NO: 244451 - DNA, 854 bp, Homo Sapiens
gaattatggcactgatataacttctaccagatcttaattacaaaagcactagcagcggtcacagagaaatatcatcacctaggattcaggatgctggacctgcttcccgagatgtccaggccactggcagaatcgcagatgatgctgacccaagagtagcacttgttaacgattctttatctgatgtcacaagtaccacatcttctagggtggatgatcatgactcagaggaaatttgtcttgaccatctgtgtaagggttgtccgcttaatggtagctgcagcaaagtccacttccatctgccttaccggtggcagatgcttattggtaaaacctggacggactttgagcacatggagacgatcgagaaaggctactgtaaccccggagtccacctctgttctgtaggaagttatacaatcaattttcgggtaatgagttgtgattcctttcccatccgacgcctctccactccttcttctgtcaccaagccagccaattctgtcttcaccaccaaatggatttggtattggaagaatgaatctggcacatggattcagtatggagaagagaaagacaaacggaaaaattcaaacgtcgactcttcatacctggagtctctctatcaatcctgtccgaggggagttgtgccatttcaggcgggctcacggaactatgagctgagtttccaagggatgattcagacaaacatagcttccaaaactcaaaaggatgtcatcagaagaccaacatttgtgcctcagtggtatgtgcagcagatgaagagagggccagagtaagtgttctgaagcagctgtttgctgacagatgcttgagatgttcatgccctgggc

SEQ ID NO: 244452 - DNA, 389 bp, Homo Sapiens
ataagttataataggttataataggtgtatatcaatgtgctaccaacataaaatagagtggtcacatctttctacgagcccaattttatttttactttactaggtcatttgtagctagggcctacataagatcccaaggagtatatactcaccagaactggacaatggctgttttggggatttccatctttgcatttgcctttttaaaatgtcttctatttagtccagttctgagcagtaccattactggtgtaactggcaacatgacacaggataattctagcttgacctgggccattctggaaggataggaggtagcctttgcctcaagcatattgttactaacctgcacattagaaccacctattaggggtgcggattcccatcac

SEQ ID NO: 244453 - DNA, 362 bp, Homo Sapiens
gtatatactggctgctcttttccctgcttatagcacttcaaaggcatcctcctgctgctcacagagtaaggacaaaatcccttattgtggcctacaaagtccggccaatctgaccccagcctgtctcttcagcctcatttggctcactttccagcctattctctatgcttaaacttcttcaaacgttctaagcaccctttcagcaccagacttctgcatctactattccctctcccctgctgcccttgtctagttaattcttactgtgccttcagatctcaatttacccttcacttcctcaaggaggctatccccatctctcctaaccaggacaggtcctcctaattctcatagcactatga

SEQ ID NO: 244454 - DNA, 626 bp, Homo Sapiens
tacctctctctggtgatccttcttctctcatggctttagtactatatgctcacaagtcctggaatgcctgtatccatcctgagcccgacagttatgtacgccatgacctaccccacttaggcttaacaggcatttcacttcaaagtagtccaaaacaaagcaggagatttttcccacatgtgattttatttcactctgtcttgagttctcaagtttttcaagacaaaatcttccgagtcagtcatggctcttctctttatcctcactccgcttctctagttctttatcaggtccagtttgactctatctctaaaaccatttctgaatgtgtcaatttctttcattctaactggctctactacaagtccaagtcaccatcctctcttgactgggctactgcagtggactctggcctggtctctaagctttctttcttgagggatctggtcatacactccctatgcaaaaccctgttgtagagcaaagtccaggcttgttgctttatcctaaaaagccccatggcaagggcctctgcctgacttccttgactttgtggacaaatgggtttatctatggggaaataagaacgcaacattcctgacatcatggaggctcatgccttctat

SEQ ID NO: 244455 - DNA, 1018 bp, Homo Sapiens
ccatccagtgccctggaccctcggctgggtagcgccaccagagcgaccaaacgtcccgcgccttccaggccgcactccagagccaaaagagctccatggcggcggcggccaagcccaacaacctttccctggtggtgcacggaccgggggacttgcgcctggagaactatcctatccctgaaccaggcccaaatgaggtcttgctgaggatgcattctgttggaatctgtggctcagatgtccactactgggagtatggtcgaattgggaattttattgtgaaaaagcccatggtgctgggacatgaagcttcgggaacagtcgaaaaagtgggatcatcggtaaagcacctaaaaccaggtgatcgtgttgccatcgagcctggtgctccccgagaaaatgatgaattctgcaagatgggccgatacaatctgtcaccttccatcttcttctgtgccacgccccccgatgacgggaacctctgccggttctataagcacaatgcagccttttgttacaagcttcctgacaatgtcacctttgaggaaggcgccctgatcgagccactttctgtggggatccatgcctgcaggagaggcggagttaccctgggacacaaggtccttgtgtgtggagctgggccaatcgggatggtcactttgctcgtggccaaagcaatgggagcagctcaagtagtggtgactgatctgtctgctacccgattgtccaaagccaaggagattggggctgatttagtcctccagatctccaaggagagccctcaggaaatcgccaggaaagtagaaggtctgctggggtgcaagccggaagtcaccatcgagtgcacgggggcagaggcctccatccaggcgggcatctacgccactcgctctggtgggaccctcgtgcttgtggggctgggctctgagatgaccaccgtacccctactgcatgcagccatccgggaggtggatatcaagggcgtgtttcgatactgcaacgcgtggccagaaggagg

SEQ ID NO: 244456 - DNA, 466 bp, Homo Sapiens
tgccattctggcccacgctctggtgttttagcaaagacagtgagacacatagctcaagaactgcgttattttactccttgctatgtcacatttacatgtcagactcatttgctgtgatgtagcacactaggctggtgaaataattgcttgtgatgtccctaaatccccgaggcttttttctacctcctgcttagatagtgaagagaagttgaagttgcgtcctctagtgttcattttgcgtaagagtgataggatgcggtaggacagatgaagattaatgagattgtgtgatatcaagtaggctcattgtctttagattgattgctgatggtctggatttgcttagcatcaggagagtttagaaacaaacaactaatttattaatgatgcccaaataatagttaaatgcccaaacttttgggatttatgttgttcattgttaacaactgctgcgtggccagaagga

SEQ ID NO: 244457 - DNA, 694 bp, Homo Sapiens
  misc_feature (213)..(222): n is a, c, g, or t
tgtgtgacgtcttctataggacaaattcttaatgctggagttgtcagtcacggggtctacacataagtatgctgttttccttgaagggcttcttggattggtctgctcttcccttatggactgggaatgaaaaatgtggggaagaagatagatttccaaggaggcatgtaaatggaaaacaaggctttaaagtatcccaactgaataacagcnnnnnnnnnnaatcaagatattgtgggttactatatttatacatagtaacacttattaacctgataagatggaccaggtagaaataactctcagagaggtaacagtctgctcttctcggtttaaccatccattttctatggctagagtcaatattggaagaagatactggttcctgagggcacatttagatgtgttaaaagagttatgatgtgggaaatttgttcacagatttcagggagatcaaagacttaagtccattagaaattttaaaaacaattatattcctaggacttggtatttaatatgtgaagtcatcagtttaattatattttcagatcattctttggcacagagtgaggaaaaccctccctcactcttgcagagaacgcaaaaacactcaggaaaaacaagctgaagtgtaaacagtctctttgcaagtcctctgatctcaccagcgtggccagaaggaggtagcgagctc

SEQ ID NO: 244458 - DNA, 510 bp, Homo Sapiens
ctggtgaattttctttctggctctagaaccagaaatcatggtgcttctcatttacaactggtttctgttgcctaatgggcactgcaaatttcacggttaatgcagtgttcctttctacattggctattacaagcttagagccagaagttgtggcctacttcaagaaattcacagaatcttatgatacacattttgtgcatcatccttgttatattcattattggtttgatatcctctttctactagcatttttcctttgccccacactcctcatccatttattcttaaaattactttatctccctttattgtcggtatttatagacaataaagtgggacataatattcaaaatcacatcattgaatgcaagcaatttcttttctaactgcgcataaacagtgcttgatgaattccagtcactctgaagccatcaatttgagttattttcccataaagaatatctactatggggaaatctacatatttttacagcgtggtccagtaatcga

SEQ ID NO: 244459 - DNA, 515 bp, Homo Sapiens
ccgttttgcccgtgcatatcggtcacgaacaaatctgattactaaacacagtagcctggatttgttctatcagtaatcgaccttattcctaattaaatagagcaaatccccttattgggggtaagacatgaagatgccagaaaaacatgtcctgttggccgccattctcgcggcaaaggaacaaggcatcggggcaatccttgcgtttgcaatggcgtaccttcgcggcagatataatggcggtgcgtttacaaaaacagtaatcgacgcaacgatgtgcgccattatcgcctagttcattcgtgaccttctcgacttcgccggactaagtagcaatctcgcttatataacgagcgtgtttatcggctacatcggtactgactcgattggttcgcttatcaaacgcttcgctgctaaaaaagccggagtagaagatggtagaaatcaataatcagcaagggcgttcccattaaaagactcggctggccagacggacgggaacctctagatcgagc

SEQ ID NO: 244460 - DNA, 564 bp, Homo Sapiens
taccttctggcacgcacattttcaacacttgcagcctcatttaacgtcaacttacattccttcatctgtggatccttgctctctggcttggttcttttggataataatgccaagttcctacccatcacaggaatcgtgattggaatccaccagcccagcaccctgtactctggtgccccaagtgattacatgtgagcctcccagaaagaacaaatattgctcttgccactcctctccaatgctgacaggactgagtcctggggcaagtggatccgggaattgcattgcagacaatttcgcagtaattccctgtctggagaagcacaccagttaacactagactgtcacagccctaggagaggtaagaacaacaaagcccacattaccacgatgtcttctggtggcaagaaatctttctcccaccaccatccccttcctcccggaatcccttgccccttcctatgtatctcttctgctctcacttgaccaccttaccctgcttactcataacctcaccttgcacagtgccaacacggcctctcaaggcgtggccagaaggacggg

SEQ ID NO: 244461 - DNA, 447 bp, Homo Sapiens
ggatcccctgacaccactcgagacgaaagagatccttagtatcttatttggagggatgttacacacaggaacttccggtttattcacaatgaggtgagacatctaccaggctttgagacaaactttaacttttcctatgaactcttctctaaagcaggtcacagggaaaaaaagggtttaaagagaaataacttctccgggcaaaaactgaggttagcgggcctatcagctgtttcttctcactccaccactgctgctgactggaggagcagcctggaaagcagccgccctcccgcaaacaggtaaaccacattacctattcctgtggcggaggcaaatggatggtcaaacctaacggggtagtgctgaagttcggggacaaaagcccatcggggagtggtataggattatttttggactctcgatgttcaggggtatcctctagaa

SEQ ID NO: 244462 - DNA, 391 bp, Homo Sapiens
ccagggaaggagagagacttgctcagggtcacatggggcctttctaactccacctctgatcctgggagaagcttggctcacaattgagacttgacttacaattgcacaattccgcagtggcgtggagcctggtttaacctcccactttaaatcccagggagatcacagtcctggctggctgctgcctgtcactggagccatcatcaaagttgagaagcatttccagagaggtccagtgaagagacatatggctttagctttggatggaccgggtttgatattccagtctctctgccgtagtactggctgtgggtcgtcttgggaagtagacgtttccctgctcaaacactgagataatgataccaaccacaggggcgtgtctcgatggttc

SEQ ID NO: 244463 - DNA, 355 bp, Homo Sapiens
gctccagtccaagtgaaaaatcaggtattttgttttggtttgttttgtttatcgagatggaaaatataaatgaaagaaaaacaatgagccatgttgcttgcttgatataatgggatttaacatacagaattttgacatttttctcttttataaaatagcccatttgagaaataaccagaaaatttttaataaaatgcgcttatttacccaagatgaaattggagagagatcgatcataactgcatccaatgcttgtgtatcacctgtgaggctttggaggttggagtattgccttttcactttgggctggggatactctagaacgaccatcaccctatacacggtgcactgccgt

SEQ ID NO: 244464 - DNA, 902 bp, Homo Sapiens
catcttcatcaccagcgtggacgccgccacgaccttcgaggagctctgtgaggaagtgagagacatgtgtcgtctgcaccagcagcacccgctcaccctcaagtgggtggacagcgaaggtgacccttgcacggtgtcctcccagatggagctggaagaggctttccgcctggcccgtcagtgcagggacgaaggcctcatcattcatgttttcccgagcacccctgagcagcctggcctgccatgtccgggagaagacaaatctatctaccgccggggagccagaagatggaggaagctgtaccgtgccaacggccacctcttccaagccaagcgctttaacaggagagcgtactgcggtcagtgcagcgagaggatatggggcctcgcgaggcaaggctacaggtgcatcaactgcaaactgctggtccataagcgctgccacggcctcgtcccgctgacctgcaggaagcatatggattctgtcatgccttcccaagagcctccagtagacgacaagaacgaggacgccgaccttccttccgaggagacagatggaattgcttacatttcctcatcccggaagcatgacagcattaaagacgactcggaggaccttaagccagttatcgatgggatggatggaatcaaaatctctcaggggcttgggctgcaggactttgacctaatcagagtcatcgggcgcgggagctacgccaaggttctcctggtgcggttgaagaagaatgaccaaatttacgccatgaaagtggtgaagaaagagctggtgcatgatgacgaggatattgactgggtacagacagagaagcacgtgtttgagcaggcatccagcaccccttcctggtcggattacactcctgcttccgtaagacgggccagtc

SEQ ID NO: 244465 - DNA, 527 bp, Homo Sapiens
tctgaccggagcagatacccataacctatgttgagccttgcttaccagcaaagaatatttttaatgtggatatctcattctaaagtctgttccattagcagcactatggcacatctttctatactttatatacttttctccagtaatacatgtttactttaaaaattgttgcagtgaagaaaaacctttaactgagaaatatggaaaccgtcttaattttccattggctatgatggaattaatattgtattttaaaaatgcatattgatcactataattctaaaacaattttttaaataaaccagcaggttgctaaaagaaggcattttatctaaagttattttaataggtggtatagcagtaattttaaatttaagagttgcttttacagttaacaatggaatatgccttctctgctatgtctgaatatagtaagctatttattatgagcttctatcaggtatttttaatatagagcaatgcatgttgtatgtgaaaatatgaatgacccgaccaacaatgttcag

SEQ ID NO: 244466 - DNA, 334 bp, Homo Sapiens
  misc_feature (317)..(317): n is a, c, g, or t
tagaggatccccgttcgaccgagcaggagagtaaaataactataattgaactctacttgtgcaattccagctgcctgctaaatatttctacttgaatgccttgggtacctcaaacccttatgtcactaattgacatgacctagctacaccttctgtattcccagtatcccgccagtcgacccaaactcaaaactgaatgcttatcgcttttctcaacattttattatgaaatttttcagacaaaaaggattgaaagaattctgtaatgaaaactgtatctcctccaccaggagtttacagttaatattttcttttgncttccgtagcacggggg

SEQ ID NO: 244467 - DNA, 651 bp, Homo Sapiens
acagtaaagaggaatatatgtatgttttgcccattaagaaaaaatggcaagctaaacaaatgttaaacttacagaaaatttgtcttatggtcctgggcatatttcccttttagagcaagcctggattcttagcaaagtgtttcccccatttgctcttttagctgacaaatctgccactgtgatgatggtttgcagcttttggaagcagtatggcaacctggcctgacatgctctttaggcttccactaacctggggctttcagaaattctatttggcctttctgtgggtagctttccagcttctcttctagggagccccaggcatcatttcccaaaagcatccccatctcctgattctcttggaactcctacagataagcatcctggcagaggcccaggctcccaaaccgacaaagtgaaaagagaccagagaggccaagcatattgactggtgctgttcagggcctgctcttttcccactcaccacttgttttgctgcttgtcacgaggagagttgttcctgtatgtggctgctctcagatctttccaagcaagccagtcatttgaagaggttttcttttcatgctggagggcaggctaagatcaatgagtggaagagaggaagacaatgcaatcggaatcctctggatc

SEQ ID NO: 244468 - DNA, 634 bp, Homo Sapiens
  misc_feature (248)..(351): n is a, c, g, or t
cctttgcaagtttgagaccagtctccaggtagacatacctgtatacatatggatataaacactcagacctgaaatactgtaagttaaatggtgtcatctcattttgtagatgttataaagtgagacatagagaagtttagtaacatagctagtaggttgcatagctggtaaatgaccagagctaggttctgacacaggtctgtcagactccagagacttttctctcatgccacactgtttctagaagnnnnnnnnnnnnnnnnnnnnnnnnnnnnnnnnnnnnnnnnnnnnnnnnnnnnnnnnnnnnnnnnnnnnnnnnnnnnnnnnnnnnnnnnnnnnnnnnnnnnnnnnagtaacgtgtggttgcggtcgtaacaggctgcacatatttatataacattggccccattgaagaaaggtctatctattaggtagtagtgctctagaaccttacctttgagtggtgttaggaaaggacagtcgtgtacccacgtgtctagaacatagagcagacctcataaatgggctgtgtttatagagagaaaagcaagattctgtgatatccgagagcagggttctgataattttgcttaaagtggagagatcagtagatgggtccctagcaattaaggtt

SEQ ID NO: 244469 - DNA, 431 bp, Homo Sapiens
  misc_feature (413)..(413): n is a, c, g, or t
tgttccagccccccttccacaacccttttttaaagccgggaagaagcctaaacatgcctttgccccttgaagaatatagccttttcctcaagcaacattggaaccaggtttttgtagaacctcactaaagaacaagaggaggaagataatagttgtggaactttaaacagcacactttggtgggaacgaacacaagaagatagagtagtattttgaatttgtattgttcggtctgcttactgggacttctttctttttcacttaattttaactttggtttaaaaagttttttattggaatggtaactggagaaccaagaacgcacttgaaatttttctaagctccttaattgaaatgctgtggttgtgtgttttgcttttctttaaataaaacgtatgtataattaagtgaangctgcatgttcgttcatt

SEQ ID NO: 244470 - DNA, 344 bp, Homo Sapiens
acgaacatcaacttttctttctccctacattgagacattggtactttttgccgcgtgagtatatagcgcagagggcttcgtgtggtaaaattctctggacaaatccctggttttgccatctcctcagcaaacctcggtatcaggtgggctgtcacctcccagttccccttcctccttgctgggctttttcacctgcagacttccttgttgtctttccacctcagaccctctaaaaatgccccagtaccagagcagctccaatgctggcataaggttggatgcctaattttcctcccgattgttcgtacgctggtgccttcactggctgactgttcgttccattt

SEQ ID NO: 244471 - DNA, 374 bp, Homo Sapiens
aaatggaacgaacactagggcggtaaatgctttccagctcttgcctttttaaccttttcaaccttgctgctagacggagctgtaacctggaagcagatgaattagtgtggttatcagacacgaaagcctggactttctgtctcagctcccttctgggctgggtgagtatgagtgagcatgtgagtgtgtgtatgaaaaaagcttggaagaaagaagaaaaagggtaaatgatggattggaacataagctttctctgctgctctctcagaggactgggttgggaagcagctgtgcatgaacggctgtcactgctataaaccaagcgaaccagtccttgggccacaggaaggcattgtttccttctctgttcgttc

SEQ ID NO: 244472 - DNA, 326 bp, Homo Sapiens
  misc_feature (139)..(172): n is a, c, g, or t
  misc_feature (289)..(289): n is a, c, g, or t
aaatggaacgaacagccttagtgagatttctgtactgtccacagggaaatttaagatcaacatggccaaattctatttcaataaaaattatgcatctaaattttcaatgaaatttttgacatctgaaaactcatttatnnnnnnnnnnnnnnnnnnnnnnnnnnnnnnnnnnaatgtgtaatggccacttgtatacacttgtatacacctctggactctggactgcatacctgtgcctgtcttcatcctctaacataacataatctacttgcacctttgttcaggaaanttttgtgaattttgttggaaatgttcgttccatttcc

SEQ ID NO: 244473 - DNA, 348 bp, Homo Sapiens
  misc_feature (214)..(226): n is a, c, g, or t
aaatggaacgaacaccttactgtatttttaaatgagtgtctgtctggccacttttcattctttataaaaatatagtatcaacctgaagttctaaagagttccttggcccctgttcgaagctttcaggatactttccatactttatggaattctgtagtttgggccttttaaaaactaatttcttttgcacagttaaacaactactatatatagnnnnnnnnnnnnntcttgtttattgacaattatttttatcttgtttcattctcttccagtccatgtgtagacatgtccgtatgtattagatgcctttgtatagttatttgagtttatatcattttttctgttcgt

SEQ ID NO: 244474 - DNA, 232 bp, Homo Sapiens
ggtaggaggggaagtgctttctgggaagcaattaaaatgaagtcatcagatttggctgggttatgagagattaataaaatctgaaatatttattttgcttcatttacatgaaaattcactagtcattagttactaccatcacggacaaaaagagcatctataaaagtacaggggcaatgtcaaaagctgaaatgggcaccctagcacggggattttattttgctttaacttg

SEQ ID NO: 244475 - DNA, 424 bp, Homo Sapiens
  misc_feature (136)..(145): n is a, c, g, or t
aatcaacgtctttaatcatgtagagttaatttattgtgtaaggtgtaaggaaggggtcgagtttcagtttatctgcatatggccagctagctttcccaacaccatttattaaatagggaattatttccccattgcnnnnnnnnnnagttttgtcaaggatcagatggtaattttcacatttcaatgaatttgtcaattttgtctaagttgtcatgtttattcacataaattttatattattaccatgtatttttaagtatctgtagaatcttaaagaatgtcacattaactcattttcaaacttggtaatttgtagtttttgttttcaagagctagtttggctagatagactttggcttttattgatcctctcaaagtgtttggtgttgttcaagttttctatcattttggcgtttagtccgtt

SEQ ID NO: 244476 - DNA, 253 bp, Homo Sapiens
tgttttttgtcgtttatgttgtctatgtttgcatcttttgttcgttattttattttaactgtcaacttacctatgctgtgtttgaagtgaggttcttgtacgtggcatgtagttgggttatgttttattttatttaaactgccatctctgtcctttacatcaaaggtaaattgatgttcttagaccacgtacctttaaagtaattcttgatgtgttaagcgattctgccatttaattatttgttttctgttcg

SEQ ID NO: 244477 - DNA, 210 bp, Homo Sapiens
caaatggacgaacactcttataatcttttttatttctgtagaattagtagcaatgttgccactttcacttataattttagtaatttgagtttcttctttttttcttagtctagaatctagcttaaggctggtcaattctgttatcttttcaaagaaccaacttttgttgtcattgattttctctattttctgtctgttcgtaactttcgg

SEQ ID NO: 244478 - DNA, 1463 bp, Homo Sapiens
  misc_feature (1264)..(1289): n is a, c, g, or t
agtataatgaagtactgagtgtgatccgggatattggcgccatagcccaagtccacgcagaaaatggcgacatcattgcagaggagcagcagaggatcctggatctgggcatcacgggccccgagggacatgtgctgagccgacctgaggaggtcgaggccgaagccgtgaatcgtgccatcaccatcgccaaccagaccaactgcccgctgtatatcaccaaggtgatgagcaaaagctctgctgaggtcatcgcccaggcacggaagaagggaactgtggtgtatggcgagcccatcactgccagcttgggaacggacggctcccattactggagcaagaactgggccaaggctgctgccttgtcacctccccaaccttgagccctgatccaaccactccagactttctcaactccttgctgtcctgtggagacctccaggtcacgggcagtgcccattgcacgtgtaacactgcccagaaggctgtaggaaaggaccacttcaccctgattccggagggcaccaatggcactgaggagcggatgtccgtcatctgggacaaggctgtggtcactgggaacgatggatcgagaaccagtttgtggctgtgaccagcaccaatgcagccaaagtcttcaacctttacccccggaaaggccgcattgctgtgggatccgatgccgacctggtcatctgggaccccgacagcgttaacaccatctctgccaaggacacaacaacagctctctcgagtaccacatctttgaaggccttggagtgccgcgggttcccactggttggtcttcagccaggggaagattgtcctggaggacggcaccctgcacgtcaccgaaggctctggacgctacattccccggaagcccttccctgattttgtttacaagcgtatcaaggcaaggagcaggctggctgagctgagaggggttcctcgtggcctgtatgacggacccgtgtgtgaagtgtctgtgacgcccaagacagtcactccagcctcctcggccaagacgtctcctgccaagcagcagtccccacctgtccggaacctgcaccagtctggattcagtttgtctggtgctcagattgatgacaacattccccgccgcaccacccagcgtatcgtggcgccccccggtggccgtgccaacatcaccagcctgggctagagctcctgggctgtgccgtccactggggactggggatgggacacctgaggacattctgagacttctttcttccttccnnnnnnnnnnnnnnnnnnnnnnnnnnaagagcctgtgatagttactgtggagcagccagttcatggggtcccccttggggccccacaccccgtctctcaccaagagttactgattttgctcatccacttccctacacatctatgggtatcacacccaagactacccaccaagctggccaaggggagctgctgccaagggg

SEQ ID NO: 244479 - DNA, 235 bp, Homo Sapiens
gcaataatatctttaggagtttctaaaaagtctattggaaatcattttataataaagatattaggagccctcatgtttttgaaacgttctaaaagttattttggtaaatcattttctccactttatttgttttgtaaatcctaagccttatgtgttgggaatttgtttagtactttattttaaactttacaactttattataaactgaggatgcaaggaacaacatatttttctg

SEQ ID NO: 244480 - DNA, 489 bp, Homo Sapiens
cttggcagagctcatgaatctgagtacccatccacctttgaaaggtttgcaagtaaggtattattcaatgccatctcctcccactctaatagttagttaagaggcctggggttttctattataccgcagcattgctttgacacctcaggccctactggttactatggagacaccatttgactttttcaggcccagcattctccttggtaggcttgagcaaggttccacctcctcagatgaactctgtaaccatccttgcagaggagatcctgcaagggggaaggaacaggcctagctgaggaccaagggaccttttctcctctcgagccttggacaatgttccctctcttttcttgctctcgaaaaacttaaatcgctgtgatcagattctgggacacttaacgttggtagccttatcttttctctgagcccactgccgcttgatccttggtggtgctgtgctctttcttgctctctgtctttggtgga

SEQ ID NO: 244481 - DNA, 389 bp, Homo Sapiens
ggtagtgaggtcagggatggtgcaaaataaatatttatagtagaggaaattccattatgttataataacatttttcatatattttatgttgttttatcactaactgaggatcatactatatgattcccagaacaacttgtaaacttttaaataaatttaagctgggctttaacagttctgtcattgcagtgacaaaactattaatgaaactaaagtggggaaattcagggtaggtgtggaaaactgtgagtagatacaggacttaaagggtggaagatggggaagtataggaaggcagttgaaaactaaattgtaaaggctttgagtgtgaggttaaagaaattggaacttaattgcttaggccatttgaaggtcgataaagtagttaa

SEQ ID NO: 244482 - DNA, 488 bp, Homo Sapiens
atattggggagccacagtaaacttttcctttgtggtttcacgtgtttacatctttctgggtctgtctatttgcatgcctaccacaacttcccaggtgtctgtctttaagggacttcacacaattacttttttaattaatgttcttaaaactgtctttggctagagattcaaaatattttaagagtgatggaaactgatgttgagagagtaaagatttcaaaacaacttagcatgactaggtgtttccctctgtgactttgactaccaaatcattaactcctgtgataacaatgaacatttcacaacgtttaaaagttctcttattttactattggatttttataagtagttagaaatttatgcaagaaagtattgccactgtcttcatgaggaaactgaggcttgagaatcttgtgatttccttaaagtcatacagctggttagcggtagaattagaccttaaatcagtttattttcatggtcagttt

SEQ ID NO: 244483 - DNA, 382 bp, Homo Sapiens
acgtatattggggagccactgcgcccgaccgagttgaacatttaatgtcagactaggccagagtttctcaatctttttattctcacttcccaaaggagccgttggagattttcccctcaatctctctccttcatgaaatttcataccacaaatatagtatgttttatttatgtactgcgaccctttgaaggatcacaaaccaatataataggttttctttttaacccgtcaaggaccagtttttgcccctgttggaaatgcataaactggactgatgaattggtatagatggcttttatcatgaggatcagaaaaacttgaaattccttggctacgacaccccatatttatcaccgtatagggagtaccttgttatggggag

SEQ ID NO: 244484 - DNA, 234 bp, Homo Sapiens
ggtaatggtgggaaggaaaagggtctggaaggcaagagcccagacactggccctgattggctgaagcagtttgatgcagtgttgcctggctataccctgaagagccaactagacatcttgagcctcctgaaacaggagagccccgccccagagccacccactcagcacagctatacctacaatgtctccaatctggatgtgcgacagctctcggccccacctcctggccgaacc

SEQ ID NO: 244485 - DNA, 421 bp, Homo Sapiens
tgaatagagtctcagactgtggtgcagctctggaaatgtcctggtcagcctaatagggagctctggcacaaggattgccctcaaaaaagtcccacgttgcatggcagtggtcatgccctagtacccctgccatgctcagtcattggtagagggctgcctgggagaaagtgctgcaccctggatgctggggtggatccagactagaagctgtcagcgttctgcattccttgcagcaggctctttctggaagggaagtctgcgtggcacgctgccacagctggcacaaccccaacagctgtccagccattctgctcttacctataatcaagctcacagatgggaagtagagtgtttttgtgctccacagagctgcctgagctctttttatgattcctttggccgaagccggggatactctaga

SEQ ID NO: 244486 - DNA, 115 bp, Homo Sapiens
actcggcagggttgtgttccttagcatatcatcttcctattcctcccttctttccaacttccagaaatttcttgaaagtgtccatctagccactctccctgtcttcctcagatgc

SEQ ID NO: 244487 - DNA, 212 bp, Homo Sapiens
ggaggcaaagcggaagaacacggagagctgatgcacaggggcccaggcttagatgtctttccacactggcccacatgtcaggagtaaatggaataatctgcagaaggttctactgacttaatatgaggtatattaagattaaaaaattatttttttgcttctcactaaaatagagtggagtaaaccatcctttggccgaagggtaccgagct

SEQ ID NO: 244488 - DNA, 213 bp, Homo Sapiens
ggagttgctgaccaaagctttcccactagaggaaaaccatatcaagtgtaatagtccagactttaatagcctcactatgctgagcctgtggctggaagcagtgttggggtgtcatgacctcagcatgaaagtggagcagctggaggctgtttgccaactatgcttctcacagtggattcccttaaagaggattcgagcaccgggtaccgagct

SEQ ID NO: 244489 - DNA, 266 bp, Homo Sapiens
cgaagatccggactctgggtgttttgctaccgtgaccgtttaggtgagtggaatagccaagaacatttcggcaaataacaaaaacaaaacgtgcggtcacttgtgagtggatgagaactgtgaggaaacagcctctcagcccggttcgtttccggtggtctcgcgtttgctgagctgtcgcctggctttctaaatctggtcccgggtgtgtggcgagggtgacgggtgggatgtgtgcctgagtgttttgtaatcctttggcgcga

SEQ ID NO: 244490 - DNA, 164 bp, Homo Sapiens
cagtgtctttgaatgttccaactccttactgtggcttacagggcgccacatgatctggtcctccctccctctccaaatttctgttaaccgcctcaatcgccaccctgcagccaccctgctctatgctctcagcacacacacaaactccttgcgagtccgtggat

SEQ ID NO: 244491 - DNA, 170 bp, Homo Sapiens
agcaagagaacaaccttttctcaaatgggtgtttagggacccttccaactgtatactatgcttctgttttgcctctctcctacttcatagtctatatagcatgagaaaaatataagcctctactttgaaggggtcaaataaaacttaggaaacccctagagtcgagctgc

SEQ ID NO: 244492 - DNA, 140 bp, Homo Sapiens
gaatgagtgccagtatccttccatagtggcctcgggagacctgtagttcagacccgtgttgtaggaggtgtcttttgaatgggtcttattttgaggagggacgcaggagacccagatctgctatggggataatgacatct

SEQ ID NO: 244493 - DNA, 127 bp, Homo Sapiens
agcaccccgatgtgtttttggcctccttcacttggcaatttgccctggaaaccagcagacctgtcttgtcaccaggagggcctcagtcatcaaggcactctgcagatgtctgtctaatcttgtggag

SEQ ID NO: 244494 - DNA, 369 bp, Homo Sapiens
  misc_feature (226)..(237): n is a, c, g, or t
tatgaagtgtggaagttggaacttaagagtgatgacttagggtatctagtggaagtaatcattaagcaaccaaacatccaagatgtgctgtggctgcttctaacagcctatgatcagatagatgtgggagcaaaggaatgacttaaaaattgggacttaaaaaggaaagcggagtctaaaagtttggaaaatctccagcctgggcgacagagtgagactctgtctnnnnnnnnnnnnttactcttaaatcttacaagggacacaggcttctctaaatcagttgcagtatacaatattaagggcaaagctcaaatccctctggctgcccctactacctcagaaacaggcttgtttctttccacacgtata

SEQ ID NO: 244495 - DNA, 453 bp, Homo Sapiens
ggaaccacaggggctacgtctgcacagatgccataactgagagctacatcccttgagaagaaatggaaagcaaaagtagaggtagtttatgagcagacttgagccacagccctgggcacactgtgaagggtgattggacctcaaggcacaggttaactaaagagaaagtatctaaaggaagcaaggagactgagcagcagaagaggacaatacaacaatgtaacctagacccaaactgagctctcattctcttggcagacctctccactccccagtggatacaccgtcaaccagtcatccagctttaacagtaaacccttccatttacatgctagtctcagcctagcaatgttcccaaacccaacagagggaaagtgtcagtgggtgtgccctttatttccacacaagctggaaaagatagcttctctaccctcagtattaaatacgtcagta

SEQ ID NO: 244496 - DNA, 300 bp, Homo Sapiens
gaaagaacagttgcagtggttagatgataactcgtgcttcaagtggactttcatcctcttgaagtcctgtttggctcgtaggccgcacacccccgttcctgtgttcacatctgtgacgatgttaatgctgttcactgcaccatgcctgaagtctcaactctgagcatgcctgtgctgtcctattgtggctcttccttggttaggtctccctcacagttcttgctgagatatgcaacccacagactctggtgttttttcactgtcagatgcactgcatcctcacttctcttcccagtcata

SEQ ID NO: 244497 - DNA, 391 bp, Homo Sapiens
gtagtggactcagagagaaagtaactttaactaaatgctggtgaggcctaaatatcttacactcacttagcttccaggagacagagacaggacttgattcaattctttgtctgagattcttctagtcatagatcaatgactctctctctttttcaaatttcagtagcctttggagtacaagtggtttgtggttacatggatgaattctgcggtggtgaaatctgagattttggtgcacccatcatctgagcagcgtgcgctgcacccaatatgttgtcttttattcctcatcccacctcctaactacccccaacccgagtccccaaggtccactttatcacttcgtatgtctttgagtcctcatagcttagctcccacttataagtgagac

SEQ ID NO: 244498 - DNA, 568 bp, Homo Sapiens
cacagactgctaggccccaaccccagcagtttctgacccagtgggtttggcggtagggctgagaaggtgcagttctaataagttccgcaggtgatgctgatacagctcctttatgaccatactttgagagccaatggaaaagaggaaaacgcactcatattggaatgagacgaagctggtactcctatcttacttgctatgtgattttggtcaggtcaactttgcttagcttcagctttctcatctgccatgtggtgattatatctccctcatgaggcttttgtgcgggttatctgaagtaaggtgagtaacggtggctggtccatggtagtcgctcactccagtgatgtatgatcttcttcccttactccttttgtgggatactcataccatgcaaggcttgtttaaggattaacatctgtgtgaactgagcttctgctgtattaatttcacattgccacttatatatgtcctgaggtttttgcttttattgaacatttactatgtgaatggcattgtgtgaaataacttttacattttatataacattagatattattcctttata

SEQ ID NO: 244499 - DNA, 126 bp, Homo Sapiens
ttcaagaagcatcctctttggcttgatgactcaccttccagacagtccccgtcagctcagtgaggcactgctcgctgctgactctatgcactggacccacttatggcacagtcttttgtcagggct

SEQ ID NO: 244500 - DNA, 152 bp, Homo Sapiens
tattacgtgtggaacactctattaggtggatattttgattaattcattttatgttgtggaaacaggctaagaaaggttaaataacttggtcagggttggttaatgggaagttaatgggaccataattcctccagccttgacttttctctcct

SEQ ID NO: 244501 - DNA, 662 bp, Homo Sapiens
gggggagtgggacaacacatgaggggtggcctcatgttataataacccaacctgtggctatttaatgctgtccaggagagagcgggaagccactcactccctcaagaattagcccagtccctacagagcagcgttaatctcttaatggcctaaccacaccttaaaccccacctcccaatacacccatacctggaccaagatttccagcatatgaattccagggacccagtccaatcacagcagctgggagattggaggccaagagctggggatgagtctgagtctccctgggtactgagacaagttcaccactttggctcatctgagaaattcattaacaattcattacacaccccctcttgatgggccacagaacacacccccagctttttcatggcagcctgaaggctggcgcttcttgtctttccacaccattccacatcttcctggcaaaatcccagtcctggggtgtgctctcagaagactgcgtttcctcgcccccctcactcctccgtccagaggcagccttacttctccaaagaggacgctctgagtctgcgttcccctggcagcaagtcctgaggcaagatttggggacaagcagctcctgtgggaagtggctccaggaagccccaggagagacgcggggagtgagccagcgg

SEQ ID NO: 244502 - DNA, 569 bp, Homo Sapiens
  misc_feature (514)..(514): n is a, c, g, or t
  misc_feature (550)..(550): n is a, c, g, or t
agattcaccggcagcacaggagaagtgagtatgaacagcaggaggagtaactcatagttactgctggccctggcagcgatatctcatcacctgatcttacagatcttacatcctcaagcaaactccccagggcacatttttagttggccagccatcaccccagacttctggaaaacaactcaccactgggtcagtggtccaaggaacactgggagtcagcacatcttctgcacaaggacaacaaacgctaaaagtcatctctggacagaaaaccacattgtttacacaggcagcccatggaggacaggcatctctaatgaaaatatccgatagcaccttgaagactgtgccagccacctcacagctctcgaagcctggaaccacaatgctgagagtagcaggaggggttatcacaactgccacttcccctgccgtggccctctcagcaaacggtcctgcacaacagtctgaaggaatggctcccgtggtcttcatcttacggttcagttctgtnaacgaaaacttcttgggcagcagcaagtgttgtgtngagccaggccaccgtgggg

SEQ ID NO: 244503 - DNA, 228 bp, Homo Sapiens
atccccggatcgatgaaaggcaggtccaaggatacagatgcagagttgatacttttgcagaccagtcacacagagtgattcctgctaggtaaagcctagcacagtacactcgcatagatgatgcttaatacacatttgccataaaggatagcacccagaacaatgtaacattttaaaaccagtctggatagaattctagatatgtaaccatcatgaaagctttatttc

SEQ ID NO: 244504 - DNA, 475 bp, Homo Sapiens
cacgatctttgctctgaacatctatttcatcacattaatccgttgttcaaaaaaatctttcatttttcttaaccaggaccttcttctctaacttggtgggtctacttacattttttcattgtactttctcattcctatgcttgcccacaataaattccacagctagaatacacatcctcctaattatcatctccaaatcctgactgttttcaatggtggttcaagtccagtgtctgcagtgaagctttctgttgtggtcttgaatttacgactttacttattcaccacctttctttgtccacaatttccaactcctttatatattagccttctgaatatatctgtcttatcttcttggtgtggctttaggaaccaaatcatacatgtctttatcacttctgaaactatcccaataactacattacatgatttatatatatttttaaatgaggcatagtaggaggcaaagatcgta

SEQ ID NO: 244505 - DNA, 268 bp, Homo Sapiens
tgagctaccatgcctggccagaacccaatattttctacaatattttatacatttctttctacatggattatataaattgggctttccagcagaaaaaggaaaagacaaagcatatgtctcaatgagagcacacaattatgagaatggcaaccatgtaaagaaaaattgcaaggacttagtgctgatgaggatttacagcaactaaaactagaaatgttaaatgatacagtaaaacaatttaacggtttattgtaatgttatatataca

SEQ ID NO: 244506 - DNA, 366 bp, Homo Sapiens
  misc_feature (332)..(332): n is a, c, g, or t
ttcagattctttgcagatcacatttgattttccctgtaaatgattatttatgagataaaacataaactaaaaatgattcatttccatcaagtgcaaagtttagctgcaaaatcataacattcttccttatatgtcacacaggtgaaattaatggcctgagaaatgtacagactgctcaacctggtttacgatgccatatagtacctatgtgtactcggctagtgagaccccacgttatgccatggtaaaccacgcttgcacgctttcttaatctctgtataggtagaaatacattgcatgattcatgtaacattaattgatcatatttacangcttgatgtttaattagagtttctttaccctctt

SEQ ID NO: 244507 - DNA, 348 bp, Homo Sapiens
ttttatttttcccccaaaggttgacacttcttaccatggtggttttaagacccaagctaaagtgggctcaatccctcttaactccccgtgatgtgggcgtccagatcatggccactgcaggaccccatcctccactcgaccacacttctccaggggccagaccacacccaaaggcctggagatcccctaagggagcacaagcatcaggggaggactatgcagtcttcagaggcatttccaagatgggtgggagctcgaccctgcacatcctggggctgtgtccatggttatgggcagatgagaatcggggagaccttgtaggcaaagaatctacgcggggatgctcta

SEQ ID NO: 244508 - DNA, 975 bp, Homo Sapiens
  misc_feature (692)..(751): n is a, c, g, or t
atatgaatctgttgaggtaccactacatttttctaatgttaaaccatatttgccccctgatcatgtgtattattttttcctacattattggattccttggctaatattttagaatgtctccatctgcaaactgaaatgagactggcctacagtttctctttcacataaaatcctggtgtgatttaggttcagacattgagcacacatgatgaggttcataagagcttcataaaataaattgcaggatctttaccttcttttctatactccagaacagttcatataagataggcaggaagtatctctatcttaaaggtatggtagaacctagaaaaaaactactgttttatgtttgtagctggggagagtgtagattttaaactactgatttaatttctgtaatgcttacaggtctgtttctgtttcatttctccaattcctagttaactcactccagtctgattataagttctatgagtatactgaaattcctttaatctagcttggtgcctaccgaatactaaacatagacccaaaactcaaaggtcacttttcatccttatcctgttcagtggcacctggccttgctggccattcctgccttcctgaaacactcttccttgttatcttccacaggactgccctctcctggctttctgcttctagcttctccatggccccatcttaggccnnnnnnnnnnnnnnnnnnnnnnnnnnnnnnnnnnnnnnnnnnnnnnnnnnnnnnnnnnnnctaccctcttcttaagtgttctcacccattcccatcattttgaaagctgttatgcttatgactcccaaagttttgtcttcagtgtaaacctctcctgcacactctggatagccaggggcctacttgactctgcccctgggagtattagaagcatctcagcctcaacacagctaaaaccctccttccaccagcataattcctgtcagctaatgggaccctgtcta

SEQ ID NO: 244509 - DNA, 453 bp, Homo Sapiens
  misc_feature (12)..(12): n is a, c, g, or t
  misc_feature (91)..(99): n is a, c, g, or t
ttcgaagctcgntaccccacgcaactgggacccgagaaaatagaaatttaaggaggaaaagtaacttaaagctaagtcgaaataagtgatnnnnnnnnnggcgaagagatgaagaactttccttctgaagaatccccctcgttcgccatcaaccaccagaccaaagtctttgccaaggttttctcacgatgcacctgcccctggcactaagaaaaagcacttatccattgagcagctggatgctcgtcgcaaggaaaagtatggctcagcattgtgaaaaaggaactaccagaggcatataagcagaaagcttcacgctcgtaacctgtgtctcaccaatagccgaaagcttgctcaccagtgcatgaaggaggtgctcgagttcttgcaggcccagaagaactgtaaggaaaccgtgcctcgtgtaccgcctgaccagttgcgtgtgaggtt

SEQ ID NO: 244510 - DNA, 367 bp, Homo Sapiens
aagctccctacatagtaggataatgaaagagctcagatttctgctcctgggagttctttgtcagtcatgttacaaggataaaacaatttagtaacaatacaaatacaaatgaaatattcagtttcattgatctcacttaaaatactctcttattcataacatttttctagtgaaagcaaaaatgtgaactgcattgttcctaagtaaaatagtttatttatgttgtttctttgatcgaattatttaaagttttaaggctgtgtaagttttaaatttacataagatatgagtgcagtggtatctctgttataatttataaattaatgtatcttgttgggagcttgggatccttagagtcacctcagca

SEQ ID NO: 244511 - DNA, 182 bp, Homo Sapiens
aagctcccaacaagataacattagcaggctagagtaatttattttgcatattgtatatcacaaagcctgataaatattaatatttagtaattaaatattgatctcaacaaatataaaataagttttaaagataactttgagaactgtcatttccatttattcaaatgtgcatttcattgtcc

SEQ ID NO: 244512 - DNA, 384 bp, Homo Sapiens
atgctgcggtcgactctccaggattttaagctcccaacaagaaaacacacacatacagatagatttaacacacagtaggcactcaaaaaagctcatggattgatgggtaaaattcacgtaaatagctgaggccacgattgaatattaatggaatgcagatgaaatagtattaaagatatttaatcagggaaaaagcatattttcctgattaaatcctatgtatatgcagctagtattttctaaagggaatgaaagtacacttaacgcacaaacatcaaaatgacaagtgctatcatttgccattttagcaatatttagctaaatttctttttttgttaggtttggtttttgaggcggagtttcgctcttgttgggagcttgggt

SEQ ID NO: 244513 - DNA, 328 bp, Homo Sapiens
ggatgctgaggtgactctccaggacttaagctcccaacaagaacgggcagaacgtgtactgaagtttgtcgactccattcggcgtcagtttgagttcagtgtggactctttccaaatcatcctggattctttgcttttcttctatgactgttccaataatcccatctctgagcacttccaccccaccgtgattggggagagcatgtacggggactttgaggaagcttttgaccatctgcagaacagactgatcgccaccaagaacccagaagaaatcagaggcgggggacttctcaagtacagcaaccttcttgttggagcttttatc

SEQ ID NO: 244514 - DNA, 508 bp, Homo Sapiens
atgtgccgctctcaacgcatgtgccgctcccaacgcatgtgccgctcccaacacagatcctttaatattgtcctcaggggccaggcccaggtgaagctttgtgggtgcaccactgggaatcctgcctccagagccactgactagtgctccacaagagaactgcctggaggatgcctttagggctggatagaggccacccactggcaaggtcagattttgtacactccttccaacgagaagtaggccccagcaagactgttccctgtttctttaaactactggcttttggcactgggacacagggccttttaagggcaggttgacattcagcttttagagactggttgtaatttgtgaggccactggagatcttgttgggagatgctgaagaacaggatgagacaattggcatggccacatggtgaaagacctcgatgatttccttctgagggttcctcagacatctaggaatgtgggagcggcacatgcgttgggggatcctctagag

SEQ ID NO: 244515 - DNA, 313 bp, Homo Sapiens
tgtggctgaccttgaggacccaagctccaacaagatcaccacattcctgattgctgaaccacaggactggtttgtgtgctactggtaatttcttgggattttgcaaatacatgagcttgaagtgagcttgcatatattttttaaatttgattttactccctttcttatttgtggtcacctcctttaaccaactatttaaaatacctggatttttgctctcatacaccctcagctcctatttctttcctcttttgccaacagatgattaatttacatcttgtttgcttatttctctagctcttgttgggagctt

SEQ ID NO: 244516 - DNA, 508 bp, Homo Sapiens
  misc_feature (322)..(371): n is a, c, g, or t
aaggtcactgaacgctacatcccttttctatttccgcttctcacaggcacaggaacacaggcacaaatgcacaccacacactacataataaacacacatggaggaacataactggtaacagcgactggtaatccagctttcagcagtatagttgtatgttcttttctcttaaaatttctgtcttattatcctaactttaagagtgctgagacctcaaaggaaaataagttgtgcttaaattgcacagaattttgtttttatcataggtctagcttgctaggaatctgggaccagttgttgaacaagattcagtattaagccnnnnnnnnnnnnnnnnnnnnnnnnnnnnnnnnnnnnnnnnnnnnnnnnnnggtcatcagttctagtcatggatatttgaaattggacaaccacaagtctgagagatttgaaatttcaggctatgtggcaacgtctttggtacatttcaaaggtctgactaaatcagtctataaggtgtgctttcaca

SEQ ID NO: 244517 - DNA, 617 bp, Homo Sapiens
gctccaaggagaagctggtggacttcctcagcaggggaatgacacagttgcagggaaccagggccttaggcagtgccattgaatacaccatagagaatgtctttgaaagtgccccaaacccacgggacctgaaaattgtggtcctgatgctgacgggcgaggtgccggagcagcagctggaggaggcctcagagagtcatcctgcaggccaaatgcaagggctacttcttcgtggtcctgggcattggcaggaaggtgaacatcaaggaggtatacaccttcgccagtgagccaaacgacgtcttcttcaaattagtggacaagtccaccgagctcaacgaggagcctttgatgcgcttcgggaggctgttgccatccttcgtcagcagtgaaaatgctttttacttgtccccagatatcaggaaacagtgtgattggttccaaggggaccaacccacaaagaaccttgtgaagtttggtcacaaacaagtaaatgttccgaataacgttacttcaagtcctacatccaacccagtgacgacaacgaagccggtgactacgacgaagccggtgaccaccacacaaagcctgaaccactgacacggcctgaatcctgg

SEQ ID NO: 244518 - DNA, 247 bp, Homo Sapiens
gctcctcgataagtgcgccctggttgtgctgcccaccaaggagctggcccggcaggtgagcaaagttttcaacatctacacagatgccacacctctgagagtctccctggttacgggaccagaagtctctggccaaggagcaggagagcctcgtccagaaaacagctgatgggtaccgctgcttggctgacatcgtggtagccacccccggccgcctggtggaccacatcgaccagaccccagggag

SEQ ID NO: 244519 - DNA, 444 bp, Homo Sapiens
aaggagcaggagagcctcgtccagaaaacgtaggttgtgtcagggtgcgggtttttcagggggtccctgctcagccctgcaggtggcctgaggcaccgtgggagcagaggaggggccaccatctttaaccacctgttcccgtgaagaggaggagctcccaccggcccccttcccatgtggggtggagtcggggctgtggggtgaggcagcgtcttgctatccggaagcccttgagaaagcttccttctctcgagctgctctctggtctgtagagctgatgggtaccgctgcttggctgacatcgtggtagccacccccggccgcctggtggaccacatcgaccagaccccaggattcagcctccagcagctccgcttcctgattatcgacgaggctgaccggatgattgacagcatgcatcagtcctggctgccgcgggtggtg

SEQ ID NO: 244520 - DNA, 419 bp, Homo Sapiens
gttaggggaaaaggtggccatcaaggtatctgagccgacccttgttcagtccgagattttcgccaagcgcgcctacccgggagcttcttcttggctggaagcacatgcagcatgagaacgtcattgggctcctggatgtgtcttcaccccagccttctccctgcgctaacttctatgacttctacctggtgatgccctttatgcagacggatctgcagaagattatggggatggagttcagtgaggagaagatccagtacctggtgtatcagatgctcaaaggccttaagtacattcactctgctggggtcgtgcacagggacctgaagccaggcaacctggctgtgaatgaggactgtgaactgaagattctggattttgggctggcgcgacatgcagacccgagatagactgggata

SEQ ID NO: 244521 - DNA, 238 bp, Homo Sapiens
ggaccctttctcatttcagttctccacatggcccctcagttctccctcagattagcacagtcttgttcccttagtggtcactaaggattataatcacagaaagaaagggggaccccaagagcagacatggttaaaatctcttcctctagtgtttgcttttgtctcattgagcaaagaaaatcacatggctaaacccaagtttatgtgggtaaagagtacccaaaagtacagataccag

SEQ ID NO: 244522 - DNA, 431 bp, Homo Sapiens
agccccggctcatttcagttctgcctaatggctcattatcctaattccctatccaatactaacaaagaatgggtaataacaaagtcagtctagtttggttaactgtgggttctgggctttgttaggttttcttttcctgtcatattttctcctgctatgttttctttttcatggtttctaaacactatggaaaattattttaatgatatagatattttataccattatttaaattattttaatgagacaatattaaaatttgtctgaatcttgcatttttaaaacaacagtatactgctccacacagcaacttagaatatattaagtaatatatttaaagtgatgtacaaacacttcacacttctcacaggatgcactgcttcttgaactctgttctttgtgaatgaagcaaagtcaagttaaagtctctg

SEQ ID NO: 244523 - DNA, 313 bp, Homo Sapiens
cccgctcatttcagttctccaagtacaatcagcatttcctataataataagacatagtttatatgagacataggtaattacacaactgaaatctatgggataatatattctaaacaagctgaagggcaaatattattcttcccactaaaataattacacctagctgggtatttctccatgtaagcttaaatttcttaagtacatgggcctgtcttgcttcactttttattctttagcacttaagcacacctttcacgagtaagtatgaggatgacataacattatgtattacaagtctgatgaactgaaatgt

SEQ ID NO: 244524 - DNA, 273 bp, Homo Sapiens
ctcatttcagtttgatgaggtttttctccatacttctaagtatgtcaaagagaaagtatgtccaaaatcctccttatctatgtgcagtactctccccttatctgctgagggtacgcgccaagaccagtagatgcttgaacctgcagatgctgccactaaccctgtatatgctatgatttttcctacacacacatactgtacagcacggatacactggacaaagggatacctcacatttcagggaactgaaatgagctaagatcctgctaaagt

SEQ ID NO: 244525 - DNA, 423 bp, Homo Sapiens
tcatttcagttcccctcaaggttacgctgaggactttgtgcacgacgtagagcagtctgctgacatatcccagaatgacgtggaggagacgagcaggatcttcaagcaagggtatggcgcctaccggtgcaaactgtgtccgtacacacacggcactttggagaaactaaaaatccactacgagaagtatcacaatcagcctgaatttgatgtcttttcccagtcgcccccgaagctgccagtccccctcgagcccgagatgacacactgaagtgagcccttcccaagtctccatcactgaggaggaggtgggagaggagcccgtgtccacttctcacttctctacctcccacctggtctcccacactgtgttccggtgccagctctgcaagtactttgctccacgagaaggaatcccatcat

SEQ ID NO: 244526 - DNA, 447 bp, Homo Sapiens
attcagttccacctactttttgtgttataatatcttctttataaatggatcatattccttcacttatctctttcagcatcctaaacttcttttaaactttttgtatgtctattatacaaaatcaatttcatctggaataaattcatgttgtaattgttgattttattaattaccattctgagaattagaatttgccttgttttttggaattctgtattatatgcttcttagtgggagacttaatgttttgtttcctttttttctcccattatgatcactcttccaaaccagaacctgctcttaaaatgactttgcgggttcaggcttcatattgacttaatattgtgggaaactttgttaagttattattgtaaggcaacgtttttgtctccccatatcaagtccacaactttttagaaaactttactgtagataccaggttggcag

SEQ ID NO: 244527 - DNA, 462 bp, Homo Sapiens
aagtggcctttatttgttgttgcaaaattagaggtcctgtgtccaagcctcatgcgtcaccatttgatgtgtgttgttctgagatctgctatgcgcagtgacatacccttgctccatgtgctaaatataagaatgttgaatgaaccctcctttaccaacgtgatttgtgtttgtcgtttgctcacaagacatagaaaatcttggcaatatctatttgggtgatgccacatctttgctcaagtgcttgtggccatgtgtcatggttgtactaggggacaaagaaaactttaagaagagagtagtgctgatatccagtaaacttgcaatgatgcgtgctcatggaggcacagatcacatgggtgacaaaaatccaccattaatcctcaaattctatttttaaaatttgataagaaaagccatttgaaaaaaacattatttttaataattaggaactgaagtagc

SEQ ID NO: 244528 - DNA, 271 bp, Homo Sapiens
cggatcccttctcatttcagttctgggctcggcacacagaaccactttttcctcctgggattccaggcttgcaatgggaggaacttccacaaaagtctctgacatgccctggagacattttcttcattgtcttggtgattaacatttggctccttgttacttatggaaatttctgcagtgggcttgaatttctcctcagaaaatgggattttcttttctattgcattgtcaggctgcaaattttccaaacttttttgctgttttccttttg

SEQ ID NO: 244529 - DNA, 510 bp, Homo Sapiens
  misc_feature (341)..(361): n is a, c, g, or t
tttcctctttttatttacttattttttgacacagggtctcactctgtcatccagaccggaacgcaggtggcatgatcatagctcactgtagtctcaaactcctgggctcaggtgatcctcccacctcagcctccccagtagttggaaccacaggaattttcagcttgtcccggctctcttttctcttttcattcaatatccaaaacttcaacctatcggattcaactctccattgaaaggacgtctttaccgttatccaaccattcagtcttaaacgtgtcctcctacaatagagtcagtcaaatacaactacacctgagaaaacaaatcattacttctannnnnnnnnnnnnnnnnnnnngggttataccaaaccgaaaagtaacaagcttttagtttagacttaacagttagagatacttctcttatacatatgccaaagtcattatttctccagatttcctgtgacaaagtattttgtgatcatttataattcccatggactgtata

SEQ ID NO: 244530 - DNA, 403 bp, Homo Sapiens
ttcccagtcttaaatgcaatttgtaatagattgggtaaaactaagctttattgtactctagataattactaaagagattgaagcaaatgaatggaagaagaaatacgaagagacccgggcaagaagttttggagatgaggttagactggaggttttggggaggggctggatacttttatgcactgttagatttgatacagatgaagtgatgacagtgtttgcttgccacagaaccaagtgttgagagcttgagggctttgctgtttgcaccttgctttgtgattgagaatgttatttcaggagttattgctaaccagttattatattcgaatactgtagtttatcttgggttgttcagaacatataacatgtaaacagaacccacataattcttatcttctta

SEQ ID NO: 244531 - DNA, 285 bp, Homo Sapiens
gccccggctcactttcagttttcaggatttccatatgtctgaacaaggttaacagcagaggggaaaaaacctgatatattgtctctgccattgaaatatggggtcaggtacatatatttttgtaatttacaaggtcagccacagtactgatttatagcctttctaagtcaatgagtgtcttagtaataagactctaaaatacctcttcacttctcctgagcacccatcaagtctgtctgccacctcagttttcagtgaactgaaatgagctaagtcctgtaggtg

SEQ ID NO: 244532 - DNA, 733 bp, Homo Sapiens
ttatgtgcttactctcaggatcatccatgtccatacagaatgtcttttacactgtttataaacctcctcactataggccctgcaggccccttattcaactttttgattaaattggataaaaaaggaacagggcaaaaggaaacttcttgttattgtcttgtcacccttagtagcaggcacatactcaggaaagtcagatttcctgtgtatgagacatactagagtggaccaagggaagaaaaccctatgcagagcaacaagcgagtagcagtggacagggagcagtggggccctcggggaaaaaacagagctaatggccctggcagggttcctcacacccagagctctaccaccatgtgaagctaacactgcaagcccacacccatcatcacattgtatggggcagtttcttgaccctgtgtgagagcagagaagacacctataatggcaaaaacaaggcactcatgaagggattttagtgtcaggaaatgagatgaggtcaaggggatttgtatatagaaactgcagctgaatttgaaataaagtaaaccaccaaatgcttagtttgtgcttcattcaattgtaaagaactaaacatcgtttgtgagtaattcaaaccggaaagtgaagtgtaggatgtcatattggtgttggacgatacatatatatatttaaattctgtagcactgccaagtctgaattcaaatcagtaccctggaatggagctatcagt

SEQ ID NO: 244533 - DNA, 526 bp, Homo Sapiens
  misc_feature (481)..(481): n is a, c, g, or t
aatttataaagaaaagaggtttatttggctcacagttctgcaggctgtacaagcagcaatggtgccagcatttgcttctggtgggggcttcagggagcttccactcatgacggaaggcaaagggcagcagcatcacatagcaagagaaggaggaagaagggagggaggtgccaccaggctctttttaacaaacagttctcacagaaactaatcaagtgagaactcacttgttaccacaaagatggcaccaggctattcatgaaggatccatcccgataacaggaacatctcccaccaggccccaccttcaacactggggatcaaatttccatataagattagaaagggacaaacatccaaactgtatcatggcagaaggagcctggctctgccagacagttgagctgtttcattagccctgatttcccttctcaactagtatgtgtgcaagcactgaactgctatcttgtgtacacaactncagggtccctctgttattggcgctgggtagggtatggtgggaatc

SEQ ID NO: 244534 - DNA, 604 bp, Homo Sapiens
ctggccacagtttcctgactgacattaaacagatacagaactatttaaattagagatactcatccgtttacaacagaatcctcttatattccacacggttttcaagtattcctttctctgcgtcattagggtaattaaagaaacccaagatttgtttcagcagcttttgatttccactggtaacgggataaatcctccatagcggctaacgtggaagacacctcacacatcacatcagcatgcatgccttgcccataccgcgtgacctccaaggtaccgtgtccaaatgacacgcagaataccctgctgctttcttggaataactttgacctgcacccccaactttgtctttcacaccttgaattgatttgctcccttctaagtttgctgctatatgtctccggcattgcaaaaaacgtgacttgtcacagcaaagggtcagctctcatttctgtgtttgctttcccttccaaaggtttagcttcttctcccgagataagaagcgcctggccaacacacagagccacttgcacatccaggagtcctttggacagtgggcaaacacccaccgcgatgatactacacaggagcaagaactgaaatt

SEQ ID NO: 244535 - DNA, 215 bp, Homo Sapiens
atctacaggatctttgctcatttcagttcaagcagcctctgcgtttagaagggatattaatagtttcagtaggatcccagcaaccagatacgaaggattctcctgtctgtcctcatttcaccacaaatggtaatgaaaattcaagtatagagaagacaagttcactagaatctgcatctaatattgaactgcaaactactaatacatcttatgaa

SEQ ID NO: 244536 - DNA, 479 bp, Homo Sapiens
cgagctcggtaccggcttcatttcagtttgggaattatttgccatttttgtaagcgaaactctttacctcaataccaagccacaatgcctgatggaaaactgtacaacttttgcaattccagttgtgtaggctaaatttcaggctctaagtatgcagtcatctccaaatggccagtttgtagcgccaagtgatattcagttgaaatgcaactactgcaaaaattccttttgttcaaaaccagaaatcctggaatgggagaacaaagtgcatcagttctgcagcaaaacttgttcagatgactataagaagttgcattgcatagttacatattgcgaatactgtcaagaggagaagactcttcatgaaacagtaaatttctctggcgttaagagacctttctgtagtgaaggctgcaaattattatacaaacaggattttgcagcgtttagaactaaatgagcggggtccactagagtca

SEQ ID NO: 244537 - DNA, 590 bp, Homo Sapiens
gggctagaggactcggccatttcagttcttcctttggtcccatgttacaaactagattattctttgctttagatatccaaccattcagactcctagctgagtcttacaagtttctagctcaggagggagttgttgggtggcggggggtggctctgtggttgctggttatgtggggaacatgtgggaagtgcaaggagaaaggaaagctccgggcttgcacacgtcagtcagggctggttcctgttcctgtaacctaagatttctgttgacatggtgccaattccctggcaggcatgcagagaagcctctgttctctctgccgcgctgtggcgtctcacctagacacctggcccctgaagcagagatctgtctgctgccaccacagctcctctctccagactgttcagatctggtccctgtaggatggaagtgcacacactgtctctgcctgtccccagggagcaagatgtaaacttcctccttcatcattcgggcaaaaactgaataaatagatgaacaccaaattatggaaatcttcattatgcaggccaggttgccaaacatgcccagacctgcttaagctgagaagt

SEQ ID NO: 244538 - DNA, 376 bp, Homo Sapiens
cttaaacattatagtaaaatattttccaatgattgaccagctatatcccagttcacatatagaagcatgatggacttttagcatttttgtccatttcactataaatttcactataaatatggagctatgccataatttttcatacactagtttttatacctgaggttgcaaactagtgactcaacggcattcctgatttgtttgccacaaattgtggtggtctttttaactgaatctgaatacattaagacagaacatggacacctcaatctccaatcctagcactccctaatgccatgccttacacctggctctattcacatgtacatgcaccttcctggtttctctgtatatgaactgaagtgagcggggctca

SEQ ID NO: 244539 - DNA, 296 bp, Homo Sapiens
catttcagttccctgattctcaataaccaaattcaggattagtgttaattaataatgccactttttgagatcaatatgtgtcatatccatgaggacattaaaatcttaatgtggttcccaacatatggctttatagtaagttcagtggaatagtttcctcttcttcctctctcccattcttcagaggacctcatcatggtaggtttttgttttcttagatgagatgtatgagattctatctaatctgccagaaagtgtggcctacacttgtgtgaactgaaagtgagccggggctc

SEQ ID NO: 244540 - DNA, 745 bp, Homo Sapiens
  misc_feature (460)..(460): n is a, c, g, or t
actcactttcagttttgctactattcttcatttacagactttcctttgatgtttgttttcttttctttattccttgctttctgcctcctcacaattttctctgccttttctttccacacatgaatatatgcctccagactattttaattaagaaaatagcacaaatccaaaagtatgtcctgtggctgcatacaagtcagagacttgagagtgaagtgtctagggcaaagacccgtatttcctcctctgcactgtgcttctcccgctgaagcatccttctgtgccacactggggtcctatactgtttccaacagtcttacttattgcttctcaaatttgtcttttgaatacttaatgctcctcttttgatttccacccagaaaatgtacctctctgagttcagaaaacttcagaatcctctatttcccaaagtttagggtgattgaactgtatcacacangctcggtattgtctgaaacaagttaagaacttctagcacgagcatcgcactttcctcagctcatatttcacattttctccattcttctctgaaaggatcctggaccttctaccaatctttgattggttacttcataattgatttcttaagtaacctagatgttcatctctttcgcatcattgtttagcttacagtatctacagccagaaagcacctctttccctttcccatataaagagagaaaagaatcctgaggcaaactttcacttaggaactgaagtgagc

SEQ ID NO: 244541 - DNA, 391 bp, Homo Sapiens
atatgccactattttgtctagctcctaaaaaatatataaaaataggagtcagtaaaatttgtaaagtaacatttttttacataccaaattttagaattaaactgtgaattctcatttcctaaaatcagaatgtaaatttcttaaaataagtgaaatgtatttaaagagtagtttatgttcttataaataaagcagcctacacagctggcagaatgacaaaagccaaagacttctctactttatgacttcagggctggacagcagcctggcaactttttcttatggctgttctcaatctctctgagctgtctccaagtttatttttccttctctgtattttgcctcaaaaaatttaggcgagtaaaaagggaactgaaatgagtcggggctc

SEQ ID NO: 244542 - DNA, 217 bp, Homo Sapiens
cttgttggcgggttttccttcctttagttccaaattgcttagaaagcctgctgttctcccaatttctcctcctggcatcagctggctccctgtggatatgcccaccagtctgaaagagtgcttacctttgttctgaaggcagaatttaggcttggcttggcagagtcctctgaagagtaaatgtttaatgggaatacttgccttccacatctgctct

SEQ ID NO: 244543 - DNA, 274 bp, Homo Sapiens
tctagttatgtgctattccattcttcacagcaaaattcaaaagagctgtcagtactttgtgtctacgtcctctcctctcatgcttcaatcacaatttctgtctcaccacgtcagcaaaattgctcttgctaaggtcatcatatatccatggttactaaatccagtaatcaatgctaggtccttgttttaatgagcctgtcatgagcatttgacagtgttgatccctccctctttgtattcttgttgtgaactgaaatgataaggatcgttagag

SEQ ID NO: 244544 - DNA, 276 bp, Homo Sapiens
  misc_feature (145)..(145): n is a, c, g, or t
  misc_feature (164)..(164): n is a, c, g, or t
  misc_feature (188)..(188): n is a, c, g, or t
  misc_feature (204)..(205): n is a, c, g, or t
  misc_feature (231)..(232): n is a, c, g, or t
  misc_feature (251)..(251): n is a, c, g, or t
ctctagacgatcccttgtctttactagatgcccctgtacataccaagactgattttttattctcccttctccccatgtggtttcttctgcatagagagttcctattgatcagtctgacccatggtattttaagaattgcgatccnctactgtttcattattccntttttctcccccaatgttgaaaanaaataaatgtcctganngatgcaagatcaggggacacgtgganngcactgacatttagttcangtgccaggaacgtgaaatgagcccg

SEQ ID NO: 244545 - DNA, 1151 bp, Homo Sapiens
cctggagagaactgatatatcccatcccacatgtttcgcgattaacattaacatttatacaaaagttactaattagaacaaaagttattgattagaattaacttattagaaaaacctggacaaacataccctaaagtgcagccaggtgatcactcttcttgatcacctatgtaatgtctcatagagtactctggtgtgaatagcaatttccaaaggtctttcactttgcatttttctttgtatccagaatcgataaagttaccaggactatttcacagtaattagacttacaaaatcttaacactaaatagacgctaaggctatacattcttccaatgtctcaagtctattgctggccatcaggagcacctgaatacgtagaacataagaaagtttgcgaaaaaggaatcaaagcaacaggaggagtctggtttgaacggttatttcaaccaaattacattaaggactgctaactgttttctgccccacaaaaatagccttagtaaatgtttccatactatgacacaggtcctcctggagcaacggctagataaatttacaaacttttagactttacgctccccttttccaggctccaagtcgaccactccccatttgttaacagaaacttactataactgattagatttctaacctttcctagggagagccagttcaattctaaaagggttggtcacatgggttgctaaattaaaatataaagcatttcctaacagggaagggaggctggtcaattgtggttatttttatcagcaactttaaatatggatccatagattatcaatttatggctgtcgtgggtgttagaagatgacctaatcccatccccattttcatttaaaaaactgaaactaaagctctgtaaaatcaaatgatttaaaatcatctgactaggccgagaaaggattagctctctagagcattacggtaacaatcattcgcaaacaggtagcattatctggcgaccctgcttttctggaaatcttgtcaattattcagttccttaaattccgtcagctacaacagatgcatcagctctttccacactaacttgaaagaagcacattagaaaatagtcctgacttgtttttacagatcagtaactaatgaactgaaatgataaggatctg

SEQ ID NO: 244546 - DNA, 363 bp, Homo Sapiens
  misc_feature (148)..(162): n is a, c, g, or t
ccctgctcatttcagttcaaaataaatgatgtagtcatttcaaggcaaaattaaaacagatgactcattgtaaattccaacagtcatttactcttgacttgaagatctggaaaatatttaaagtctgctgaagaaaggcatagaggcnnnnnnnnnnnnnnnaaaagtttggatattttccctttcgttccctttgggttcttccagaatgaccagttataaatagaattaaaggcatttaactgtatattggttattagtatatgtgggaacaaatgtccgggtacttaagacaaagtacatttaccctcaaatattctcaagtctttgatactctcatgacctgaaatggacgccgggacc

SEQ ID NO: 244547 - DNA, 384 bp, Homo Sapiens
  misc_feature (318)..(338): n is a, c, g, or t
actagaggactcggctcattcagttctttgagataagctcgatctatctttttggatagctggattcagtttgctagaattttgcagaggatttttgccatcagtattcatcaaggatattggccctgaagttttccttttggtttttgtatctctgcaaagttttggtgtcaggatgatgtagcctcataagaatgagttagggaggaagtttcctcctcttcaatttggttggaaataagtttccagtaggaatggtaccagctcttctttgtacatttggtagaattcagctgtgaagccgtctggtcctgggcnnnnnnnnnnnnnnnnnnnnnggggggggaagcgcatattaatgggctgcgcccacatttcacaaac

SEQ ID NO: 244548 - DNA, 599 bp, Homo Sapiens
ctcagtgacctgcagctgtggaaacaaggacatattttattgtgcccatgttgtggcactgtcttatataccgcatccgcaagccagatcaggtcaaactgcatcttcctatttcagagactctctttcaaatgaatagagaccaactgcaaaagtttgtacagtatttgatcacagtgcaccacacagaagttttgccaactgctcaaaaattagcagatgaaattctttcccaaaattcagaaatcaaccaagttcatggtgctcctgatccaacagcaggtgctagtatagatgatgaaaactgctggcacttagatgaagagcaggttcaagaacaggttaaactgttcctttcccagggcgggtaccacggatcagggaagcagcttaatttgctctttgcaaaggtgcgggagatgttaaagatgagggactccaatggggcccgcatgttgaccttgataacagagcaattcatggctgaccctcgcctgtcactttggcggcaacaaggcactgcaatgactgacaaatacaggcagctctgggatgagctgggtgctctgtggatgtgtatagttttaaacccccactgg

SEQ ID NO: 244549 - DNA, 477 bp, Homo Sapiens
tacgtgccttatttgaggaacctattttctgcttactccaaccacgtgattaaaataaggattgcctatcataggaccaactcctcccagccacacatacagttttacaatgagacctgggccaatcagagaccttctctgaggttttccaaattggaattaagggaagaagagaaccttattctttgaatggcaaagttaagaagatatgagactggaagatgttggcagctattgtccaactttgtagagttaatctgtgagaataacactgacacatggtgaaaagcatagatagatgagaaggaagaagagtggtttctggattttctagttcctgtttcagttatttctgaggtcccgaaatgtctttgcccgttattagctgggtaacttccaccctttgggggaatatacacttaagggctaacaatctataagaagagattatggactgatatgagaccggatcctcta

SEQ ID NO: 244550 - DNA, 640 bp, Homo Sapiens
  misc_feature (74)..(74): n is a, c, g, or t
gccacaataacctctcatctttgccccatgacctctttaccccgctgaggtacctggtggagttgcatctacancacaacccttggaactgtgattgtgacattctgtggctagcctggtggcttcgagagtatatacccaccaattccacctgctgtggccgctgtcatgctcccatgcacatgcgaggccgctacctcgtggaggtggaccaggcctccttccagtgctctgcccccttcatcatggacgcacctcgagacctcaacatttctgagggtcggatggcagaacttaagtgtcggacttcccctatgtcctcgcgtgaagtggttgctgccaatgggacagtgctcagacacgcctaccgccacccaaggatctctgtcctcaacgacggggacttgaacctttcccacgtgctgctttcagacactggggtgtacacatgcatggtgaccaaagttgcaggcaagtccaacgcctcgggctacctcaatgtgagcacggatgagctcaacacctccaaatacagcttcttcaccacagtaacagtggagaccaacggagatctcgcctgacggacacaacgcgaaagtacaaagcctgttcctaccacagtacactgacaacgggctgt

SEQ ID NO: 244551 - DNA, 899 bp, Homo Sapiens
  misc_feature (160)..(186): n is a, c, g, or t
acgtcatttgatcagcgcgactcgttggcgggtctggcggcttacccgcagccctgcgcgctcctagagctcgggccgtggctcgtcggggtctgtgtcttttggctccgagggcagtcgctgggcttccgagagggattcgggcctgcgtaggggcgcnnnnnnnnnnnnnnnnnnnnnnnnnnnagagtgcgagataggcggtcgtgcagacccgggagaaagatgtcaaacgtgcgagtgtctaacgggagccctagcctggagcggatggacgccaggcaggcggagcaccccaagccctcggcctgcaggagcctcttcggcccggtggaccacgaagagttaacccgggacttggagaagcactgcagagacatggaagaggcgagccagcgcaagtggaatttcgattttcagaatcacaaacccctagagggcaagtacgagtggcaagaggtggagaagggcagcttgcccgagttctactacagacccccgcggccccccaaaggtgcctgcaaggtgccggcgcaggagagccaggatgtcagcgggagcctcccggcggcgcctttaattggggctccggctaactctgaggacacgcatttggtggacccaaagactgatccgtcggacagccagacggggttagcggagcaatgcgcaggaataaggaagcgacctgcaaccgacgattcttctactcaaaacaaaagagccaacagaacagaagaaaatgtttcaggcggttccccaaatgccggttctgtggagcagacgcccaagaagcctggcctcagaagacgtcaaacgtaaacagctcgaattaagaatatgtttccttgtttatcagatacatcactgacacgcctggggatcctcgagagtcacct

SEQ ID NO: 244552 - DNA, 209 bp, Homo Sapiens
aggtgactctaaggatcctgttagtggacttctagaaggacagagagacggacacctcggccttgctgcaggagttcccaggaggtgacgtatgctcagctggaccactgggccctcacacagaggacagcccgggctgtgtccccacagtccacaaagcccatggccgagtccatcacgtatgcagccgttgccagacactgacaacg

SEQ ID NO: 244553 - DNA, 289 bp, Homo Sapiens
gttactgacctacgataaatgagtgatacgttgcggagccgacattttctccttcagacaatgcagtgttcttaacaaatctcctgcctggtacagaatatgtagtgagtgtctccagtgtctacgaacaacatgagagcacacctcttagaggaagacagaaaacaggtcttgattccccaactggcattgacttttctgatattactgccaactcttttactgtgcactggattgcttctcgagccaccatcactgacaacgcctggggacctctagagtcaccgca

SEQ ID NO: 244554 - DNA, 324 bp, Homo Sapiens
tactcttctattgtccccatctcctcttgtcttgtttctatgctacattaacctaaactgctattgcagtattccaaatgctgtatctcagaatccaaattttcagcttgctgttcattaatggtctataagaacaagtgccattattgccccagtcccccatgccacaatggagttgggaatagttatcacctcagcatgtacaatgcagaggatgactcctttattacaaagaaccaaacaaagatctatgagggggccttcctgtcatagaatgaaacatgttatgtagtccagtcactgcaacagccagtaaccatcggg

SEQ ID NO: 244555 - DNA, 244 bp, Homo Sapiens
ttgtcagtgggaagagaaggggcccagctcagaaggggaagggaagaggaccatgataacgcagcactgatgtggagaagtcctcttttcatctgaaataggggtgtcactttgctcctgaccttatgatgctagagccactgatgtccgatggggaagagagcaggtataggaagagatgcccaggctaatccctcctgtgagcgcactgacaacgggcctcactacaacgcctgggtcctct

SEQ ID NO: 244556 - DNA, 292 bp, Homo Sapiens
  misc_feature (41)..(75): n is a, c, g, or t
tgcctctgtcgctaggaggcagcagctcaggacatggtgcnnnnnnnnnnnnnnnnnnnnnnnnnnnnnnnnnnncagaggttccagaaagttccagatttggatatcaaacagtcctgaattcaaatccttgtttttgcacttattgtctggagagctttggataaggtattgaatctctctgagtctcagtttttcatttgttcaaatggcactgatgatgtctcccgttacaagatggttgtgaggagtaaatgtgatcagcatgtaaagtgtctagcgacagcaggca

SEQ ID NO: 244557 - DNA, 378 bp, Homo Sapiens
  misc_feature (248)..(330): n is a, c, g, or t
ggatcttaaagtgcactcttctatatctccgcagcagtatgtattgcaaacgagcaaaataacaagcttccacagtatggaaggggacctgagtgggttgctgctgctggctccagcagcctgcttttattcccttatctgaccccacccacgtcctcctgattggtccattttatagagagttgattgttccattttacagagcgccaactgatccattttacagagagctgattggtctgttttgnnnnnnnnnnnnnnnnnnnnnnnnnnnnnnnnnnnnnnnnnnnnnnnnnnnnnnnnnnnnnnnnnnnnnnnnnnnnnnnnnnnttaaagttctccaagtccccaccagattagctagatacagagtgctga

SEQ ID NO: 244558 - DNA, 283 bp, Homo Sapiens
gttatgcacaataaatctgatagccttctttgcttcctgtgtgtaatatttcttttttctctggctgcttttaagattttctcttgttggctttgaacagtttatgatgtgcattggtgtggttttctttatgtttcgtgtgcttgagattggttgaacttcttggatctgtgtgcttacagaattcatcagtttagaaagctctcagccattacttatgtaaatattttttctgcctccttctccttaacatataattatctgcttattagaccattttatg

SEQ ID NO: 244559 - DNA, 252 bp, Homo Sapiens
cccgtgacagatactaacttttctgcagtggtttgggaccaaacccacaatatattcagtgtatgtctgtacttcaaataggccgagagttaactgtctactgtctgctaagtagtcacgtaagcatgtgtgccttggaagatacgggttagtgaatgctgaagcccttattcttccaagggatgcagagcacttttctaactaaattgttctcagcctggcccactatttacttttttagtattcctcagg

SEQ ID NO: 244560 - DNA, 1000 bp, Homo Sapiens
ggtattaagatgacacctgtgctatccattttatagtaacttcaggaacaggactctagcatgtttaacacttaatttgccaatgaaagtcctgattgtcagggcagacctttgttccagtcttatctttctgttgagtaaacatgtttgagtaggttatggcacctggccccagttttgaaggttaccatcagtcttagatttggaaaacgttcattaggtagagttcagagatgtgtaaaatgtgtcacagacatgaattaattgactctgggaatggatatcttgtaattgctcacattggagctctgtaacacattcctcttcgtgacaggctttttccagattacatcgcatccctgagctatttccattatatttggtgttcacagtttgagtgagatgattttccaaaaaagcatgtagtcaaagcacagatggagaaaacagataagcagcattaacccatcactgttccttttgcaatccagccatggtcagtcttccctttttcacactcgctgtctgcccctgcactcacaggtggagccagttcagagaactggttgacaggaagaaggatgccctcctgtctgccctgagcatccagaactaccacctcgagtgcaatgaaaccaaatcctggattcgggaaaagaccaaggtcatcgagtccacccaggacctgggcaatgacctggctggcgtcatggccctgcagcgcaagctgaccggcatggagcgggacttggtggccattgaggcaaagctgagtgacctgcagaaggaggcggagaagctggagtccgagcaccccgaccaggcccaggccatcctgtctcggctggccgagatcagcgacgtgtgggaggagatgaagaccaccctgaaaaaccgagaggcctccctgggagaggccagcaagctgcagcagttcctacgggacttggacgacttccagtcctggctctctaggacccagacagcgatcgcctcggag

SEQ ID NO: 244561 - DNA, 358 bp, Homo Sapiens
tcaagtagctcttaacttttttctacttccctcttctgatatctacctttttatttggagttcaaggcctatggtgacctagtaaaatattattcagtacaagtcagtggagtatgaaattgatttaaaaatcagctttcagatgtgataagaaagagagccagaacacggaaggtagtggtagtcctactgtactctgggctggtcagacctcacaggcaacatgttatttgcttcagggagatgtggacaaactgaagcacatgccagagaagaatgactagacatatgaaaggtgcatatggcctgactgaaagaacagaaggtgtctattctgttcaaagacgaggcatagttg

SEQ ID NO: 244562 - DNA, 497 bp, Homo Sapiens
aaaaatgccttgtttagctttaaaaatacgaagtaattttgcaatttttgaaaaacactagttttcctttaaacttaatttttcatgttgatcctgaagaatccgttaaaatggtagcacaagagtctggcaagttggtactgcagagaaaaggggttaattgaggcttgtttggagtcgggattcccctttcccaaacatgcgtctcgccacttggacagcagccatttgtactcgtatactttttaaactttttcttggaatactatattttatttgactggtagtctgatattactcctaacttgtcaaattgatctctttgcaggtaaccaaggagcagtgaacagcagctactacagtagtggaagccgtgcatctatgggcgtgaacggaatgggaggtttgtctagcatgtccagtatgagtggtgaatggggaatgtaattgatcgatcctgatcactgacctttgccgacccggatcctcagatcacc

SEQ ID NO: 244563 - DNA, 874 bp, Homo Sapiens
  misc_feature (60)..(60): n is a, c, g, or t
agaggagagcctggcaacattggattcccctgacccaaaaggccccactggtatccttgnaaaaacggtataaaggtcatgcttgtcttgctggtgctcggggtgctccaggtcctgatgaaacaatggtgctcagggacctccttgaccacagggtgttcaaggtggaaaaggtgaacagggtcccgctggtcctcccaggcttccagggtctgcctggcccctcaggtcccgctggtgaagttggcaaaccaggagaaaggggtctccatggtgagtttggtctccctggtcctgctggtccaagaggggaacgcggtcccccaggtgagagtggtgctgccggtcctactggtcctattggaagccgaggtccttctggacccccagggcctgatggaaacaagggtgaacctggtgtggttggtgctgtgggcactgctggtccatctggtcctagtggactcccaggagagaggggtgctgctggcatacctggaggcaagggagaaaagggtgaacctggtctcagaggtgaaattggtaaccctggcagagatggtgctcgtggtgctcctggtgctgtaggtgcccctggtcctgctggagccacaggtgaccggggcgaagctggggctgctggtcctgctggtcctgctggtcctcggggaagcactggtgaacgtggtgaggtcggtcctgctggccccaattgatttgctggtcctgctggtgctgctggtcaacctggtgctaaaggagaaagaggagccaaagggcctaagggtgaaaacggtgtttgttggtcccacaggccccgttggagctgctggcccagatggtccaaatggtccccccggtcctgctggaagtc

SEQ ID NO: 244564 - DNA, 619 bp, Homo Sapiens
gactctagtggatccacgagccctgtatgaacagctctatgccctcaggattgcaccactacactgaacactggatttttcattacttcctgtgacggggtgaccatggaattcattttacgtaatgggatgctactgagtgaaagtagcaaagtaggtgaacaggacaggaatacttgggtaactgtatttacgtcaacactgtgttctgggagaggtgtaatttgggctttcaaaagtggaggtgggctgtgggagggggtgggctgtagggtttttctgtccaacaagccagatgttatgaaggaggagatccaacagaacatacaattcaacaagatactcgcttgaaaggatcaagaggagaaaagagaaaacgatggaggcttatggaggaaagagggctgaactgcgtgtgtgtgggcacgtgcggaaggacgggaggagacagaggtgaagcaatgaggtcagagaaactcaatcacctgtgcaaagatgtcgactttaaagtagttacaagctccttctacccaggactccaaatatcctggacagctctccccaatgaattttccaccatgagactagggtggaaccgctctcaccccttcatttttat

SEQ ID NO: 244565 - DNA, 512 bp, Homo Sapiens
tcggtacccgttaggggccaccaattagagtccagaagaatggtccggtaatacatggacatgccaagaaccagaataataatggtggtgatccaagctaatccagcaaccacgagtacaaaaggggtcttagggccagtgtagtaatagcccccatacatactgcccaatccaccaacgcctcccatgccatacggttgtgaatatccaaacaagttgtaccactcactgtccttgtgaatgtaagctgtgacacaagcaaagacaccggcccccaaaagcagctccaccacacccagtattctcagcaggcctgcccacgacttcatgtaggagtatctcaggttatactcctccaccttctcactgtatgttcgaactgtttgtgtgtgtcggtctagagatccatagggatcccggggaaacgctgcgtcagcctctttccgggaactaaaggttccttctgaccctccgtagggatctttgcaggagttgaggggcgaacggtggtt

SEQ ID NO: 244566 - DNA, 382 bp, Homo Sapiens
aagacctaatttaatcaccactagtgtaattggtttaccaagaaactgtggaaaatgatcatcctatttcaagaagagctcccttttatcattaaggagacacagtacccagttgttccaaagacggtaggatggaaaatctgcagaattcaccttcaccttctctgaagcaaacacagaaaatcagtggggccagaatacaaacagttaacccactatggcccagggatttcgcaagaggtcaaggtaaaaagtcctcgaattaaaaattccaggagatggctccctctgcccaatgaggactaggttgtccgagggttggactcatccacatgccttttgggtcccggtgaaactgcttctccagtggtaggcattaccc

SEQ ID NO: 244567 - DNA, 327 bp, Homo Sapiens
cctaagtggaactgctccgaaaaagaaaataaattccagtggcacctactacactcacaatcacaccctttcaagggagatcacagagctctgactacacgccctagaccgaactttgcaagttgtattcctaactggggatacgtcttccagcaattcccaaataccacacacacaaccaaactttcaatgcaaaacaaatgcattatctgcaagacaatgtttacagaaatccaatcagtggtttggaaaagaccagttctctataatttgtctcctagagggaattccgagcagttccacttaggcgggatcctctagtgacaa

SEQ ID NO: 244568 - DNA, 541 bp, Homo Sapiens
gcctaagtggacctgctccgccacggactcttttaccagtgcaactcccagacagtgagagagtggctcaacgtggccatcactcggaccctgcaccagggcgaggagagccttttagagctgacggaaacagatctgctctttcctgcagacagcaccagagcagttcccctccgaagagttcccaatttccgaatccaaagtcaacatggacgtgaattttgccccggggcagcttttgttgttgtgtcttgtaaagaaagtcaatctggattccgcaaagactcctctctgtacaaggcaccgtgggcacgggtgctcgtatatggcctcggccacaaagtgaagcgaaatggccagctgaacctcatcgaggccgcctgttacccgcgggacgcgtccccagccaacactgggcttgcacctccccccaccgctgaccagtacccctctgtggtcctctccacagacagggtccacatcaaactgggggtgtctccacctcccggcagttccactataggcgggatactctagagtc

SEQ ID NO: 244569 - DNA, 500 bp, Homo Sapiens
ctcaaagatttatttaccagatccaatgcctatgggtttaggcttctgggcatgctgttttgttagaatgttgaacaacccatgtgataggcaggtagaaggaaagcaggtacgagtgatgtgtgtgaactgctcctcagtgaagactgcatttcccttctatacactactccactgaagcgggcctaggcaacaatggacaatctaagtattttgcccaagatgccacttgcctatcatcttattagaatcaatgtgactaaattatctcagtcataaaatgaagatcaaaaccacctttacctggagtggggggacaggaaactctatgactccaagcttcatgcgccctggacttgcatgggaatgtccagaaaaaaagctgcttcaaaacaaaataaaatgcctttctgttgctaggatatcataaacccacagaattttaaggctagcaaagagcttttcagaaaatcactttcttcccaaggtgcatcggcagt

SEQ ID NO: 244570 - DNA, 661 bp, Homo Sapiens
  misc_feature (179)..(239): n is a, c, g, or t
tatcttcccatgattttagatacctaactgctctctccacagcatcttcgactccttcaatgtgcagcgcctaccttgcccctgcagactacctgatcctaccagctccaaactgcagattaggtcatatttgccatgagctactgcgcccggcctgggtttatatatttttagtaagnnnnnnnnnnnnnnnnnnnnnnnnnnnnnnnnnnnnnnnnnnnnnnnnnnnnnnnnnnnnnaaatacaatgggaagaaaacaggtgccttctactctatggatttagcaggggaagcaaatattaataagtcatacaatcagccatatttacaaactgtgtaactgctccgtagtaagatctgatcaagtctgggaaaggtcatcaaagttttttcttaggagatgacatctgaattgagaactgaagaaagagctgcgaatccaggtggagcactacgagttccagacgcgccagctggagctgaaggccaagaactatgccgatcagatttcccggttggaggagcgggagtcggagatgaagaaggagtacaatgccctgcaccagcggtacacagaggtgggcgcccagagatgatacagacctacgtggagcacattgagaggtccaagatgcagcaggtcggaggaaacagccagac

SEQ ID NO: 244571 - DNA, 361 bp, Homo Sapiens
tcgccttttgataggggttctccatgttgcccaggctgttctcgaactcctgggctcaagtgatctgcctgtctcagcctcccagaatgaggcatgagcggattacaggcatgagccaccgcgcctggcctgaggctaactgaaatgtttgccaaagatttgttggaactggtattttgaaatgaaagcatcttatactgtgtttagaacatactagatggtccatagttggaagctgctatcacaatattactactgttatagcaaattcagagattcacactgaatttggttcccacaattctgcattactttgaatagttggtaaaagacctatcaaaagacgagggtaccgagctcg

SEQ ID NO: 244572 - DNA, 410 bp, Homo Sapiens
ggaccactctagagtatcccctcgtcttttgatagggtttggtgacaggagtcaagagatggagaaatcaaaggtgggaactagaatgacttggagaattgctgtttcactgaccaaaatacagagatgacaacgttgtggtttattaacaattacaccagagagccaaaaggtgcaaaagaggagctagtaaacaaatttgtttattttacagttaaaatccactcttagagtataaaatagaattttttctgaacacaagattttgaggacatgccatttttatcccctaaggatcaggaaatagaaactacagtactatatctatttcagaggcagaaattgaactcctccaatgggtaagaaacaccactcgcctatcaaaagacgagggctccctctagggtcgc

SEQ ID NO: 244573 - DNA, 448 bp, Homo Sapiens
cgagttcgagctcggtgccctcgtcttttgataggtagaaaataaaatttgctctgtacaatttacaggagtgtagttgggaatatttaaatatttagagttagcagcttatttcaaatgaatacatgaagttatatatttaaatacattttcatttaaaaggattaaataggtgttataaagcctttttgggtctggcttctgatgatattactagcagttattttttcttcaaggacaaattcagttgcttaatcaggatttttaggttggaaacagaaaactatattttgcaaaggtataatgcagtgacaataagtaaagtaataaagcaggaacccttaatacagagctcctatgtcctagacgttgtggtaccagtcccacacattatttatttatttactttcctatcaagaggcgagtggatcctctagagcgggccgtc

SEQ ID NO: 244574 - DNA, 402 bp, Homo Sapiens
tcgtctctagagtatcccctcgtcttttgataggcaaatactctggttttgtatgtttcaaaatgtattcttgaagtactattaatcttttcttctccaaagattcccaccacagggcttcagattactggttgtgacaccacaaaaccaactaaagaagaggaatccagggtgtaatatcatttcaccactgagccttgcttaaaatgttgacttttttaaagcaaatgcctggaattatttatacaagtggtgttagcagaacattctttgaaaattgaaagcctttagtggttcttagatgctctgaaactggtgttatcgaaaaaatttgtgggatagaaactggaatatccctgagaagcaggccgaaacctatcaaaagacgagggtaccgagctc

SEQ ID NO: 244575 - DNA, 243 bp, Homo Sapiens
gtgaggaaacctagttctctccccacccttcattgttcttagttgaaagctacccctgtaacaaaaagtagattaacaagagaaaaaagaaatagaagtttatccacatgcataccttgtatatatacatggtttccccatctaccaagggaaaaatgggtaaatctcaaagagatggctttgggttcaggctgacataccatcatcccctatcaaaagacgaggggataactctagagtcga

SEQ ID NO: 244576 - DNA, 509 bp, Homo Sapiens
ggccgactttagaggatccactcgcgttttgataggaactctacaagatgaggggccccttaggtttagccatgtggaggtcatgattcaccaaagggagagagggtcagagacagtgggaggtgaagaaatagaggttgggccaagagtgctgagttttctagtaaagtctgtctcgtggtgatggagaataaatgggatcagcagtttcccctgcaccatgatggaccaagagtcggggtgtgcagaggagacgagaagaggcttagagctgtggagaagcagacctcagccaggtggctgtctcccctctgagggagatagcggtgtgggaccccagggacaggcatgcccattgtaaattgggaacagcagtgtctgatgtgagcaacgtgggcaccaacaatggaaacaaaatgtccttggaatcagtacacacagggaatgtttcgtgttctttccgacattctacaccgattgttctgacctatcaaaagacgagggtaccg

SEQ ID NO: 244577 - DNA, 595 bp, Homo Sapiens
  misc_feature (149)..(149): n is a, c, g, or t
cttcatcaggttggccagttgaggattacacttcagaagaaggcagatgtcattatctaaataggccattctgtactcatttctttgtttgcctgtttcttgtcagtccatccactggatcataaacctaatgaaggcaaagctctgtntgtcctgttcttcacagaatccacagtgtttagcacagtcctggccttctagaaacctttgtcgaatgaatgaatgcatgggtcatggggagatgaaaggcagtgttactctttctctgggggggacatgggaaggctgcttcactctcagatcagtgcactctcattcatgtgttgagtggcaggtgctggaagtcagagcatctgaaatgcaagctcctgtgccccttccctggacctcaggtctccaacattggggcatgtggttggtaagtctctgagattctcaggtatatcagggaataggaactggagggggtggatggtacaggtctctgtgcccccaccccatgatccctagatgaccatccagaaagtgtcatcagccaattggaaagtcatgaagcagacacagccctagactattctagtgggaaggcgttacg

SEQ ID NO: 244578 - DNA, 548 bp, Homo Sapiens
catattttacaaaacttaaacaggccttacctattgttcaatttcttattttacaaatgaggactggcacagaaaataataactgtccaaatttacactgtttgaatgaatattagaacaaagaccaacgtcaaagatctcccagggtccacttcagtgctatttccaggattctatttttttcttcctcttcataagaaggaaaatgaaaataaaaacagcagactatcaactacctactaacattcaggccttcctattctcattcttacagaaaaaggttgcagagagggtacaatgaaactaagatctagagaaaaacacaagacaatcaatctatatacatcaacaaataagtaaaagattctcccctattccatcgtataaactagtcttaagcatttcaagtgtgatatttcctacttttacttattaaagggaaagcaagatttgttattcaaataaacatacacaagactttctacttcaacaaaatgcttcaatgtcacaatgttttatatatgtcatatagacacacacaactatct

SEQ ID NO: 244579 - DNA, 450 bp, Homo Sapiens
ctgactctagagcatccacacacgtcacgccttcctgcctaagctgtcatgttattcaagccttacaatgtgctagtgacttattaaaaaaatcctaagttccttccatgtctcaatggtcagctttttaattcgtcctagctttctttccctcgttactttaaaaattatctacttcttcaaactccttccctacctcttcttctcagcataaaacttttgtttcctagagtatgcacatgcatatatgcacatacacacagtagaattaaccagattggaacccttttttttcctatcaccctgcttcaaaacttactctctcatccatccttgcctccttcctgcctaagctgtcatgttattcaagccttacaatgtgctagtgacttattaaaaaaatcctaagttccttcctcccttccaaagttaactctaagtcagctagga

SEQ ID NO: 244580 - DNA, 1054 bp, Homo Sapiens
cagaggacccccaacgtacagcagtctatccaaggataggaacttagaaacggtgtctcaacgtatcaaaagtgccaaagtgctaagtcgctcaggagccattataccaatgttggtcaccactgataacatttgaaactggtgtgcctttctcggactcggaaaaatcagaacatgacatagaaaatatgttaaaatcagtggaaaaacactgtgcaatccagtgatgaagatgaaaagatggatgaggagagtgcccagattgaggaagttctacaaagaggagaagaaatgttacatcaacctatggaagataataaaaaagaaaagatccgtttgcaattattacttttgcatactagatacaacagaattaaggcaatccctattcaagagaggaaacatgggtcaacttgcttctggaattagatcatcacttcttcctacagattatctggttgcaattcacaaaattttactttgcatggatgatgttgaattatcgcttactgttccagagctcaccactgctatttacgaagacttctctttatcaggaagactctctgaagaatatcaacgaccagctggacaatcttggagagcagattgcagtcattcatgaaaaacagccagatgtcatccttgaagcctctggacctgaagccattcagatcagagatacacttactcagctgaatgcaaaatgggacagaattaatagaatgtacagtgatcggaaaggttgttttgacagggcaatggaagaatggagacagttccattgtgaccttaatgacctcacacagtggataacagaggctgaagaattactggttgatacctgtgctccaggtggcagcctggacttagagaaagccaggatacatcagcaggaacttgaggtgggcatcagcagccaccagcccagttttgcagcactaaaccgaactggggatgggattgtgcagaaactctcccaggcagatggaagctccttgaaagaaaagctggcaggtttaaccacacgctgggatgcaattgttgcagaagt

SEQ ID NO: 244581 - DNA, 499 bp, Homo Sapiens
cacaggggggtaatccacagctttgttcactgtcaggtttgcagtagtagagttggtagctccatcagagtctactacagtcaagctgaaaggtagtcccagtgacgtagttacacctatagtgacacagcattctaaagtgaatgactccaacgaattaggtggtctgactaccagtggctctgcagaggtccgcaaggcgattacaatttccagtcccctaaccacagacctgactgcagagctgtctggtgggccaaagaatgtatcagtgcaacctgaaatatcagagggtcttgctactacgcccagcactcaacaagtaaaaagttctgagaaaacccagattgctgtcccccagccagtggctccctcctacagttatgctacccctaccccctaggcctctattccagagcacctcagcaccatacccagttataaaggaactggtggtatctgctggagagagtgtccagataacacaggcccaagatga

SEQ ID NO: 244582 - DNA, 566 bp, Homo Sapiens
gcccacacacacgcgacgcctttcaatggaatgtgtgtcctctcccttcacatggacgcttagctttgtcactatctgggagagcgtttccccttctgatactcccagcccttactgtacactcatctcaacctgagatctctcccctgctgtctgtccccatcctgggggataaatcaagactaggctgagtcattgaccacccagcgcaaacagaagccccttcaaaaagaagagaaagcttctggaagagagagtcaaagcatgtcccatctaattcccatggagcatgaagagacacctggaagggatagaagcccactcactgaaaggtggcacctggtggctgatggctcactgagaacctgagctgagtcaggcgacctcagctctcttactgagtgagaaaaataagcctgttggtttaggctgcctaagctgcattctccctttcttccagccaaatttattcctaattatcccttgctgttgtctggatgtcccggaattgcagtctgatgtaggcagtggcagtgacttctacttctaggaaggcgtacgtgtgg

SEQ ID NO: 244583 - DNA, 348 bp, Homo Sapiens
acacacgtatgctggatttgtcatatttaagtacttggtctccattgattctagttccttgagctttttatccaaccagaagatgtagttccctcctaattcaaacccataccgtatgctcaggtttttgtgacaatttccactaaaagtaattaagagaaaacatgatgtcatcaaatggtggactctagggtttttcttttctgactaattgatactccagcctcacacctatattgattctgataattagtgattcagtttcttttaacagagaggagcaataacccgtgccgtgcattttgtcgtatgatcataggcgctgaagtttaagaaggcgtttcgtgt

SEQ ID NO: 244584 - DNA, 620 bp, Homo Sapiens
ccaggttgatttcatgtgttttaatgagggtagagaattgtctaagaaggagatagagcaatttagaaaagtagcatttagtctttagtaatatgtatattgggcttttttctattgttaaaggaatcctaaatttctgtaaatttttttgaatgcctccagccattgcagtttgttaggtgcaatatcagtatcattgatcacttgtatgatatggttaggaatgtatgtaaacttaaattgcaaaaccacatttattcctatggattatttgcttacactagttcattcttatagagacaactcaaaggtactgtaccgttgactgtacagttaccagaatgtcacatatggaacaatggggtagacaatgaattagaaatgtcatttttaacatttttaagcagttgatagaaataaggtcctggataggagaaaaagggatttatctccattgatgggggattatggttgagtctcttagctattggtatttataacacttatcatgattacccctactgcagccacttggtaggtttttagtgctcataaaagaattgcacttatttcaaaatttgaacactatttcaacactgtgatgtgtatgaaggcgttac

SEQ ID NO: 244585 - DNA, 109 bp, Homo Sapiens
actgtcatgttttcaagttcaagctactgacacaggtgcctgacttttgtcatgccaaaagaaaatatttgatgattctttacagtggaattaactctattccagaagg

SEQ ID NO: 244586 - DNA, 564 bp, Homo Sapiens
gtaatagaggttcttgttttgtaaggttttagtgtcttgactgaatgttaaatgctaagctgcttacatagatttctacttgtaatgtttcctgacaatacttgatttgtggggaggggaattttctgtatctttcctctctctctctagccgggcctttccaccttatgttatatatagaatgtaagtctcataagctggttgctcccttggcagttttctttgctctggttgttcctccttatatttttttggttgtcattctcctatccctttgagttactcttcttgcagctcagatcacgtcaagcagatattggggttcagtgatgtctggtgatgtctggaagtgccccatgtcagaattccagctgttcagcagcacaggaagattgtacacctgcaactgtgcgaatggtcctgttgcctcctgcattttggcctctgttctataaaggaagagtaaagatggagctcctcctgcctccatcacgaatgcacatatcatctgtccctttggatttacttccggacgtgtgtcgtccccgcgatctgccggtccgg

SEQ ID NO: 244587 - DNA, 199 bp, Homo Sapiens
caaatcaaaataacttgtgtcatcattagaatgtcagatgtgcttctacgaactaagctgactcttttaattctttggcaaagggttggcagactaggactgtttgccaaattcaggctgcctcctatttttagagtcttcctgaaacacagctacacccgtattatgcatggctgctttcctgtcacagtaagtaaga

SEQ ID NO: 244588 - DNA, 207 bp, Homo Sapiens
tgtagaagaagtatcagtcaaaggaagtgaatgagtcagaagtattgtgtaccagtttgtctcttatccagagattttggacatggatccaatgacagtgggcaggattgagggtgactgtgaaagtttaaacttcagtgaagtcagcagcagttccaaagatgtggagaatggagggcaagataaccacctcagccggtgcccgcc

SEQ ID NO: 244589 - DNA, 273 bp, Homo Sapiens
  misc_feature (53)..(63): n is a, c, g, or t
gagtcaaaaaaacctggtgagcataaaatctttggaaccccacaggaaccccnnnnnnnnnnncctgctttttttccaagacggtagaaggggcaaggaacacaaattgtgtttgttagcacatttgtaataactgcaagttgggaacagttttaatctcctctgttgttattcaataatgacagtttgaatttcatgttgttattcattaatgacagcttgaatttagtgttggtacacgcataggggtccgagctcgagtcgtatcatgta

SEQ ID NO: 244590 - DNA, 220 bp, Homo Sapiens
ggtgaaagttgagttgtattttgggcgatcttactgagtttacaaaatgtttagttcatagcaggtttcagtttggacatgaacagtttgtaaatatttacataaaatttaaagataggaggacagcagaggtcatatattgctattaacaatacagaagcgattttccgtcatttcccaaggccttggtgctgcgtcccatggtgaggtaccgagcaca

SEQ ID NO: 244591 - DNA, 403 bp, Homo Sapiens
atatatataaatgtcccctcctggcctgtagtaaatgccacctgtaaagcctattccacagtgccaaaatgatgaaaacccacccccaaatgaaggctgccataataacaattcctgatacaagaaaatattgacagagttgctggaacgtgtaacagtagtttttttacttgcctagagtggacatacccccagtttaaagacagggatgaaactctgctttaactgccctggggtttcagacagtttatgaggttgggcattcgctgcagaactagcatttttgctcacgttctggaagctttctccgtttatttggtcaggtgactgtggtggtatggaaagaaggggcctgtttgttgaagccaaggtgctggaagaactgcctgtgttgcaatgaaga

SEQ ID NO: 244592 - DNA, 578 bp, Homo Sapiens
gggcagcctgagtaaatatgcagaggacatttttggagagctctttactcaggcaaatacctttgcctctcgggtaagctcccttgctgagagggtcgaccgactacaggttaaagtcactcagctggatcccaaggaagaagaagtgtcactgcaaggaatctacacccgaaaagccttcagaagttccaccattcaagaccagaagctttttgacagaaactctctcccagtgcctgtcttagaaacatacaatacctgtgatactcctccccctctcaacaatcttaccccttacagtgacgatggaaaagaggcactcaaattctacacagacccttcatacttctttgatctttggaaggagaagatgctgcaggacaccaaggatatcatgaaagagaagagaaagcataggaaagaaaagaaagataatccaaatcgagggaatgtaaacccacgtaaaatcaagacacgtaaggaagagtgggagaaaatgaagatggggcaagaatttgtggagtccaaagaaaggctggggacttctgggtatccacccacttaggtacacgagtagg

SEQ ID NO: 244593 - DNA, 565 bp, Homo Sapiens
gaggatccccctatgcgtgtacccacaaaatagttgataaagtccaaggcttgctagttcctatgaaattcccgatccatcacctggccttgagctgtgataacctcacactctctgcgtgcatgatgtccagtgaatatggttccattatttgcttttttctgaagttcgcacattctcaaatgaggctaaacagcaaatacgcccatttgcctatcataagctttttgaaagatgcaggaggcatggtgattgatatgaagtggaaccccactgtcccctccatggtggcagtttgtctggctgatggtagtattgctgtcctgcaagtcacggaaacagtgaaagtatgtgcaactcttccttccacggtagcagtaacctctgtgtgctggagccccaaaggaaagcagctggcagtgggaaaacagaatggaactgtggtccagtatctcctacctttgcaggaaaaaaaagtcattccttgtcctccgttttatgagtcagatcatcctgtcagagttctggatgtgctgtggattgtacacgcataggttagcgctga

SEQ ID NO: 244594 - DNA, 410 bp, Homo Sapiens
  misc_feature (370)..(370): n is a, c, g, or t
cattaaagttgagggttttacattgctgtattcaaaaaattattggttgcaatgttgttcacgctacaggtacaccaataatgttggacaattcaggggctcagaagaatcaaccacaaaatagtcttctcagatgaccttgactaatatactcagcatctttatcactctttccttggcacctaaaagataattctcctctgacgcaggttggaaatatttttttctatcacagaagtcatttgcaaagaattttgactactctgcttttaatttaataccagttttcagggaacccctgaagttttaagttcattattctttatgaacatttgagagaatcgggatgtagtggatgatggacaggggntggggccaagaacagggggcactagctggccttatttggc

SEQ ID NO: 244595 - DNA, 786 bp, Homo Sapiens
catcttcatggagaagacgaaagatggacagattcggcctgtaccaaacgtgggttgtacgagacgtggcctgttggcgctaaccacacgctggtcctggactcccagaagcgagtcttctcctggggctttggtggctatggccggcttggggccacccagagcaagaaggatgagatggtcccccgcctggtgaagctgttttgacttccctgggcgtttggcttcacagatctatgctggttacacctgctcctttgctgtcagtgaagtgggtggtctgtttttctgggggggccaccaacacctcccgtgaatctaccatgtacccaaaagcagtgcaggacccctgcggctggagaatccggagcctggcttgtgggaagagcagcatcatttgtggccgcacgatgagagcacacatcagctggggtccgtcaccgacctttggggaactgggctacggggaccacaagcccaagtcttccactgcagcccagtgaggtaaagactcatggatggcatttgtctcagagcaggtcgccatgggctactcacactccttggtgatagcaagagatgaaagtgagactgagaaagagaagatcaagaaactgccagaatacaacccccgaaccctctgatgctcccggagactcctccgactccacacctctcgcggcagctgtcatttccatgtgcactgggacgggaagtcaaacgaggaatttaaaaaagcaaaagttgaccgaaggtgcatttttgtttagactccctaagacccta

SEQ ID NO: 244596 - DNA, 591 bp, Homo Sapiens
  misc_feature (21)..(21): n is a, c, g, or t
tctaatattagatgggctttntatggaaattctcaatgactgttctgatgtagatgagatcaaattccaagaagatggttcttggtgtccaatgagaccgaagaaagaagctatgaaagtatccagccaaccgtgtacaaaaatagaaagttcgagcgtcctcagtcagccttgttcagtgactgtagccagtgaggcaagcaagaagaaagtagatgttattgatcttacaatagaaagctcttctgacgaagaggaagaccctcctgccaaaaggaaatgcatctttatgtcagaaacacaaagcagcccaaccaaaggggttctcatgtatcagccatcttctgtaagggtgcccagtgtgacttcggttgatcctgctgctattccgccttcattaacagactactcagtaccattccaccatacgccaatatcaagcatgtcatcagatttgccaggtttggattttctttcccttattccagttgatccccagtactgtcctcctatgtttttggatagtctcacctcacccctaacagcaagcagtacgtctgtcaccaccagccagctccctaaggccctagg

SEQ ID NO: 244597 - DNA, 113 bp, Homo Sapiens
tgagttgcagaaacctgctgtggattacaatgatgcaataataaccacaaatagatttaagtcctatcacatggaaatgggactaataccttggctataccactatttctcgt

SEQ ID NO: 244598 - DNA, 417 bp, Homo Sapiens
ggctttcaatccatcgcgcgcatcagggcagttgcccgaccgacaattacgctcatcgcgtattcgaggtaggactgtttcagctcgtctccgatattgaccgggaggatttctttgcacagttcgcccatgagaagcctgattcctttttcggggtgaaacctcgtcacatccattcgggacgaacgaagctcgccgctgtcggcacggtgcctgacaacagacttacgacaaatcaacgagttatgacacggatctgcacgttaataggcaacccctcggggcagccctggaaaccgccggatgttatcacaatcgccgccacgcacctatccacactgatgcgcatggaggctagtaatttgacggatgacaggtagaagggggcgagagggtaacagaccgtataagatcctg

SEQ ID NO: 244599 - DNA, 271 bp, Homo Sapiens
actctccaggatatcggaagacacttacgcagtccagagttatgtctgtttgagaaggaagtcatcatgtttactcataaaacacaatttcattccttggtatttttctctctgctgtgtgttaggtaagggctgcagagaaaataaagggtacactcacatatacacacctgaaactatctgcaaagtgttccaaacgtttcttgttattattccaaaatttagaattgtgacttaaatctcgtaagttgctccggggtacggagctcga

SEQ ID NO: 244600 - DNA, 330 bp, Homo Sapiens
agctcggtaccccctacattttggcaggaaaaatagtttgagaattttaaagtatttaacacatttatatatatagatatttatgtatttcaatatatggtagaagcttaactgaaaaattaactgatttatttttaaaaaccatttactaaatatctttccagagtcttaaatcctgaaggtcaagacttttaaatctagaaggagtctcaggcaaagattctataggcttaagaaatacctaattacaaacatgtactacttgtgcaattcatgtatttttccaaagttatttaggaaagaatcctcctgccaatgttggaagtcctg

SEQ ID NO: 244601 - DNA, 323 bp, Homo Sapiens
  misc_feature (130)..(130): n is a, c, g, or t
  misc_feature (181)..(181): n is a, c, g, or t
  misc_feature (259)..(259): n is a, c, g, or t
tgtgactctaagaccgaaactacgatggcaactgcttactttcttgtcagagtagaggtcacttctgtaattatccaacaagcattaagatttgtctttgctagattaggttgaacctattactagtgtnttcgtcaaattgaccaagaacgtatatccgtcgctcaaggttattacgccnatacgtaggtgattggcaaaccttctttatcttctatccgttccttgattcaaaagagaggtagaattaatctatagnagggtagagaatgaggctgaacctcacgaaatagttcttaatgacaaccaatacgtaagttgtc

SEQ ID NO: 244602 - DNA, 308 bp, Homo Sapiens
agacacttacgatggcaacctgctttacttttcattgtcagagtaagaggtccacttgctgtaaatattccaaacaaagcatttaagattttgtctttgctaagattagttgaaactaatactagtgttttcgtcaaattgaccaagaacgtatatccgttgctcaaggttattacgccatacgtagtgattggcaaaccttctttatcttctatccgttccttgattcaaaagagaggtagaataatctataagggtgagaatgaggctgaacctcacgaaatagttcttaatgacaactatacgta

SEQ ID NO: 244603 - DNA, 288 bp, Homo Sapiens
  misc_feature (170)..(170): n is a, c, g, or t
agaaccacttacgaaggattatttcaccttgttcccttaagtttcacatggtattgcttttactccatcgattacacatcataagacaagttgtatctttaaagtgaagttctcaaagtgtggtagggactcaaaggtcccttaaggtcctttcagtaggatctgcaagngtcaaaccctgttttcacaattaacgctaagacattgtttgctcttttttgctcgtgttaccctcacgagtgtacagagtacaaatttcaccccgtaaggtttgtcctcccgggggta

SEQ ID NO: 244604 - DNA, 255 bp, Homo Sapiens
cggagacaactttaccttgattcgacttcttgttctgtcctgcagaagttccaaaataagcgctcaagaggatctctgttcttcccacaggctccacaatgcaattcacagctatgccagttactacatgtatagcacaaaggtcgagaacctctgtcctttggctgagtttcatccaactgaatgtttagttcactgatgtcatagccctcaaaataatcagtgttatactgggattctctcgtaagctgtctt

SEQ ID NO: 244605 - DNA, 181 bp, Homo Sapiens
ctctgactgacacagttatgaggagatgtttgaagtctcttatctcatgatttcatgggtatagtttaccctaacatgtgccaacccccagcctgtccaggactcactgcactctggcagtgccaaggggttccatggaattagtcaatggtatctgaatctctgagccaccatctgactc

SEQ ID NO: 244606 - DNA, 432 bp, Homo Sapiens
tgttttacaaagaaagcgtaaagatgaatgaagtggcaaaagaaaaatgctaaaatacatgattaggaagagagacaagaatactgatgaagtctatttgaaagaccgattctttccatgaaagactacattcttttaataaatcaaactagcagcaagttccaagacacgtaatgcaaccacaccaccttcatcacagccgacacacacatacctggctttggcttcggccttgcgttttcggcatcatctccgttaatggtgactgtcacgatgtgtatagtacagtttgacaagcctgggtccatacagaccgctggagaacattcggcaatgtcccctttgtagccagtttcttcttcaagctcccggagagcagctgcttctggggtgtcaccatcatctatgagacccgcaggggatccttagatc

SEQ ID NO: 244607 - DNA, 122 bp, Homo Sapiens
tcagccactgtcacctgacccatatctaagagtttttaagtgtgaaaaggaacaggtgagcttaatttgattgttacagaaagtattttgccagattgttaatcttcagtatacttagtagc

SEQ ID NO: 244608 - DNA, 283 bp, Homo Sapiens
tacatgtatgggagtaccagaaagaggagaaagcaaaaggagcagaagcagtattcaaagcaactatgactgagaatttcccccatattaaagtcaggaaataaaccacagatccaggaaacttagagaacaccaaacaagtgttccttccaaagcagaaagcactaagcccacatgggttcactgatgaatttttccaaacatttaaggaaggaaatatacctattttctacaatctttttcagaagatagaagcagagagaatatgtcctaactcgtttta

SEQ ID NO: 244609 - DNA, 466 bp, Homo Sapiens
tctttgcgggtctcatatatctaactgctatctctttctcattcccagctaccagtagaaatatgagatctagatatggatgatttttgatgggggcgggcgttgatgtgccttttaaatattgtagaattcactatgttaggaaataaaataatgacaggcatctgtttttttctgaaaaaaacacaaaattcaggtcctgtacctgccattttaccacctgcaaggatttgggaatccatttaagtttcacagcttttatatctgcacctgtcaagtcaggatgagataagttctgtggaagtgttttgtgaaccagagaatttgacaggtatgttacgtttatacttcattctgcatcattcattcattattgaattattcagtccttcgttgagaacatactacaatgaccacagcagggtccctgtactcaaagagcttcctgtctagagcgggagacaac

SEQ ID NO: 244610 - DNA, 295 bp, Homo Sapiens
cttgcggtctcatatagacacacagcaaagattctatttctcaaggaggaatgttttatttggaaagtttaaatccttaatgggtatgagatctagaggcttatcagtgagtcctataataatctgttgcaaagggcgaagtacaaaaaacagctgaagagtgcggcagaagcttctgctgatgtttctctgacaaatgctggggctaatattaattccttgtttttgggatgtgtgcttccattactgaagaaatccccccctttttctctttacaccccgtagatatgagacc

SEQ ID NO: 244611 - DNA, 484 bp, Homo Sapiens
tacttaatatttcagatataaccatttttattaatttctttgtaatgaccatgactgtgactattagtaacattttctaccagtagccataaaaatccccctcaaaaaggtggtaatatatttcatagtcatcatggcaatttcatagtcatttaacttcgcgaggttcaaagcaagaaagctgtattttcacatgacacggatcacatttcacattgcacgcttaacacgaaagcaagttgaatcctcagttttcagacctgaaccaaatgttctagattactggtggactcagggaatttaaacatatctttatcatgattataccacaactgtgttctcttgctttctctctgtaaacatgttaaatccagaggagacagaagggaagacatttaatctgtatttgtaagtttggtattgaaagactactgactcttctaagtaagccagtcctgtaagcatgatttgtatggagaccgta

SEQ ID NO: 244612 - DNA, 281 bp, Homo Sapiens
acgaggacatccaagtgatctgagcaatcccttctatacagggcccaagcagtcactcactaggacattgtctttcctagcctaatgtccctaaggtcttttccaactctgacattctttgaggggatgatccttttaaacttcttactagcaatcattaactaccaagttgcatggcaatgagctcagctggcttgaggctagtcagaccattagatcacatgtttcatccctgaggaaggctcttgctgtatttcctgacttcagaactctgtcctcga

SEQ ID NO: 244613 - DNA, 313 bp, Homo Sapiens
caagtcgaggcaggcagcacagtttttcagtcagcattgagtcctctgaagtgcttcaaaggatgttttcttccaggctgtagacatatagagtattgcttggtatgagatttttagattcctgaatgacgcttccagtcatcatttttgtgtgtttcattattcttcttgtttcaccagattctagaggggccaggcgcccctcctgttgctgttctgacgtcagccttcctgcttcgtctgtgccgccactgtggtggctgttctccttcatccacataccttttcctgtcctcacacattgtcctcgatt

SEQ ID NO: 244614 - DNA, 458 bp, Homo Sapiens
acaagctcacagaaaccttataatgaaacaaggcgtaccaacagggtaattaatacttcctcaaccctgaaatgttagttaagggccagtgaaggacagactaatggatttaagtcaatcctattataattataggagaatgtggcaaaatttagagtacttaaaatcctaagtggcacctttcctttcacctcagtttcaacagcttctattaaaaatgccgtcattatttaaatgatgttgttgaacacagtttagaactagaaagagtcaacagggagagctaaatggtaccttaattcagtgaatactgacttggaacccacagacacagcactgccctagagggctggccgtacattcagtgctggcaggctgatccttggctagctatttaggaacactgattcacaatatgagactgtttaacccagagctgtcctcgattgactgggatg

SEQ ID NO: 244615 - DNA, 286 bp, Homo Sapiens
caccagtcaatcgaggaccagtagccccttttcaggttgttttgaagataaggtacctgagagccttcagcctgtgcctggttcagagtcagcatcaggaaaataacaaatacaaggcaatttccagcatggaggaagaagagaatgggtctggattcttgttcactagacaaacctgtctctgttaagacttgtgctaatcattgcttgcctgacatatacttatgttcaagacctccgtctgtccttctgtctcgtccttctgtcctgtcctcgattgaatgga

SEQ ID NO: 244616 - DNA, 213 bp, Homo Sapiens
ccccagcctatcgaggacacacacacaggtgtcagctttcccagtggaacaaaaggagctgggaagattctagtgactgtggttacttgagggtacttctttattcttagtagttccagacacttgcttatggaaaagaggaaactaattttcatggagtgcccactctgtgttgggcactgcggtaggtgtgtcgcatgtcctcgaatgggg

SEQ ID NO: 244617 - DNA, 284 bp, Homo Sapiens
tgactcagcctcgcaccagccatcgagacagattgattttaacaacatgtttcccgtaagtcctaacttaatggcactggaaaatctttctgttaagaaaaggaaaataaatggaccttcaacaggctctttataagcaaaggcattttcgtgccccagagaacagtcttgtaaaagggagatttataagggacttccaggaagcaagagttcagtaattttctaacactgaagcaaagcaacgggaactaggtttaccatctccaagacacaacccctattgt

SEQ ID NO: 244618 - DNA, 467 bp, Homo Sapiens
tggagtggaagagaagagagagtgggtaagaaagggggaaagaaaaacagaggcagccagcaagatagcaaagtataattttcatcaacattcattcattcatttgacaaacatttattgaatgtttaggagggaccaagaacattcaaagcccacctccatgctattcctcccttaaaatcctctgagtcttcattgacatggatccttttgaaatagctcgttccagtgaggacatagatcttgaggtttaccttttcatccttagggttgaggcttcacttgataatatttggactggattttaccaaggcaaagataaatgttacaggaaggcagagaaaccctatgaattgggatttgtcccatagacctgcccttcatggttgaggcaggcatctggcatccaggcagcagtttgtttcccttggatgcccacaggccctgcgctgtgtcctcgattagct

SEQ ID NO: 244619 - DNA, 507 bp, Homo Sapiens
gtgaaagctgtgagtgtatttcatttataaagtctgtaacctactgattttattgctcctcactgtctctgcttgagtttgaaaactgaacatactggttcactgtggtggttcttaatctttcggagaggagacttctgagtatcaagtaaaacctaaggcccttctccccagtcacaaacggacgtaaacacaacatatggtagacaacactgggggtaagggactcctgtgttattacaaagttaagctgtgagttcgtacaagcattgtgtatcaacagaaggaatgtacctgtgcgactgctgaaaaagaactccaactcctcagaaagcccagtcaagatgctgcacagatcatcggtacatttcttcccgtgaaaactggtatcgtcaaattaattagcaccttctaaagaaaactgtagctttcgtccatttgttttatttcctgatttcacaccctagaaagactgtaaagaaaaaattcgtcatatacagactatgt

SEQ ID NO: 244620 - DNA, 455 bp, Homo Sapiens
tgcaaggagtatttttgaatatgaacctggcaagtcatcaattcttcagcatgaaagaccagttaccaagcctcaagcttcctgattgattgtcattctaatggatcaagattatatttcactttgcaggattttttccaattatttaattatatgcaaacaaaaatatctatacacttaagaagaaccacttgcctcctcgaagcgcaggttcacacataggtcttcccttggccttctttggttttgattccccaatactcccttgcatgtcctttgcttcccctcagaaatcagtgtcctcaggattttctttgaaactccacagttcctctgcatctccttccaagcctacttctaggagaacatttgcaatcgattgcaatttactctcatttttgctttaaaagaattttaggtgtcagtgaacaggaaaaagagagttttctttgtgg

SEQ ID NO: 244621 - DNA, 530 bp, Homo Sapiens
caggacgcagccacgggcagctacgacaaggccctccgcttcctgggctccaacgacgaggagatgtcctatgacaacaacccctacatccgcgccctggtggacggctgtgctaccaagaaaggctaccagaagacggttctggagatcgacacccccaaagtggagcaggtgcccatcgtggacatcatgttcaatgacttcggtgaagcgtcacagaaatttggatttgaagtggggccggcttgcttcatgggctaggagccgccgagcccgggctcccgagagcaacctcgtgacctcagcatgccattcgttcgtgagtgtcccgtgcacgtcctgatcctggacagtgaaggcttctccctcccctcccacctgacttcatctacgcctcggcaccacggggtgtgggaccccagcccggagagaacagagggaaggagccgcgcccccacctggtgctgaatcacatgacctagctgcaccccagcgcctgggcccgccccacgctctgtcctcgattgact

SEQ ID NO: 244622 - DNA, 281 bp, Homo Sapiens
ccttcagaagcattcggctgacctagggagggcaggtgttcctcacatgttaaagggaaagattggtctgtgccttttcatttcaaaaccattgaaacaatctcacggccattcagaaaagttaagttggcttaatgggtatttttacatttgattacacctctgtcttagctctttcttcaagagaggatttatgctcacattctattatctgagagtctggagtgttgagatcaaccattattctgtttaaatcagttgtcttatgtcctcgatggact

SEQ ID NO: 244623 - DNA, 220 bp, Homo Sapiens
atatcgaggacaatcacactatatgttgttgtcagaatttcacagatcttatatacataagttctcctgttacattaccagaggaaaaactaattttaatggaagaataaacaagatatgatttagttttcatgtgttactagcctaaaacattatttaaaatattgatacaaattactaacaatattttaaccaaatctgttctgtcctcgattggcct

SEQ ID NO: 244624 - DNA, 413 bp, Homo Sapiens
  misc_feature (331)..(342): n is a, c, g, or t
aggaagtatgatggactatttcatcaacaaacaacaacattttaccacataggagaatttcaacaagttattttatataccattaattatcttcaaaaggggttctacatagagccctgtagaaatagtgattaggaaatggtacctttattctagtgcccaagaaactgccttcatttcttcacttttcacttggtaacaggagataattttgaaatgattttgagttttggagtgcatcagtgcagtccttccacctccctgccctctagcagcaggtccacattctggggctgttgagcaagccacactctccttccctagagacggnnnnnnnnnnnnccttcagaagctttcggctgacctagggagggcaggttttcctcactttttaaagggaaagattggtctgt

SEQ ID NO: 244625 - DNA, 182 bp, Homo Sapiens
gcaggggcccgctatgtggccctgagccccgtgtactggttctgcctgtctggagggccatggagaagaggctgggagatcaagccaaatcctgcttcctggattttatcaggatattattggcagacatctgcgaagtggttgagaagcctgtacctgttttatacttgcttttgcttcag

SEQ ID NO: 244626 - DNA, 115 bp, Homo Sapiens
cataggtgtatatgtttatgggggtacatgagatattttgatacagtcatgaaatgtatatgaacacatcagggtaaatggggtatccctgacctcaagcaaccctcacaagacc

SEQ ID NO: 244627 - DNA, 276 bp, Homo Sapiens
  misc_feature (22)..(22): n is a, c, g, or t
gtgccaagacgttgcatagccntgcaaggtcgagctactagagagatccaccacaaccagaaacgggcagcaagggcttttacagtcggggccaacacctcccattgataatcactattccaaccaactcctctaagactagctattcctttaacaggcctcttgaggtaaaagagggacaatattccacacagggattaggaagttaatgtaacctattcaaggtctccactaacaatactacgcaatatgtgttgggcagctggtatactccgt

SEQ ID NO: 244628 - DNA, 659 bp, Homo Sapiens
cactccccccagcctaactacatccacgatatgacccggatggagctccgaaacttgctgctgacatgcttctccgaggccatgtacctgcccccagctccggaaagtggcagcaccaacccatgggttcagttcttttgttccacggagaacagacatgccctgcccctcttcacctccctcctcaacaccgtgtgtgcctatgaccctgtgggctacgggatcccctacaaccacctgctcttctctgactaccgggaacccctggtggaggaggctgcccaggtgctcattgtcactttggaccacgacagtgccagcagtgccagcaccactgtggacggcaccaccactggcaccgccatggatgatgctgatcctccaggccctgagaacctgtttgtgaactacctgtcccgcatccatcgtgaggaggacttccagttcatcctcaagggtatagcccggctgctgtccaaccccctgctccagacctacctgcctaactccaccaagaagatccagttccaccaggagctgctagttctcttctggaagctctgcgacttcaacaagaaattcctcttcttcgtgctgaagagcagcgacgtcctagacatccttgtaccccatttgcctttcgtgggatcctctagtca

SEQ ID NO: 244629 - DNA, 370 bp, Homo Sapiens
actactgtcgcattttttaaaaagaaacatatttacattaagaactgtactaaagtgtctgttgttttatttatggaagcctaacaatgagaaatagattaatgattgtataatacagattaatgattatacagtgatatttcatagcatgtcatctcagcaatatttaaaggagttaactactcttgtttcgtcactgacaaatctcaaaatatttataccgcacgataccatccagggattaagattaaacacttcacgacatcaaatcacgtattataatgtagaatatgtaatctaatctattataatgcaaagttatcaatggtcatctggaaggcagaggtaaagacgttaccagactccaggt

SEQ ID NO: 244630 - DNA, 318 bp, Homo Sapiens
  misc_feature (244)..(255): n is a, c, g, or t
actacgtcgcatatgggtacagaaataggaagtgagtaaattcttagcccatctggggtggcttctcaccgtatggtggaacactagcagacatcacagatataatgatgtctaaggtctcttttacctttaatatactaatatagaaggaagcaaattcaaggagatcttaaggatttgaaaactttagttgggaaaagaatgattaataaagactttcaaggcctatacttattttaccaannnnnnnnnnnnggagatggattctcactcttttgcccaggctggggttgcattctgtatttggcttttttttgg

SEQ ID NO: 244631 - DNA, 333 bp, Homo Sapiens
gtaggtcgactctagcacggatccctactgtcgcatattcttcactgacttgaaaaagtacactttgcatacattttaattcatttttttaacgtagaatgaattataaaagaagaaacattttaatactctcacaagctactgctgttaaagactataatcatcactggcatatcctttttgaaaagaaataattatctcttttagatataaagtaatatccactagttctaggttgactttctttaaccaacctgaacaaacgtttttaaccatttcctttgtcctgaaatttaacaatattgatattcatatagagatatgcgacgtagt

SEQ ID NO: 244632 - DNA, 221 bp, Homo Sapiens
  misc_feature (207)..(207): n is a, c, g, or t
tcgcatttcattttgtgaagctgccacgattcatccattctatcgctgattggcatttgggtggttttcagtttggcactagtttttagtttttggctattatgaataatgctactatgaacaactttgcttttttaagactatggttcaaattccttaggttatctactatatactatggggatgccagccattgtggttcacacnatgtcatctcagca

SEQ ID NO: 244633 - DNA, 368 bp, Homo Sapiens
tatgcttgtggtcgtctctacacggatccccactactgtcgcatttttttaaatgaaggttggccaattaatattgcccaatgagacatgtgagccttacggtttggctgcttgtcaacccaacacgaattatttcctgatctttagccaacacggcatgtctcttcatcagtaagtgaataagcagaatggacctgtgtgtgtgtgcacatgcccacgcttgtgtacgtagcatgtgtgcagcataggtgtaaagcctgcaggcacaccttgcattcttgactaaaattccttctccctcatcagaagagagattacatgattgtcttagtcattttcttttcgtgaaatatatgcgaacagtaagt

SEQ ID NO: 244634 - DNA, 175 bp, Homo Sapiens
tgaattaattaaaataaaatatactttagagaggaattttgactgttctcaccacaaagaaatgacaagtgtttgagatatggatatgctaattattttgatttatcattacacaatgtatacgtctatcagtacatcacagtatactctataaatatgcgacgtagggtatcct

SEQ ID NO: 244635 - DNA, 410 bp, Homo Sapiens
actacgtcgcatattttaagaggaactaagtatagaagataagacttctagagtttccttaaatctctaatatgtttcacactgaattttatctaaatagttactacatgccctttatgagaaattgtataatatgattcacactaaggggaaaaaaatcaggaaatattcagactttagttttctggcagagtagaaatgatacattttcacattgctttaatctctaatctacatttaattagaagatgaaacaaatgttctgaaacataagaaaaatcaatgaaaagacacgaagagcattaatatgtggaatgtaatcgaaattgtagctcattgttatgctgaagaaattagctacatttggactgaataaaataaactctatgaaattgccgacatttgtagtt

SEQ ID NO: 244636 - DNA, 465 bp, Homo Sapiens
ggtggaggatgtcatcttttcatagatgctggaactagagtgcacttgttagatgctaaaggtttgagctttacacaaaatgtcttcatctgtatttgttattgtctacaatatatttgaatttggggcagcatattaagatgtaatggcctgttatgtcttgaaaatacttgttttgcctcttccaggcatactgcattctgtggatcagtttgaacagcttctccaccttatttggacagtgataaattgaaccaagagtgtagatttacaagtgtaaccttcaaaagaggaagaactattttgggggtctgtaggtaatgaacagtcacaccaaaatagactatgatgcttttgttaagaaaggtttcatgttttagatattttccgtgtcctaaataattttcaataatctataatccctaaaatgcaaaaagtgtgcgggatcctgtagagtgaccaaca

SEQ ID NO: 244637 - DNA, 217 bp, Homo Sapiens
tccactttttgcattagttatggtaaatataacttagctttgttattatattgtagcaaagccacccccttatcacagaattcacatcatttataaaaatgcttacaaaattctatttgctacattttaacctgctttactgtattcttcaaatatttttactagactctgattttcctttggtaaatactaaacaattgatttttcactttcacac

SEQ ID NO: 244638 - DNA, 535 bp, Homo Sapiens
tacaaaacaccaattttattataaatatcaagaacctacagggtgtttatgggccagcatatgccttcagttatgttgaaaatagctgatcatctttccgtacattctgaacatttctcagtttcagagtgctggccacaccaaagcatcagccctggctctaaactccgttacagtaaggaattacaaatcctgtgtttgtactccaggaagtctgcattatcacgaggagcttggaaaggaggtaacacactcaaggcaaatttcaagtaactcatcctggaggcagctgcatactctgcagctgtggttctccaccacagagagaagaaaagggagggagatggagtgcgcaggtctgagaaggctttcattctggagcatctgcaggagcctgcaccatggcccagtagcacccctttttctccatgagctgctggtgggttccccctgccggatagcgcctccttccagaaagaggatgtggtcagctgctccaccaggctgaagtgctgggtgatgagaagcctcgtgc

SEQ ID NO: 244639 - DNA, 589 bp, Homo Sapiens
acaaacaaatgatttcgactccattagactatgattacttcataattatcaagtgccattagtatatataaacatcattatagcattcgcgatcgcccttgcagggttacttatatatcgatctcacttaatatcttcactactatgcctagaaggaatgatactatcactattcattgttcggggcctgcaggccccgaacaatcttccactatgtcttatctataggagcagtgttcgccattatagggggctttgttcactgattccccctattctccgggtacacactcaaccaagcatgagcaaaaattcactttgtaatcatattcgtaggagtaaatataacattctttccacaacactttctaggactatccggaatacctcgacgatactccgattatcctgacgcatacacagcatgaaatactatttcctcaataggctcattcatctcactaacagcagtgatattaataatcttcattatctgagaagcatttgcatcaacacgagaagtatctgcagtagaactgacaagcacaaacctagaatgactacacggatgtcctcattgtacgggcct

SEQ ID NO: 244640 - DNA, 575 bp, Homo Sapiens
tgacacatactgaggctgagttataatttgaatgtatctgtttttcttttgtatgtttgaatgaaggcctagagaaaacatggcaacattcactttcaagaggtgagagaatgaagtggagcaggaatcgaatcagtacataaatcctgtcaccatttattagcatttgcaaatctgactcactaaacctcagcctaatcagactggatttttgcatgtcatgacaacagcatacaacattgtttctggaggggtcagctgcggcagcctcctactgtcctttggtgacaaggctttaatgtctccataaatgtatgctgcccagctgctgcccgcttaattagacgatgatttccacttgattgaacctgcccagcagccagttgtcacctaacattcacaggaggccacactggtctctttcagaactaccgggatctatacagtcacacgagttctatggttcctactacatgtgtcagtatactgtttgagtttaggacgtgcatcatatttctccctttttacagatatacccttgctctgccagatagttcgttccttcctctgattca

SEQ ID NO: 244641 - DNA, 182 bp, Homo Sapiens
ttatagctgcgattaccacgtgtgtgccatcaatactcggccaatttttacttttttaaataccttttatttggaagtatacatttacaaaagttacaaaaatatagtataaagaacatctggatatccgttatccagacttacccacttgcttatttgtatttgtgctgtcctatctctga

SEQ ID NO: 244642 - DNA, 132 bp, Homo Sapiens
agagcctaggattttggaatggcaatgagcactggcttcaacttacagtcaccagctgcatttaaccgtaacaagagagtcagtctgtcctgtaccttgaagctttgaagccaggtatcgacttctactctg

SEQ ID NO: 244643 - DNA, 293 bp, Homo Sapiens
aggaagtatggcgataagtaaacatatcatatgacaaggaccaagaaagtcaatgttttcaagagcacatccagttggaagagtgggagaaaacatgtggaatccacattctggccgatttcagggcttatctgcctcggatatggggtagaaaataacattttacctgaggggtaaatactacactgcagcgacatgccttcaaatagggtttgtgtagaaagacacactcatcatttagctggagggctctccaggccaaggtacttccacagcatatggctgcgcgctgt

SEQ ID NO: 244644 - DNA, 412 bp, Homo Sapiens
  misc_feature (182)..(208): n is a, c, g, or t
aaaggaaaaacatttaatacataaaaaagcacaattaaaaagtattaaaagcattacatagtgcaaacaccaaaaagacagagctattaacttagtggtgcttataaggaaaactaggcaagaatgcagaaaatgccttcctctttcctcatctagtgagctggccacattcaataagttgnnnnnnnnnnnnnnnnnnnnnnnnnnngcgaaagactgaagttttcttattactcaattcagtctcccaaaaagttattttaaattggctgctttcttcccacttgatgaaaccacatttgctgctcttgtgattctctgatcggaaatatttggaaaatttcatgttttctatatattgatagtgcattttatgccacctactcaagtgtatgtagaaagagatgttttg

SEQ ID NO: 244645 - DNA, 190 bp, Homo Sapiens
cactactggcctggcctcctagggtaagtataaggattaaggagttgatgtgtatgaagtgcttaggacagtgccttgggcagagtctgtgctacctaacgtattttctgctgtaattactattaaaaaccactccaggccaggtgtggtggcatatgcttataatcccagcacttatgagccgtaggga

SEQ ID NO: 244646 - DNA, 235 bp, Homo Sapiens
gatggcgactctagagtatacccgccttaaccacaggcagtcataagcgaatcatcactaaatatgccttctactggttaatcaaggtgttgattagttaaaagccattctcatagacttgagaagatgtctgtttcttcttctcatacaacaagaggtacagcatttcattggttagttgatattagggattagtgtctatcagtggtgttcaacaaggggtgagtttgcaatt

SEQ ID NO: 244647 - DNA, 262 bp, Homo Sapiens
  misc_feature (242)..(242): n is a, c, g, or t
tatttgctttgcttctctgcaaaaaaggttaagaatttgtaatagaagctaaaactttaaggaattttaaggaactcaaaacaaaaactcattaaatgtaattaaagtgaattctacaaataaagcctcttaatacatttctataatagtcacttaagacttaaattcaaacactagcaaaccacaaaatcagactgtatgactgacatccaaaagataaatataaatcaaaatccgacccnagcattagccaaggggtagg

SEQ ID NO: 244648 - DNA, 142 bp, Homo Sapiens
ccactcatccttgactggtttattggaatagcagaaactggttgagtccatttgtcataataactgaattagtgtcacttgttaggggaaatgacatgcgattactgaaggacaatgtgatggctaattttatgtgttaact

SEQ ID NO: 244649 - DNA, 380 bp, Homo Sapiens
cttggtgtgttgtggctttggcatggtcgttggaggtaactctttggtatccacagtggtggggatgtcttgtgctgtatcggttacattttcaagtacaaggcttttgctgtctgcagcctctgagtcctccttctctaagagcttatgatccttgacaggaatcagagcagaagccactggttctgaaaggcagccagcatctgtttgtacatctgctttatcatcttggttaggctgaggaccaagagcttgattctcagaagagtctccattcattcctctggttgctggcagaatctcttcttccgagacggtaactttggtttctatagcagtttccttaaccaacacaccaagaagtccggtaccggctcgat

SEQ ID NO: 244650 - DNA, 380 bp, Homo Sapiens
gagctcggtacccaatgctgctcacactagtgcatggactgaaagtcaggcatgccctcaaataggctgtattttctttccaggaatgtaacctttcccctttttcttctgacctgagccaagattggaaatcagaaagtctcctgttacatggagctgaagaggggctgctgttttccgaatgttttccatttcacaggcgccacctgcttgcccggggttggtcttgagaagacacccaaatgttcatgcctcagaaaggcagcagaatgccttttaggcaaatttttttaaagtatttgaagttatatagaagtttggtaagaagaagcacttgtttctctcttttctccctcatttcatgtgctgctgagctatcg

SEQ ID NO: 244651 - DNA, 504 bp, Homo Sapiens
cacacttcgatcgcagtgtgggacagcacgcgctaacaaaagagaccctatctctgaaaatggaataaaaaaccactcttaatttcaccaacctgagataattcctaaaatttggcattgacctaggcatttttgtatgcatctacaacacatagatgcctatactacatgtctttaaaaatcagatgctatacctatcttggaatcatttctcaaatcatgtaacaaataactttctgtctcatacattatcagtctgaagatttgcatagtattttactttttagatataccctcatttgttaggccagtctcctactactggatagtttgttttctgttatatacacatataagctgtgatggactacctgcatctgtctttggggctttgtgtccaagtaaacactgaggataaatttgtagaagtaagtttattagattaaaggatataacatccttagaatctttcattacatattgcatattgttagcgcgtgctgt

SEQ ID NO: 244652 - DNA, 405 bp, Homo Sapiens
ttgttagcgcgtgctgtccggacagcacgcgctaacaactgtggaactcctgtcattctagagatgagactgctgtaatgctccttgggtggccttcaatgtcccatacttatttcctctcacttccctgatcctaagagggatttgtcacccaggtgtctggaatcaaggctcttctgtgactttgttatacaaaaccttgatttagaagcagaactgttcatcatactgcttttgtgaatgtgtcctttatgagttctttgcaaagccctccatactggctgctaaacagtttattaattatgatattgagtaataagattgttcgacaaccaggtcatgcataaaagcccaacttcttggctctggtgatgtctgtttttgttagcgcggcggtccggtccg

SEQ ID NO: 244653 - DNA, 433 bp, Homo Sapiens
gtcggtaccggacagcagcgctaacaacttggtgagggttgataaaagagggatgtataatttgaactttataaaatcaccatagaagcctgtagaatacagtttctatgaaggtcctgcttatcacatgagacaaactgttctttgttcttgttaaagattgtgaacagtgtgttaaataatattaatggctgggattgtcagtacttaacagtaccgtccttctacaagtgattttattgatcgatacagactcaatgtaacgggggcagattatttttactgattttatcgaaaccttaaccaagtttgttagtgtgccacatatctttaaatagatctagatgatgatatagattaagaaaagcaaaccaccatccatctctttttgatctgttaataacttaaatccatcattgttagcgcgtgctgt

SEQ ID NO: 244654 - DNA, 517 bp, Homo Sapiens
cacacttcgatcgcggagaatgggaggagggaaaggaagggcagaatggagtgatgtagggtccatccatcatatccctggatggagagacccctgttcccacagtagtcccacaccgggaccaccaccagcactcatgaatatgccagcctccatttatatgtcctcgtctgacaactccttcccattttcattctggaggcaagactctgaacacactagctctgaggacacctgtgtgtaacctgagacagtccctgaagacctttcatccaagcaggatccctccctcaccatctccagacctgccccacaagctccctccctggtctcctggctcttgttcactccttccaggcaggcttctacagtcatctcgaaaacatagctgactgtcactcctttatccagcatcttccatggctccccagagccctccaagatcgagttcaagtaccttgatcagacacttgatctcaagctcccgccggcttctccgcgatcgaggtgtggtacc

SEQ ID NO: 244655 - DNA, 263 bp, Homo Sapiens
cacacttcgatcgcggagaatagggtgattgttttctcacctccagttcactactttgaacaggcactgtgctaggtgctgctgttatagatatgaaaagaaggcatcatctcctttctaacaactcataggagcagccattcctgattcatacgcaggtctcttgattctcagtgctcacttttgcaagcttcacttaatgccgtgtaaatcaccctattctccaggtcttctttttcccacttctccgcgatcgaagtgtg

SEQ ID NO: 244656 - DNA, 438 bp, Homo Sapiens
acgccgcatcttcgtcccatcagtgtatcagattatgtcccttatgtcaatgctgttgattcaaggtggagttcatatggcaacgaggccacatcatcagcacactatgttgaaagggacagattcattgttactgatttatctggtcatagaaagcgattccagtactggggaccttttgagccttgagctctcagcaggcctagagcaactcattacttgttcagagagaggccaatagctttggccatcgcatacagaagtggatttccctggatgaaggccgtctactttaccttaaacgcttttaagcaaggataattgaactaagtaatggtgagttacagacgtgattatacagaagatgcgactagatactaaaccttataggatatcgagttagagctttcagcacttgatactgatgacctgatggag

SEQ ID NO: 244657 - DNA, 136 bp, Homo Sapiens
tccctagtcactagtattctgtcatatcatcttgtatctcccacagtccctaatatgcaggtttctataaagatctgctgattcactaaccaaacacctcaaaagatgttacagtagagacagatacattatacgg

SEQ ID NO: 244658 - DNA, 360 bp, Homo Sapiens
tataacataacttggttccaagcctggtacttagaactgccctgcattgtcaggctccccctttgccaggtggtgcctccctaatctgaaatcatggactgagtaccttcaaaagaaaaattaaaccaaagatcaggaggagatgcttctgacttagtgagtctagaagaccctggcctcccttgcccactctgcccagaaactgaatcccagagagatgaagttatgggtttcatacctgtgtctgcccatcaacccaagggggacaaatgccaacatagaatgacagagagggaaggaagaaagtgtttttcctaattcattggctctaaaagtggagaggaaccaagttatgttata

SEQ ID NO: 244659 - DNA, 365 bp, Homo Sapiens
tataacataacttggttccagatcttacgcttttaacttcttggttattttgcatccctcattagtcagatacagacattcaaaagcgaagcacatctgaaaaatctaggaccataatctttataaattaaaaaagctaagagcatacatatccacagaatttaccacttgtgggtgtttagctgtttggcttcaaacacacagaaatctcaaccacattttcccaccacctaccacacaaatcccttttcccccacttaccagtagaaacttttggtgaggtctctggacaaaagtccaaaaaggcaaagcctactcaattgctcatcggtagctgagctgaagaggaaccaagttatgttata

SEQ ID NO: 244660 - DNA, 383 bp, Homo Sapiens
tataacataacttggttccatttatttctagtagaaagtttgcttgttcaaattaaggtaactgtcaactctagccacacctgtgtcctcaccgcccactgtcctgaacaaggcagcccccacacctgactatgcctaccatgctcccctctttagtcctgggaaggctattcagttttctggaggtttatgttcaaatcttgtttcctgcttggcaacatccccagaccaatgagactgagctctaagtggtctctgattcactggcacctggcatctgaaccactcacctgcacctgtcctgctaccagctatgcttccactagtaagcaccttgctctccagctcacagttctttatggtatgaccaagtatgtataccg

SEQ ID NO: 244661 - DNA, 509 bp, Homo Sapiens
caggaccagtcttataaatagagttttacagttacatttgttgaagtgggaggttcagtaaagtggctactgcatgccaattatttctccaatctaatttatgagggtatttatccatgtagaaagggattagctatcccaattggattttgcatgttaaaataattagataaccacatacttccgtgaattgcactgttataactaaaactatttgtagatataaaatattaaaatggattttgtcttacatcttgactttatgcatactagttatatgagaaaatccagtcatgatttgattggatggaacttatttgtggcctcactgaaaatctgaatgagccattaattgcacagaatagagggacaaaccaaatacccacaaggacttgatgattggtagttttgctaaggagagtatgcattgttacctgagaggcgaatctttagaccagttactagagctgcttgtttttgttaagactagtcctgggggtcctctagag

SEQ ID NO: 244662 - DNA, 561 bp, Homo Sapiens
tagaggaccccgacaggaacacttagagattgactctgctggagaggatggcatggagggcagagtgattagggcagagtatggtgctggactggggcttgtaccgacacggaaggagttgtgagaaactggaggagatagaaatcaagatgaagaatgttacagttatacagacataactttggttcaagcttggttattctcttgctatggagacctggagtgggtagacatcagagatgtgtttaggcaaagaaatgggatatctagcaagtgtcaaagcagaactaaggattggggtgaacaaaagagtgatccagtgctctcttactacatactagaacccaaaagtgttgccttaaggaaaaggcacttgtttggaggatcccttgaccttacactatttgggaatggttggacctgaaatgactttgctgctgatgttgaacaagtctccctccaaacataaggttgtagacaggctagtttgcaaggagtgctaaggatgtctccacagaatgtttcctcttgggcttttctttcagcttctctgttatctgt

SEQ ID NO: 244663 - DNA, 407 bp, Homo Sapiens
  misc_feature (207)..(232): n is a, c, g, or t
acctgcctgtcaggaagaaatcctcttcttctcccagaaatcctgcacctgtagcaacaggtgccatttgcagagggtgccactgccttcacaatccctttctaggcactatttcctttatttttgccctgatatggcaacccaaaagtcatgcatttttattatttgtttttcttaaaaatcacttccatggaaatacagaagtgnnnnnnnnnnnnnnnnnnnnnnnnnnaacatagagtcctgaagggaaacactcagaaagtttgcagtgcctagaaaggtacttcagacacaggccgttaacaaaattcacactaagaagggttgacccatcaaggctgaggaccactgtagtgtttttatactctgataaggcatgacttgccttctacgaatactgcatt

SEQ ID NO: 244664 - DNA, 348 bp, Homo Sapiens
cggggagacaatgagtaaataatacagctcttgatttcaagaagctaacaatgttctagaagggtagaaaaagaagtaggctatctcacctctatgtagtaagtactaccaaaggggtgtacaaaaggctatggtacacagtggggggctacctaaattctcaggtggagtgagaatggcaagggatagaacctacatataacccactactgtgtgaataccagaaaacggagattagggttcatcttagggtctacttgttgtactacatttatggccaccttagtaatatactttctgactagactggacaatcctaatcacttcagtttactcattgtctccccg

SEQ ID NO: 244665 - DNA, 375 bp, Homo Sapiens
  misc_feature (167)..(167): n is a, c, g, or t
caaaggcgttaatttccattcctctgtaaatgacaggatttagattagagtctcctctgctggaaaaatcacagaaaaacacatgttctagcagattggaactctttcaggagataaaattgataggtaactaaggcagaaatagaacaaggctccatgtcattagntggaggatttccccggagtttttatcttggaaatttcaattggttactaggaaaatgttaccaagccagccaaaggcactgagctttctccttgtatatggcaattcattcggaccctagctgaatacacagggtaggatgcataatcgtagttggtgtgcatgcactttttaagggcattgtaattctggaaattaagcctttgcaa

SEQ ID NO: 244666 - DNA, 488 bp, Homo Sapiens
agaagatcttctccgaaaggcaacatggtaagatgaaccagcacagtgccttaggtaagaggcgcctgggaattgtaggcctcagatccttcgctgtaatacagagataacagtaattcctcaaagaggtgtgaggattacatacactgatgtgcacaaagacgtggaacacagtgaccagcacagaatagacatccaacaaacatcagcctctgaacgcagcttcaaaccaccatgcctggcagaccaggccacggggagaggtcacagaagtgggacacactggagtccatgatacaggattcagtgggacacaaagatttgagtttcaaagacctttggctcaaaactgtctagtggtcgccacatcgtagaggcctacctgaaacgcaaggtttggcaatctcaaaaagtactgtccctgtctccaaatctcgaattttgaagcgggtgaaatctatactgtagatgttgctcttcggagaaga

SEQ ID NO: 244667 - DNA, 288 bp, Homo Sapiens
tcttctccgaaaggcaacatgaactacatagttgaggaaaaccatgaactacatagttgaggaagacgggttttgtctgaaaggatttagagaccagccagggagacagccaagaaaatcaacaaccatcatgcagttatggtagaaatagaagctggatgctagctactgcagcatcccagcagactgaggaaggtttgttggaggagaagatgcctgcactgaatatagaaagactgaaggatgcaggaatgttgcctttcggagaagagagatcctctagagcac

SEQ ID NO: 244668 - DNA, 361 bp, Homo Sapiens
tcttctccgaaaggcaacattgatacaaggaataaaaattagaaaatacaaaagtaagtctgtctaatagagacatttcaacagcaaatactacatacattacggtaactaaaatgtgggtctcaaaactacttcttacttttaacctctgaatccactggttttgtcttcaatacaacattttttgccaaagggagtcttatgggctctgttgtgggtgtgtctttgagtatataattatcatcacctctatgctcacacacctttctcttgcaaaaactctaatattgacatcagccggatgtcagcaaaatgacatctttctgaggctgaaggtttgcatgtggcctttcggagaaga

SEQ ID NO: 244669 - DNA, 577 bp, Homo Sapiens
  misc_feature (356)..(412): n is a, c, g, or t
cggtaccccgccattatagccatgtgaattaactgtagcaaagtgccctttttcttcaaattgctccccctccccaggatgacacacttcatgtcatagctgaaccctactctactggattcaaggccagtaaatgcaatttagagaagcagttttatgtttgcagatattctgagtctcttcaggatgtgtttcgtgtctaccatatatgcaggataaattctttaacagcaaactccaaaggaatgttgaagctgttttagcaatgaggatttttttgtttgagtgttgaagtgggccatagtcctttagaaatgatgttcatttatgataggatttaacttctaaggcatagnnnnnnnnnnnnnnnnnnnnnnnnnnnnnnnnnnnnnnnnnnnnnnnnnnnnnnnnnatataacttttatcctccagatcttaagctttcttttgctctcttcagcaatttaagagactattaagctgtcgtcttcctaaaagctattttggtatccactctttcccaaaaattctccaactttgtggttttttaaagagtaaggtaatcatcttcgtaaag

SEQ ID NO: 244670 - DNA, 469 bp, Homo Sapiens
gctggagtggcatataactcctaagactcttggatctccaaagtgatgtctttttgtgtgctaatgagttgccagatggctggcagctcctaggtagcttcaggatgggggctggtcaccagaaatgattagacggttgggacttttggccctagccccatcctttagagaggaaaaaggggctcaaggttaagttgatcaccagcggtcaatggtttaatcaattatgcctacctaacaaagcttctataaaaactgcaaatgacagggtgtgggaagtttctgaatagttgaactcatgaaagttcctggagggtggcatgcctgggagggtataaaagctccacgtctaatttttatctcttaccctaggcatcttttcatcaataccctttgtaatattctttatcataaactggtacatgtacgttacaagttaagtgtcttcctgagttatatgccactccag

SEQ ID NO: 244671 - DNA, 1505 bp, Homo Sapiens
  misc_feature (368)..(422): n is a, c, g, or t
  misc_feature (477)..(577): n is a, c, g, or t
  misc_feature (752)..(968): n is a, c, g, or t
gggtgtggtagggggttgcagcttgttccacacaagcacagttcacctgtgtggcatttccactgggcattgagattcagaaatcatgaagatagaaagcttttacccttaagcttttcataacttgtaagggagagtcgtataatcacttagctgtgtctgtggaagttacctttggactctcactatcatctagtgtgtctgtgattcaggcagtgggtcattttcagaatttatcatgaaggccatttcctgatagtatagagaggtcacacttcactcgcttagcacaagtctatttttaatgtttccgggttcaggttttttgttatgtttttgttgttctgagatagagtctcatctctttnnnnnnnnnnnnnnnnnnnnnnnnnnnnnnnnnnnnnnnnnnnnnnnnnnnnnnnctcggctcaggtgatcctcccacctcagcctcccgggcacatgccaccatgcctnnnnnnnnnnnnnnnnnnnnnnnnnnnnnnnnnnnnnnnnnnnnnnnnnnnnnnnnnnnnnnnnnnnnnnnnnnnnnnnnnnnnnnnnnnnnnnnnnnnnncaggcatgaaccaacacgcccagccagtttcagtgatttttgcagaaatacatactcattttagaaagtacaaagagattgaacataagagctcactaaccagagatgacccattatggtttaaatttctttgtatatgtgcctaccttttcctgtgtgtgtatatttaatacannnnnnnnnnnnnnnnnnnnnnnnnnnnnnnnnnnnnnnnnnnnnnnnnnnnnnnnnnnnnnnnnnnnnnnnnnnnnnnnnnnnnnnnnnnnnnnnnnnnnnnnnnnnnnnnnnnnnnnnnnnnnnnnnnnnnnnnnnnnnnnnnnnnnnnnnnnnnnnnnnnnnnnnnnnnnnnnnnnnnnnnnnnnnnnnnnnnnnnnnnnnnnnnnnnnnnnnnatataaatactaaactttgaagtagaaaaactggaagtagatggtttaaacataaagtgtcttggtatagacaagggttctcccactgctcatgacgggagcattattgtaaagcactgagaatctggtacagtgtcattttcgttgctctgttccactctacgaatctgccatcatttacagtcccctgttgcgcatgtagatcatttttgaatttgttattggaaaatactgcagcaaatacctttaagttcacatgctgtaaatctacttttatagttaaaatttttcaaaaggaacacaagagatggttttttgtacatttttgtgcttaacttaccactgactcttcttttcatggtcaccctgggatatagacccgtaatcgacaaaactttgaacgaagctgactgtgccaccgtccccccagccattcgctcctactgatgagacaagatgccggtgatgacagaatcagcttttgttacttatgtataaatagctcatgcatgtggtccatgttcataacttggtctt

SEQ ID NO: 244672 - DNA, 1505 bp, Homo Sapiens; identical to SEQ ID NO: 244671
  misc_feature (368)..(422): n is a, c, g, or t
  misc_feature (477)..(577): n is a, c, g, or t
  misc_feature (752)..(968): n is a, c, g, or t

SEQ ID NO: 244673 - DNA, 829 bp, Homo Sapiens
gggactgcgcggaggcgactgcagacgtatcgggggtccggagcctgtcgcggctgctaagcgctcggcgcctggcgctggcgctggccaaggcttggccaacagtgttgcaaacaggaacccgaggtgttcacttcactgttgaaggaacgagagggcatctgctaaagtttcagattccatttctgctcagtatccagtagtggatcatgaatttgatgcagtggtggtaggcgctggaggggccggctttgcgagctgcatttggcctttccgaggcagagtttgatacagcatgtgttaccaagctgtttcctaccaggtcacacactgttgcagcgcagctagaaaattatggcatgccgtttagcagaactgaagatgggaagatttatcagcgtgcatttggtggacagagcctcaagtttggaaagggcaggcaggcccatcggtgctgctgtgtggctgatcggaccggccactcaatattgcacacctcatatgggaggtctctgagatatgataccagctgttttgtggagtattttgccttggatctcctgatagagaacagggagtgccgtggtgtcattgcactgtgcatagaggacgggtccatccatcacataagagcaaagaacactgttgttgccacaggagtcaagaaacttttcattttgagctattgacagcttttaacaagttattatactcctattgaacaaatatttggagcatatttgtatctctctgcctgattctcctgaatttggaaactggttgccctggtctccatgacctgattattgtgacatgggcaggaagaaca

SEQ ID NO: 244674 - DNA, 477 bp, Homo Sapiens
ttcccccaggatatagggtgggactgtctcatgggagggtcttcagatccacaatgagaaaggcagaaaggtgggagtacattagagtgaaaggaaggcaggagaaggtcagaggcctgtccctgaggcctgacacccccaaccatatgactaaagactctaacacgggatgcgggacttatatgccactccagcgctggagtggcatataactccatggctctgcagcaagactcgaataggctggtggtgacacttggtgtgaccacagtcaccttcaaagatgccattaagggttcacaagaaaatgaagggaaacagaaaaactgattatgaaagttgttgcctctcctgcttcttcatacagagtgtgtatgatattgctgtgtgatgttagactgcaacttagcccaacagctgttctagtaattggcagtttctcatcgagttatatgccactccagcgggtcctctatg

SEQ ID NO: 244675 - DNA, 318 bp, Homo Sapiens
taactctgttactaatatatagtgctgtcttggtaaatgttttaaaatttagataatttatttttcttcacatttttcttagtatggttcttctgtgtcacacaataggaaggaagtacagaaatgaattgtttttgtaaacctcacttcttactaactatttgtagtgtgagtttcaagagaattgttgtttttctcgattaaaggggagaaatggaagtaagtgtgaggcaacttaatctttaataacagagctggaagttaggaatggatagctacagtaaatgacttctttttttgagttatatgccactccag

SEQ ID NO: 244676 - DNA, 352 bp, Homo Sapiens
taggatcccccttcaccttagaagttgtggacagggggcaaccggagtgagtgatctgttgtctgtggtggaggagtgcggattcgcagggtcacatgtgccaagaaccatgatgacccttgcgatgtgacaaggaaacccaacagccgagctctgtgtggcctccagcaatgcccttctagccggagagttctgaaaccaaacaaaggcactatttccaatggaaaaaaacccaccaacactaaagcccgtccctccacctacatccaggcccagaatgctgaccacacccacagggcctgagtctatgagcacaagcactccagcaatcagcagccctagtcctaccaca

SEQ ID NO: 244677 - DNA, 372 bp, Homo Sapiens
  misc_feature (181)..(190): n is a, c, g, or t
attagagaatctcgccaggagttatctgagggcctcacaagaaaacgcagactgaccaactgtaagaataagctgttagttttaccctaattatcaaataaaaaagaaaagatgttaagtagtattattacaaagtgcattcaaagtcataaacatatgtaaattttcaccaggaacttgnnnnnnnnnnaagataatttctttcaaattttctggtttatgattcacaaccatccacattgcttgtctgctatctctctggtgtatcttaccagctttaatacataaaaatagagagcagaaattttgcagcagtaacttctggtcagtaatatctacacctgtcctatttctctcgaccatggggccggc

SEQ ID NO: 244678 - DNA, 286 bp, Homo Sapiens
atcccagtggtccgagagaaattaggatattaaaagtgtacagtaagaataaatggaaaaaataaatctccatgcttcagtgtgcagaacgattaaatgcgaaccatattgaagtactgtgctagataaatacgtacttggtatattactgtgatggtaagtacaatggttgtgttgtagaaagggaaccagagtatgaagaaaatcatggggactcaaaagtacaagttccttgaggacatctatacaggcatttctaatttctctcgacaaatggtaccgagcc

SEQ ID NO: 244679 - DNA, 322 bp, Homo Sapiens
ctaatttctctcggcccaatgcattggtccgagagaaattagcaatattaattaagccacgctgaattttaaggggtgaagggttcttttgagtattcaacacaatgaatataaaatgcttagtatggctgctcatcactgctgatggctggtggcagcagagaagtagtattaacaacagaagctatattaggtgtgggccagaaagaaatgttatgtttcttatactaaaatgtctttaaggcctttgtatggagattgttagaaaccaagtagcacacctctaatttctctcggaccataggatcgtctaggtcacctg

SEQ ID NO: 244680 - DNA, 259 bp, Homo Sapiens
cattggtccgagagaaattagaatcttaccagaatgatgtacttatacaacttgcaaagttttatgtgtgctccttggaattattgatgtccccgaagtccatccttagattctgagatcaaaatgcctcttacttttagcacatggcaggattttaggagcacctggtatattgctgcttattactggatatttgccaagttgcctttgttttagcagtaacataaattaagaggcactaatttctctcggaccaatg

SEQ ID NO: 244681 - DNA, 439 bp, Homo Sapiens
ccacccattggtcgagagaaatagcattttcttttaaccagtagattaaaaccatacagatttctatatggagagttgctgagaaggttgtacacatttggaatttacatctagatgtgtaattagtggactctaaacaaagctaagtaaaatctataatatctaagatatacaagtctttaaaaataacagtttgggttcacagatactggagtcttcggattgtagaccttaagtcttctttctccacttgaatctgattgttcctggcagtgtgtaaagtgatcggttcattttggtgatttatttaattaagactgtactacacattatagaataggctagatcctaaagacataatgtgtgttcttaagtgttcagtaaacacgtaggcctttttggtcacttgtccaccatgtctatttctctcggacctatg

SEQ ID NO: 244682 - DNA, 236 bp, Homo Sapiens
cattggtccgagagaaattagaaaggcatcattcatttaacaaagatggaaattcacatcaaacgttccttgaccaggcagctattccctgctattcccttagaacctttgttttaaagaaggaccctgaaatgtcactgcttccaccaaagtctatgaaaaggttactgaactgaagataagggtgcatggctgggtccaagtgggttctcacgctaatttctctcggaccaatg

SEQ ID NO: 244683 - DNA, 260 bp, Homo Sapiens
cattggtccgagagaaattagctattaagctcttcctcaattaatatctaacctaactgagaagaataaaaggtatgattcagaaaaataagtcagaatatgaattataccttctttttcagcattatgtaacaaaaaaattttgcccatatactatagccaaacaattacacttatttgctgaagaataaccacattttgatggaaagtaactacatccaccgcatggtcacagtgatacctaatttctctcgaacatg

SEQ ID NO: 244684 - DNA, 556 bp, Homo Sapiens
  misc_feature (251)..(278): n is a, c, g, or t
atccaccctttggtgccgggcggtggtcatgagtcacgggatcggggtcatcctggctgacctggttaaccccctcttttctggttataccaaatatttctccggcgccgttgcgggcgccctagttcccgctactgagggggctgacgccggagtacggcctgtgaccccggaggcggggcttgttgagagccgggattgtgtccccgcaatcccgcctgggtggcagacagagcgagactctgtttccnnnnnnnnnnnnnnnnnnnnnnnnnnnnttcatatgatgaagccctcaccccccaaggtgaggatactgggaggcgtggcctttaggagagaattaggtttagatgaggtcatgagaatagagcccctatggtggcattacttcctttataagaagagacactagagctgcttttctccctaccatgtgaggataccgagagaagatagccatttccattctaggaagcaggccctcttttatatacacaatttgccaacactttgatcttgcacttccagtctccagaactgtgagaaatatctg

SEQ ID NO: 244685 - DNA, 987 bp, Homo Sapiens
cattccctccaacattcctccgggaatggtcccccctccactccacagaaaaccctcccctccctgctgtgcatgacgcgggctccctctgcacacagtgcacgaagacgctgtcgggagagcccaggattcaacacgggccttgagaaatgtggctcttgtacctcctggtgccggccctgttctgcagggcaggaggctccattcccatccctcagaagttatttggggaggtgacttcccctctgttccccaagccttaccccaacaactttgaaacaaccactgtgatcacagtccccacgggatacagggtgaagctcgtcttccagcagtttgacctggagccttctgaaggctgcttctatgattatgtcaagatctctgctgataagaaaagcctggggaggttctgtgggcaactgggttctccactgggcaaccccccgggaaagaaggaatttatgtcccaagggaacaagatgctgctgaccttccacacagacttctccaacgaggagaatgggaccatcatgttctacaagggcttcctggcctactaccaagctgtggaccttgatgaatgtgcttcccggagcaaatcaggggaggaggatccccagccccagtgccagcacctgtgtcacaactacgttggaggctacttctgttcctgccgtccaggctatgagcttcaggaagacaggcattcctgccaggctgagtgcagcagcgagctgtacacggaggcatcaggctacatcttcagcctggagtaccctcggtcctacccccctgactgcgctgcaactacagcatccgggtggagcggggccttaccctgcacctcaagttcctggagccttttgatattgatgaccaccagcaagtacactggccctatgaccagctacagatctatgccaacgggaagaacattggcgagttctgtgggaagcaaaggcccaccgacctcgaaaccagcag

SEQ ID NO: 244686 - DNA, 540 bp, Homo Sapiens
gggtgtggtcgttctggccaggtggtgtctcgttctactccaatccagtggctcccaggcatgatctccagtccctaagccaggaaacccagaaaacaaccgtagtttctttgggtggttttcaaaccacagctccattgagtctgacaagattgtggagataatcaacgaagaattgtggcccaatcccttgcagttctaccttttgagtgaaggggctcgtgtagagaaaggaaaggaaaaagaaggcaggcaaggtccaggaaagcagccaatggagactactcagcctggggtgagcctatccaactgatcctgcacaagtctccctgctacctcctgctgggctgctcctggttgactacatatttggctctctgccttctcttcatgttggcctctgtgtactatagaccctttggactttagttacaagaatatggcatttatgatcatgttcttttgcctcccatagcctcttgcttttctacgttagtgtcacatgttatgtgatcgcacccggactggtcatgttctgtg

SEQ ID NO: 244687 - DNA, 518 bp, Homo Sapiens
atgcacccattccgactctagaactccctctgctcccagttgaatgagggtgttaatatttatacaactgaggctccaaatttaccaggaagcttcagtttcctaggttaagcctgggtaggcgccttggagtagagccacccttctttccccttggacaagtagggcccagtcacctaatggtttggggattttgtggggtagagtaagttctagagtgggaatgagtgtgtccctggcctaaactacctgttcttgcaggaggagctgacaagcacaaatgtggaacacatcattgtcaatcctaatgctgcctatgacaagttcaaggacaagagagtagggacaaagggacttgatttctcagatcgtattggaaaaaccaagaggaccggatatgaatctggagaatatgagatgcttggagagggtctgggagtgaaggagacaccccagcaaaagtaccagcgcctacttgcatgaggtccaagagctgacaaccggagttgaaagacgca

SEQ ID NO: 244688 - DNA, 403 bp, Homo Sapiens
  misc_feature (46)..(80): n is a, c, g, or t
cacagaacatgacccagtcccaaataaatatcaagaccctgtctcnnnnnnnnnnnnnnnnnnnnnnnnnnnnnnnnnnngacatagcaatactccagtatagcaggtgccagcaaagtgaagagacttaggttctgaagtataaagctgtgaacatcaatccaaagatgccccatctattgtgcttataacatcaacatgtcataagagggcaatttccatgtatcttctcacttcaaattatatccttaacagggcattttattgaacaggagagaaacactgaagtgtgcaaggattaaccagacgtggtgaggtgttgcacagaaattcctacaccaccatggacagcaagacttctgtcccctttcatttcagactggactgggtcatgttctgaggg

SEQ ID NO: 244689 - DNA, 584 bp, Homo Sapiens
actgaacatacccagtctccttcaagaggcttatttttttcaccagcggcttctcaatggcctgaaagctcagctgactcccacaaagtttgccgggaacacagggctgtcagtgacattcctggcgccaagacttaagcacgtgggttgcacgcatcggccagtgtctgtgccacgtacactgacgccccctgagatgtgcacgccgcacgcgcacgttgcacgcgcggcagcggcttggctggcttgtaacggcttgcacgcgcacgccgcccccgcataaccgtcagactggcctgtaacggcttgcaggcgcacgccgcacgcgcgtaacggcttggctgccctgtaacggcttgcacgtgcatgctgcacgcgcgttaacggcttggctggcatgtagccgcttggcttggctttgcattctttgcttggcttggcgttggtctcttggattgacgcttcctccttggattgacgtttcctccttggattgacgtttcctctctcgcgttcctttgctggacttgaccttttctctgctgggtttggcattcctttgggtggactgggtcatgttctgt

SEQ ID NO: 244690 - DNA, 439 bp, Homo Sapiens
  misc_feature (69)..(101): n is a, c, g, or t
gcaggcgcgttgcatgcatcggccagtgtctgtgccacgtgccctgacgccacctgagataagcacacnnnnnnnnnnnnnnnnnnnnnnnnnnnnnnnnncggcagcagcttggctggcttgtaacggcttgcacgcgcacgacgcacgcgcataacggtttggccggcctgtaacggcttgcacgcgcacgccgcacgcgcgtaacggcttggctggcctgtaatggcttgcacgcgcatgctgcacgcgctttaacggcttggctggcctgtagcggcttggcttggctttgcgttcttggcttggcttggcgttggtagcttggattgacgtttcctgcttggattgacgttttctctctcgtgttcctttgctgggcttgaccttttctctgctgggtttggcattcccttgggtggactggtcatgttctgtg

SEQ ID NO: 244691 - DNA, 439 bp, Homo Sapiens
agaacaacccagtcccatggagcgggagcagtgtcagagagcaacaaagcatatctcaggtccacggccattggaagtgcctcctctgttcctctgcggccacgtggacactcatctctgcctttctctgaggatctgttctagcctcctctttgcagcccagctccctctgtgtgctcttgattcctgccttctcacactgttggcttgccctgctgggatgttggtgccagtccctgtgatgtgatggttccagtgcccagtggcatcagcaccatcatctctgcgccttgtctttgtcatcatttttagatactaggacttgtccttttcctgggccaagcgttcagccctggtcagaacaggggcctgtgcgccggatcaagatagctgctcggaaaatcccttcatctggggttggactgggtcatgttctgtg

SEQ ID NO: 244692 - DNA, 757 bp, Homo Sapiens
tccagcatcgatcgaccgaccccatgttgttgcacggtacaataaatcagccataagtggtattcagcatgagcactgagccgtatgttagggtgtatcctgactctgtccccgggagaatactctggtgtttcagattgtttcaggtattggttttgtttgtggaatcccctggtaacctggatccgtcactgtttctcagccaggtcaaagcctggtggagctggactgggaaagcttgcactcaggccccccacagtggtgtaattgtcatgataggcggggtggaatgatcttcaggctgctggcagaatgcttgggtgagggatgagtgccactgctgagatcctgccatggggaaatttggccttggtcccaggagtgatttgtgttcctttcatgccccagtccaggcggagttccttcctcttgtccctgctgttcagtcagaactcagcagttcttgcctagtccctaaatcatcccagggtcgggtcatataagccccatccagctcaagacttaagcctccagggcaattaatcgtgctcaaatcctgggggtggtgtttgcttctagcactggtggtggctgcatcccacaccaggcagagccaccccatctccgcccctactcacactctgcctctccaaacagcagcccaagtttccctaatggctaggactggccctgttgcttccccgtactgctcacagttatgagctgagatcctgcaatcatgtcattgctacagtgc

SEQ ID NO: 244693 - DNA, 537 bp, Homo Sapiens
cacagaacatgaccagtcctagaaaggagctttctaaattatagtttaattagtgtaatccaagaatttatgggactttggaaaagcagagcgctagaagtgccacctttcggaggtcacggatttagtcaggtgacccagcaaactcaactcgttggggttagagatggagaattagaaccaaagctgaatcactttctgcttatcactcatagactgccagattttctttttttggttggagggaaagcaccttacaacaaataataatactattttgaatttcagagctttccctttttcaaagcactttaccacctctgacttattttgtcctcctaacaaggccataagataaggaagggagggctttttagagcctgtctaacaccctaagacagagcttaatattgctgaaggcattgaaaagtataggttttgttctctcatccctggccacactcaagtacttagtggcacaacttgaagcaaattgacatagatgtttaatcctacagtggactgggtctttctgtg

SEQ ID NO: 244694 - DNA, 340 bp, Homo Sapiens
agcctgcaggtgaaaccatgtgtttgggagaacatgacttagctctaggcctcattcacactccacagctccagggtcttcctactgcccaataagcacaatcctgcagacatggtcagacctgttggtaacattgattggtaacattggcaactgattggtaatgttgatgcagattaccggctttttatactgtaattcagaccagctctaagtggtgtttggataggtatacgaaaggcccgcagagagccttcggctggatctctctcagtgcgtatgatggattatgggacgagggacgagatgaactggactcggcggactggatcattctatg

SEQ ID NO: 244695 - DNA, 336 bp, Homo Sapiens
ctgttgcgaggaatgctgaggaaaatcctgaaagtgaagagggctttgaaagcggagataggtcagaaagacaatggggagatttaacagcagaagagtgggtaagctatcctctccaaccagtcactgatctacttgtccacaaagaagtccacacaggcatccgctatcatatatgttctcattgtggaaaggccttcagtcagatctcagaccttaatcgacatcagaagacccacactggagacagaccctataaatgttatgaatgtggaaagggcttcagtcgcagctcacaccttactcagcattcctcgcaacaggggtaccgagctc

SEQ ID NO: 244696 - DNA, 453 bp, Homo Sapiens
atgagcactctctacttctatgagatcttttttaccttccacataagtacagtacatggagtatttatctttctgtgcctggcttacttaacataatgtcttctaagatcatacatgttgctgagaataacagaattttgtttttttaatggccaaatagtattccacggggtatatataccacattttatctgttcatttgctgatagacacaggttgattccaatcttgggtactgtgaatagtgctggaacgagcatggcaggtgcagatgtctccatatatggattttcttttggatatatacccagtagtgggactgctgaatcatatggtagttctatttttagtttgttcaggaacctccatactcttctccataacggttgtacaagtctacattcccactaacagtgtttaaacgttcctttgcctcagcattcctcgcaacag

SEQ ID NO: 244697 - DNA, 313 bp, Homo Sapiens
agcctcgtagctgcagcatcatgtcagcacagccatgaagtgccctctgctgtccctgatggtgcaccaggtgtagccgggcatccaacagcatcacggtgtcctggccgcagcccgaccagaccaatgggaacatcctggactatcagctccgctactatgaccaggcagaagacgaatcccactccttcaccctgaccagcgagaccaacactgccaccgtgacacagctgagccctggccacatctatagtttccaggtgcgggcccggactgctgccggccacggcccctacgggggcaaagtctattt

SEQ ID NO: 244698 - DNA, 306 bp, Homo Sapiens
cgatccatccctttcccctatgcttctctctccccaaaatggccgtcctgcctgtgaacctctctagaagctgcccagaaatgccatggttccatggaatacactctgagatacattgctgtaaagggaaaagcccagtgattgtgatttggagtttgtggcaataggtaatttgaaggttctgaccattctcaaaatatgagcaataaggctgctatgatatggcagacctacactgtgaaatgttaaaagaaatgatttaagatggtaggtttacagcagagtaagcctattatgtggggaagc

SEQ ID NO: 244699 - DNA, 413 bp, Homo Sapiens
ttccccgataatgttctagtcgttttcaaatacattgtcgcatatgatcctcacaatccagtgaggcagtggggtgacggcgaaaccaaaacccacagtggatgagtatctatttactacgggcacgtggcctgcaaggagcagagggaggatgagaacccagatctttcaaatgccagcccagtcatgtcgccggctaactagtctcccgtacccttgcgtcgcccaaatcttccctgctttacaccttttcttttctccacgctacgcttatatacctggcacctgagcactaccggtcaccagggacaggagagccataactttacagtaatactcattccctgagggcttttgaggttggaatgtgtaggaggctttagggctgtttctgagggagactccccatgtag

SEQ ID NO: 244700 - DNA, 128 bp, Homo Sapiens
tgtattgcactgaatggcctctccctactctgcagtaccaagtgacaacaatattgctagtcatctatttttttaatcatgtgattttcttacaaaagacaaggacaattgctcagattgttgtttcc

SEQ ID NO: 244701 - DNA, 343 bp, Homo Sapiens
ttcatacacggatccccattttatctgaaggctgcccaattttgagatgagttatccctagctcatctccttttcttcctgccttgtccctatctctcctgtttcctctctttttgcctttgttaattgcaaaatttaaattgagactggaataatccttagcaaacaaaaccacctggcccttagaaatagctttaatctttgtcttaaactacaaacaccagctaaacttcacggggtcatattacatacaagcataagcaaaacttaacttggatcatttctggtaaatgcttatgttagaaataagacaaccccagccaatcacaagcagccttcagat

SEQ ID NO: 244702 - DNA, 332 bp, Homo Sapiens
atatgtattttttatttcctagctcttagcatttctcacctgatcattataactttaaatttaaacagaatacaaattgtgtacacagatggtgtgtcactattgcactgtcacttatgtaagtgcagtttagcatttcttctttccttttaatcaaaatgaggaaatagaaaatgttttgttatggtagttttacacatacacccacaaggaaatgtgtatctagagtctgtgggaactgtgactgatacatttcagggaataaaatgtatgatggctaaaattttaactctgccaaatgttcacggggaaataaaaaatacatatcggta

SEQ ID NO: 244703 - DNA, 342 bp, Homo Sapiens
atatgtattttttatttcccatgaaggagggaaggaagtaaatctaaccttgttcctctcagagaagaacactgaaactatattaacatgaagtagaaacatgataattgatatgttatatttttcagccactttcttttaaaaagacagaacaagtatttgttttccgagttaacagatcagaataggcagtttgtctttttatgaacaggaaaaacgaggcttgtctaccgctaggcagaaaacagaaaagaaggagtagtccttgctgtcttggttcctatcaggcaagtagaccaggttgcttttcaccctcgaggaaataaaaatacatatcggtag

SEQ ID NO: 244704 - DNA, 334 bp, Homo Sapiens
tggtaggccgtattctcacagttacccccaataaccaactccaggtgctgcctctgaccccttcctgtggtggtgacccatggggtgcagattgtgcactccagcggggagctgtttcaagagtaccggtacggcgacatccgcacctaccatccccccggcccagctcacacacactcagtttcccgccgcttcctctgttggcctgccttcccggaccaagacacgctgctcagggccctcctcctgaaggtgagcccctgcagcctcctcagcctgtgcagtccacacagcctgcccagcctgcaccaccctgcccgctgaagatgatgtt

SEQ ID NO: 244705 - DNA, 249 bp, Homo Sapiens
aacatcatcttcagcgggcctgctgaacatgccctgtggattcttctgggcagaagctcactgctgagctcccagccacttcatgcataaatcaggcaagaactaaccaatgtcaggggcgagagcatcctactccccataaaacagcgggcagctgacttagcaaccccaccactcctgccgcaagacaaggacagagtctcactcatactccctgctgactcaggaaggtctgagctcacccgcgaa

SEQ ID NO: 244706 - DNA, 675 bp, Homo Sapiens
acgctgcaccgcgcgtatacaggcttcgcgagccgtggcgataagatcccgagccaaaattgagaaaattcgagcaagtttatttaacaataatgacttgattggttcgtcaagtttggatggtgaagatgaattgatggaaatgtcgacagaagagattctaaccgtgtctgtagttcatcagagtctctttgatactcaagggagcccagggttagaagattatttcaatgataagtcaattaaaggggagaagctggtgcccggagccagagaggttctgacggagatatttaagagttgtgcccattcagagcagacgctgagcctgacaccagcgaagcccatcagagtctctgacatttatcttagcaaagagcagatcaactcccagaccccaggcaacctcctccacctcttcttcaccaatgtccggccgcccaaaaaggtgctggaggatcagctcacccagatcctgaggaagtatggcgtgccaaagcccaagtttgaacaagagcaagtacagcaaggccgggaacgagcagcaccccgtgaaggtggtgagcaccaagcggcctatcaccaagccgcccgcaagacaaggctgtgctcaacagcgtcaaggactgcattaagtgagaagaagcatcttcagaatcaaatcagggccgagcc

SEQ ID NO: 244707 - DNA, 436 bp, Homo Sapiens
cctgatttggattctgaagatgttgtctaaatgctacaattcctgaaagaaagcaccaagaccaaacagtttaactaaaatacaaggcctttcagtgaccacaggtgaccacaccaacatggcaagaaactgctctcctacgacgcgagtttcaaaaagcagaggaggaagtgctcaccctgggtgagggaggtatctgatgctctgcggccctctctgaagctcactggagacctgttgtggacctctcgtttctgggagctcagagcctgcatggctgggttggtaggtctcaggcttatgaagggagatgtcatgcggggtgaaggctgattggctaacatgatgtccttaagggaagggttgtcttccagaaagttcaggtccctctgaacagaccccatatcatcttcagaatccaaatcaggtaccgagc

SEQ ID NO: 244708 - DNA, 848 bp, Homo Sapiens
ggggtgggagcccgtggcctttaaagtgccgttcagccttttcctccaggggtgctttgtaaacacggctgtgctcagggctcgcgggtgaccgaaaggatcatgaactagtgacctggaaagggtactagatggaaacttgagaaaggactgcttattgataacagctaaggtattcctggaagcagagtaaataaagctcatggcccaccagctagaaagtattcttgccatgagaaaaagaatgtgataagttattcaacttatgaaattcaagttacatgtgaattctgccaggcaatacaaggacctgtggaatatgagtgatgacaaaccctttctatgtactgcgcctggatgtggccagatcagaccccaacaccaacaagattcttgaaaaactgtgaagaagtgggtttgtttaatgagttggcgagtccatttgagaatgaattcaagaaagcttcagaagatgacattaaaaaaatgcctctagatttatcccctcttgcaacacctatcataagaagcaaaattgaggagccttctgttgtagaaacaactcaccaggatagtcctttacctcacccagagtctactaccagtgatgagaaggaagtaccattggcacaaactgcacagcccacatcagctattgttcgtccagcatcattacaggttcccaatgtgctgcttacaagttctgactcaagtgtaattattcagcaggcagtaccttcaccaacctcaagtactgtaatcacccaggcaccatcctctaacaggccaattgtccctgtaccaggcccatttcctcttctgttacatcttcagaatccaaatcaggc

SEQ ID NO: 244709 - DNA, 464 bp, Homo Sapiens
gaagatgacacggattcatttttctcaaacagcccaagaaccttgtattttccaataagagaatataacaatttctgtacactatggaagagtttgacttggtgaaaaccttacacaaaacttcatcttctgtaggatctgatgaaaattctcttcattctcttggactgaacttaaatactgatagaagtagtccccaccttagtacaaatggggtatcctctttctcagggaagaccagaccatctgtaattcaaggtacagttgaagtcctaacttctttaatgcaagagctacaaaacagtggaaagactgattcggaactttggaaaaactgtgagcatatacaggaggagataaaaaatttagtctaaattacagactagtagtgcttccttagcttcctgtgaaggaaattcttcaaacaaacaagcatcttcagaatccaaatcaggtaccgagcc

SEQ ID NO: 244710 - DNA, 856 bp, Homo Sapiens
  misc_feature (790)..(790): n is a, c, g, or t
  misc_feature (825)..(825): n is a, c, g, or t
  misc_feature (828)..(828): n is a, c, g, or t
  misc_feature (844)..(844): n is a, c, g, or t
tcagccgctccggacttcctggtgtgttggaggaggcttccgaatagtgagtcaaagtgcctgatgcaggatgatactagaggcatgtttatggaaacaactgtgttttgtacttccgaagatgggcttgtatctggtttcggacggactgttaatgacaatttgatcgacgggaattgcacaccccagaatccaccacaaaagaaaaaggtttctctattagaataccgtaagagacaacgtgaagctaggataagtggtctctaagacagagaactttccactcattagtgtatcaccccatgcaagtggaagcttgagcaacaatggtgatggctgtgccagcagtaatgacaatggggagcaggtggaccacactgctagcctacctttaccaacaccagctacagtttataatgccacttctgaagaaactagcaataactgccctgttaaggatgctactgctagtgagaagaatgaaccagaagttcaatggactgcctcaacttcagtggaacaagtcagagaaaggagttatcagagagctttacttctcagtgatcaccgaaaagataaagatagtgggggagaatcaccatgtgtctcatgttcaccgagtcatgttcagtcttcaccttcatctcattcaaatcacataccccagttgcaagctaagggcccagtcccttctttcagtgaacttatggaagaccctgatcctgaaaatccagacccacactacgaatgaatgtccatccccagatcttctcaaaatacttgtaaaagnccttccaaaatgaccagcctgggtcaacctggaantgnaaattcttggttaagnccccgggaaatt

SEQ ID NO: 244711 - DNA, 563 bp, Homo Sapiens
cctgaatagaagtgcatctgttttcgctcagagagtggataccaaaaagaatgctaactggtgtggatttcttatttccagcttccttttttgtcttcttcttttgcagatgacagcaagagacaacagtccagattccacaccaaatcatccatcacaaacaacgcctgcccaaaagaaaactcccagttcttcatctcgacagaaagataaagttaataaaagaaaagaacgtggtgaaactcctttacacatggctgctattcgaggagatgtgaaacaagttaaagaattaataagtttaggggcaaatgtgaatgtgaaagattttgcaggttggacaccactgcatgaagcttgcaatgttggatattacgatgttgctaagatacttatagcagctggagcagatgttaacacacaaggattagatgatgacactccaccccatgattctgctagtagtgggcacagagatatagtaaagctgttacttcgtcacggtggaaatccatttcaagctaataaacatggggagcggtgagcaattatgtggaccggct

SEQ ID NO: 244712 - DNA, 396 bp, Homo Sapiens
cccagcggcagacgatgatgcttttgagcctgtggaggtcagcctgccagcccctggggatggtgggagtgaaggtgcattactccggcgcctggagcagcctctgcccactgcgggggcctctctggcagacctggaagactctgccgacagcagcagcgccctgctcgtgccccctgaccctgcccagagcgggagcaccccagctgcagaggcactgccagggggtggccgccacagccgcagctccctcaatactgtggtgtagacggcctggcctgtaccccaacggtctgggagcgcctgtctgttgtagaaaacaccggtccctggggagacttgaaaggcccctgtcccagcctggacgccatcgtctgccgctgtttttcctcaaga

SEQ ID NO: 244713 - DNA, 397 bp, Homo Sapiens
tgcgtcaggtcccggggctgcataatgggacgaaagcctttctctttcaagatactcccagaagcataaaagcatccactgctacagctgaacagttttttcagaagctgagaaataaacatgaatttactattttggtgaccctaaaacagacccacttaaattcaggagttattctctcaattcatcacttgtatcacaggtacctggaactggaaagtagtggccatcggaatgaagtcagactgcattaccgctcaggcagtcaccgccctcacacagaagtgtttccttacattttggctgatgacaagtggcacaagctctctttagccatcagtgcttcccatttgattttacgcatcgtctgccgctggtgtttcctcaagagtcggcg

SEQ ID NO: 244714 - DNA, 778 bp, Homo Sapiens
ctgtcttcaggatggctgcaacacagccaccaccacgggtccgccagcccttcagcagtggcccgctcgggcagtgcccgatacacctccaacacgaggcgccggcagcagggctcggattacacgtccacctctgaggaggagtacggctcccgccacggctcccccaaacacacacgctcccacacctcaacagccactcagaccccgagggctggcagctccagccgggctcgttcccgggcccccggcccccgggacacggacgacgatgaggaggagcctgacccttatggtttcatcgtgcagacggcagagattgcggagattgccaggctgagccagacgctggtgaaggacgtggccatcctagcccaggagatccacgatgtggctggggacggtgacacactgggctcctcggagcctgcccacagcgcctccctcagcaacatgcccagcacccccgcctcgaccatctctgcccgggaggagctggtgcagcgcatccccgaggccagcctcaacttccagaaggtgccgcccggctcgctgaactctcgggactttgaccagaacatgaacgacagctgtgaggacgccctggccaacaagacgcggcctcggaaccgagaggaggtgatcttcgataacctgatgctgaacccggtgtcccagctgtcgcaggccatccgtgagaacacagagcaccttgccgagaagatgaagatcctctttcagaacacagggagagcttgggaggacctggaagccagga

SEQ ID NO: 244715 - DNA, 348 bp, Homo Sapiens
gacctgcaggagatgaaggaagagagtcggcagatgatgcggtagaagaaggtcaccatcctggagctgttccgctcccccgcctaccgccagcccatcctcatcgctgtggtgctgcagctgtcccagcagctgtctggcatcaacgctgtcttctattactccacgagcatcttcgagaaggcgggggtgcagcagcctgtgtatgccaccattggctccggtatcgtcaacacggccttcacatgtcgtgtcgctgtttgtggtggagcgagcaggccggcggaccctgcacctcataggcctcgctggcatggcgggttgtgccatactcatgaccatcgtctg

SEQ ID NO: 244716 - DNA, 506 bp, Homo Sapiens
cccagcgggcagacgatggttagatgggggtgcttgagccagggcaagggaggacggaaaggctccaggagcaagaggccggcgggtcgcacttacccatctggcgtccaacttggtttaaagagggagagccactgatttgcaaggggcagcaagccacaggcgcacatccccgcccctgcccccacactctgccgtcgcacacacccaggtggacgggtggggaggcccgactttaagggacctgcttcctaagcaaacaggccaggacagaggctgcaggtataagccctgccctgccaccatgatggtgaatatgaggtgtcaacctgattggactgaaggatgcctagatggctggtaaagttttgtttctggctggttaagtgtgtctgtgagggtgttgccagaggagactgacttttgagtcggtggactgggtgacggagaccccccctccgtgtgggtgggcaccatctcatcgtctgcgctgggtcgggcttgca

SEQ ID NO: 244717 - DNA, 351 bp, Homo Sapiens
aataagtgttttgagtgtggtgttcaggaaaatctttggatttgtttaatatgcggccacataggatgtggacggtatgtcagtcgacatgcttataagcactttgaggaaacgcagcacacgtatgccatgcagcttaccaaccatcgagtctgggactatgctggagataactatgttcatcgactggttgcaagtcaaacagatggaaaaatagtacagtatgaatgtgagggggatacttgcccggaagagaaaatagatgccttacagttagagtactcatatttactaacaagccagctggaatctcagcgaatctactgggaaaacaagatagttcggactaga

SEQ ID NO: 244718 - DNA, 505 bp, Homo Sapiens
  misc_feature (53)..(71): n is a, c, g, or t
atcattttcttcttccggctttagcccacccccaccccaccaaaagagacccnnnnnnnnnnnnnnnnnnngcccaacaacaacaacaaaaacaactctacctgaaccacattcacagaaaatgacaccaggatacactacaaaacagaaggaggtgtcatctgctctgtgtccaaaggtttcttctccatgtcttgtactaggcgagtaaccatcattgaacatgctgtgtgccaaatcaaaacataacttcagcatatgtcagatcttactagagatggtgaacgtagtagaaattggaaattttccagcagtattttcctttaaataagcactgtcaaagctgcagctcttcttttaaatcacaggttatttcattacacctagtcagtccttgttttatttgggctgtgctctttcaagcaactgactagatttcccttcaacagaatgtttgtgactcacttgtctcccccataaaatttacccggaagaagaaaatgat

SEQ ID NO: 244719 - DNA, 536 bp, Homo Sapiens
ctagcggtccggaatatttcttcttccggacagtagacaccctgcccgtgcagagagatgtcatgggggcacctgctctccctgatagatgctgagagcatccagaaacttccagaccagccctctcaccacacccagaagaggcctttcccatctggagagaagcttccagaccagcccttcacacaccacagccaggaggggcctttcccacctggagagaaacttccagaccagcccctcataccacagccaagaggggcctttctcacctggagagaaatttccagaccatcccctctcaccacagccaggagaggcctttcccaccggaagaagaaaatgatccggatcattttcttcttccgggatgtctttttttctgacctgtgtttgccctctacttgtgaccactgcacatgtcgacagtaggtagctgaatggtggaagaaaaacaagaaggggtctacataaggggaacatcatttaaagctcataagatccccttgtggccggaagaagaaaatgatccgggg

SEQ ID NO: 244720 - DNA, 622 bp, Homo Sapiens
ttaggcacgattattattaatgctttaaaaactgcctttgccaagtcatcaggtagttgaggagcttaacacagaaggaattaaaagtaccagggggaagttcccccagaactttcagcttggcctgaaatgcctttcaaagtggggaggaggggatgtgagtcacgacagcattttcctcctctttgagcctctgccttgctcctgctttaggtgggaggggaggaagaattactttctaattcctgtgtggatcaggattgcatctagaaagaactaaagtccaagtccaaatctgatgaattcaagggaagaggaattaagtagctcatcattcactacctggaaaatacgcttgaagcaattcccagtgagcaatgcgattgtggattggtaattacaatcctgagatcacagatccataaaaccatctgacattttcataatcattcaagagcaaagagtgacacatcttttcatccccccggcggctacgtgctgtgcacacgggccctccacgaaaccctttgttaaagggggacccagacttggaccactactctgcaggtcactccactttacccatctttcgtgaaggccaacaccggaagaagaaaatgat

SEQ ID NO: 244721 - DNA, 370 bp, Homo Sapiens
atcattttcttcttccgggatattctctccaaagggagtcgctggccactggttcaggcagggggccctagagcacactcccatttgtggaactcccaggcaggcctgcaccaaacctcaagggggctgaaaggactaggatagtggacttctctctgaagacacaaattctttgctcccctttacaggtataacagaaatgggagataaatgttttagcgcagaacttaatcaagacttctgaagtagatggtcgttcattacctttagatgcaagacagtccgctcttcaccagaatcataataggtaatacgtgacaggaagacatgcaaagagagaagcccccaactcctctcctgagaagaatag

SEQ ID NO: 244722 - DNA, 512 bp, Homo Sapiens
acacctcagtagtaccaccagcagccaccagcacttcctcaactgccgtttttggcagtctgccagtcaccagtgcaggatcctctggggtcatcagttttggtgggacatctctaagtgctggcaagactagtttttcatttggaagccaacagaccaatagcacagtgcccccatctgccccaccaccaactacagctgccactccccttccaacatcattccccacattgtcatttggtagcctcctgagttcagcaactaccccctccctgcctatgtccgctggcagaagcacagaagaggccacttcatcagctttgcctgagaagccaggtgacagtgaggtctcagcatcagcagcctcacttctagaggagcaacagtcagcccagcttccccaggctcctccgcaaacttctgactctgttaaaaaagaacctgttcttgcccagcctgcagtcagcaactctggcactgcagcatctagtactactgaggtgtaagcgggg

SEQ ID NO: 244723 - DNA, 728 bp, Homo Sapiens
ctagagtatccccgcttacacctgagtagtacacttctctcctccagtgcccttggtttctagaatatgcccaaatgatgtctgtcgcatctggaaatgtggtgccaaactgcgcgtcgatatcacattgctgggatttgaaaacatgagctggataagagggaggcgtagttttatatttaagggagaaggtgagtgacttctcttgtagtaatcactgctcaagcaaaattacagggtgatttttaaccaagaaaatgctttcacattcatgtgacttttctgtctgatccttcctagggcatgtttttttggttattcttattaattattcagctctccatccctgtcttcgttcttgtctggctagctctccttcatgtgtcctttaccacccagcagttacccttgtgatgtgtctgcttcactttcctgagcctttgagcacaggccttctgtgtgtatctctgtataaccctccataatcaggcatgagaaatggcattgctcacccaatgttgtgcatacataatttctgtgaattctgtaataatatattttataaaggacattgatggaatatattgctaataagaatgcagattattaagaaaaattccgcacctttggggaagatggctcagagcttcctatgtgttgtggaaagctgagatcagataatccctgtgcaaataggtagtcgataatcagtactactgaggtgtaag

SEQ ID NO: 244724 - DNA, 777 bp, Homo Sapiens
  misc_feature (121)..(121): n is a, c, g, or t
  misc_feature (528)..(558): n is a, c, g, or t
  misc_feature (565)..(691): n is a, c, g, or t
tggaaaagcaatggggcttaaagaaactgttctttggttcacacagactttttcaatagtctgcctctctgtcaaaaaaatgaacacatattagggcagtaggtaacaccaatcagaaganccaaaatgaaagccttttctcttagaacaatacaagagccatgttttggggctaacctccaagcagggacatcagctccagaaaagagactatccctttgtgtacgagaacaatagagagagcgcatatctcagaacgtgaatgactatcctttcctcttagatctcagtatccacctcttttccacctctaaaagagtacaacaggagtgcaaaaccacgccctggaatctttgtttacacatagggaacaggagatcactgccgtccagccccacggaggaattcagccaaagtcccagggcttggtcttctcttcctcatatgaacacagacttcagctccccttatacccatcttgtctatctggtcctgtaagtctgataccagtgaggctgtcctccccannnnnnnnnnnnnnnnnnnnnnnnnnnnnnncgatggnnnnnnnnnnnnnnnnnnnnnnnnnnnnnnnnnnnnnnnnnnnnnnnnnnnnnnnnnnnnnnnnnnnnnnnnnnnnnnnnnnnnnnnnnnnnnnnnnnnnnnnnnnnnnnnnnnnnnnnnnnnnnnntcgagtggcctggactacaggcgtgtgcccaagtagctgggactacagacatgttcctggctcgcatcaattctttacacattacc

SEQ ID NO: 244725 - DNA, 628 bp, Homo Sapiens
cttacacctgagtagtacatggaagagtaggagaaacatatttttacatatgcgacagcttaaattctcttacttttctaaagctgttggttttcaagttccatatgcaattgtagctttttatggttagtatactttttaatcctcaagtaagttatttcacaaacatggtatataatgtgtttcatatacttgaagcataacaaattaatacaccttgtttcaccatttagtgtaaacagatgatcaaattaagctgagtcatgggtataagggtattaatcatattgtcttatttcatttgcatgtttacagtatttcacaagttgaaaatgaaaatacaaagaaaaataatattgtattataaataaataattatagtaattgctataaaatgcatataatcaaacgtgaatgtccttataatggtgatgtttggtctgggatcccttctcttaagcatagaaaatggggaagaacattctagtagagagaacaatataaagcccagcagagatctgaagtacaagattgaaaagtcattgatttataggtaaatgtttgtatgtgagtgagatttctcagatgaaatgtgtactactgaggtgtaagcggggagcctctagaa

SEQ ID NO: 244726 - DNA, 822 bp, Homo Sapiens
cctaggtatatgtcgtgctctcctgtgctgcccacctgcggcctggtcactggggacgggagcaggtatgcctggtccctgtgctgggccccacgggatgtaaagaagggccacctgggcacggcggggcctgcggtgcgggctggcctgggaggaggacaggaagaggggagcagagcttcagtggaatttgagggctgacctaggcgtgcccccaggaggaccaagctgagcagagttgagcgtggaaaggcagggggttcgagtccgaagtaagtggaggtcctgttgggaaggatgcggtgcttcacaggtggtcttacttgagaccctgttccatccagctgcaggcagaccctgcctgggacagtcagggtgcaccggttctgtggctccggctcttaagcactgctctggaccactcctagcttgagggggttgggggaggtcaccacaggctggcggattgcttgggcagagtcagaggtaggattgggcttgggaagaaaggtgcagggtgcctgaagcaggggcagccaggcagtgtggaaccagggggctctgaggacagcgtccactctcttggcagaagtgtgcaggtcctgctgtgtctgtcccgtccctcctcccatccacctcctacttcattgggcaaactgtttccttctttggctcactcgggatcccccagcaatgtcctttgttctcgaactcccagtgactcgaggggtgtcctctgattgctcacctcaggtggagcctcgaaaggatggcgctgctgttcctacctcgggtctccccagtgcacgacatatacctagg

SEQ ID NO: 244727 - DNA, 518 bp, Homo Sapiens
ccgctctagagtatcccccctaggtatatgtcgtgctaacaattattaaatcttagtatgtctatttttaaagaaatacaaatatacagacttataagaaatttctcagatcataaattcacccagataattattttgcataactttttgtgtgtttcaagagacaggatatggtaacttgattataatgccaagcatgtgtattcactctctttctttcccagatgggacactaaacattctataatatttgcaatcccatttttagcatcagataacacaatatttgttccaatatgaacttagaagtcagcaaaagagttgctctctctttcaggacacgtcagtgttgcaagagttcaacatgttgagtaaggattaaaatgcactggcatttccattagcagttttgtccaacctgtacttggtttactgagaacagaacagtcttatcatcaaataagcccacagcactttgtactttgcttggcacgacatatacctaggggggaccgagc

SEQ ID NO: 244728 - DNA, 509 bp, Homo Sapiens
ctgcgctgtcttattaaaatggggtcaactacagaggcacgtaagtgatttcttctatgaaggccaatcagcagtgggatctgtagagacctgtccaagctcccttccaaccgtatatttccatgaacgtgccccaggttatgaaatcagttccaggaccagagttcacagtccctccgagcccacttagacttgcattgcagaaaacgacaggggtcctcaactctgtatttgaaaaataaatatggtcctaattatactaactacctttccaagccagaagttttatccatttcaccttaaggtcatgtattcgggaaaggacaacctcacatgtggaagccatttctctacaatttactaggtgatcacaggcttcatttcatcaaaccatttttctacagtagcctcataaaattcccagaaataccaaggtgaggagtggccatttgctgctatgttctttccttggcacgacatatacctaggggggatgctctagagtaggg

SEQ ID NO: 244729 - DNA, 559 bp, Homo Sapiens
ctgcattttgatgaacctgtaatcagagaatctaggcacacaggctggggcagcatccatggacgaggcagaggaagtgggtagcctagatactccaccagctgaggagttgtttcgtggtctcaacagcttgtagagtgttgatgtaattttgcaggtagacccaaacctttaagcaacttgcatgtttaccaagagttgctcatcatttgggacctctcactgcgcgtattctcaccatgcagatgcagaatgcctgtgtgctataaaatcataaatgaaataaaagcacagtctatactgtgccatccctctgattaaccaatgttgttagctcagggtctagagtattaggtatatgagagctgcactgtttatatgatgttattatgacatctgtaggttctctacccttatatggattattaggagttcttctattggtagttacatatagggcttagtattgtacgtggctcgctgttactctctgttcagcattggctctcctcctcatctgtttctattacactggttgcaatgtgtttctgtgctgaat

SEQ ID NO: 244730 - DNA, 428 bp, Homo Sapiens
tgcccagcacatcacaggtactcaacacttgaatgaagtaatggcacttattgctgcgaagaaagaaagtgtaatgcacacctattattatagtgggaaaattcctttctgtggtttgagaatgtcatggatgtagaagactagatctcaagggtccgagactgaaaggaaaaatataatgaaaggagaaaagtatgcaaccatagggaggcaaaaggcaagtcagcttagcatagatatggaatttggagagaacaaaaattctagaaaaaggcttcagttctgaataagactcaaactcagggtcttccttgctttaaatagcaggagtgttacaatgcccacattagcatgttatcctaacgtaattaatacttgcccgttctcacatcacactgatatagcatgctagttagtaagaagaccat

SEQ ID NO: 244731 - DNA, 405 bp, Homo Sapiens
gagacagagcaagactccgtctcagaaaaaggaaaatcagtcttaaggttgcagcttctatttgtcctgagggtcagagaggttagtagtggtatagtggaaagatttattcactggccgagagtcaggaaacctcttatttaatctgttcgttgttttcattattttgttaaatggaagttagctttaaatgccttgactagatttaggttcaagttttttggctctttaggtgttactgtaaactgtgtattgcctcccatctggagaaacaggatgtctggctctggctctcctatgtttagtaaggctgatgtgatcccacctctagtgatcccatcccaggtgaaccggtccctgttgaacccatttctgctgatttgcctgggaccctctagagtcggc

SEQ ID NO: 244732 - DNA, 722 bp, Homo Sapiens
ggctagaaagaagaggaaagcacacgtgaaaaggcctgaccttcataagaagacccagagtaaacacagcctcgctgaaatcctacgttcggaatactcaagcggcatggaggccgacctcgccaaggtcaaaaagcaaaacgcacctggagagcctggtggccggcccctgcagcacagtctgcagccgacaccctgctttggccgtgggaaaacattaaaatggagaaaaacccaaaaaggtgtacagcgggacagcaagacttcccagaaagtttaaaatctctctgggtcttcgagtggaacctggaagccccgggtggcagtggattgatgtccagttcttgtcagaggaggcttgtgaaaaataactgcgcctttgcctgaataccacgtccccaagaatcagaggggccacagcccttctcctccatgggaggccctggagcctgatagaaatcagtggtgtggggcactgtagagactagccagctcccgacggaaggggtctgtgtcttgtattgatcccatcagtgcccggcactcccttcacccaggtgctgacgtgccggggttgagctggcaccccgggatgtgatgtaagaacgccctgcgcgtcagcctggcacgggcttgattgctgcccttaactgtgttctgaagtttcacagcttggcttcagcctatcagcgcatacatgcgagtcgcccaaatcctctaga

SEQ ID NO: 244733 - DNA, 588 bp, Homo Sapiens
tggcgatcgccaaccccgagctcccgtggtaacctcctcttgaacttctgtatcagtgaagacatctgtggtttctgctcaccagacctctctttagaaagggttatcagagccatggagcttagctcaattggattcttctagacgatcttaggagggctcttggcatgaggcagcttctaagcgtctcctgggacaggattggggtgacagcccagggatgcatgcgtgggagaactctctgagaaatgccaggatcgtggctcacagggtacccacacatcaaaaccatgctactattgtgcaaggtaatatgaggcaacaagataccgagtcgacgagcctccctggaggtagatcccgttgtacctccaaagtacaaatacctccctgctcagtttccttcctgttgccatctttgttttcttcccattgaaaaaccatcctgtctgatgtggacgttcaggtctgctggttggcggtccgggcccagagtgcagcagagctctgggttaaatattcctttctggccaccgaccaagcccaggtggccagctctcataccccatctccctccttggtgagtcg

SEQ ID NO: 244734 - DNA, 428 bp, Homo Sapiens
ttggcgactcgccaacccagccttcctgggtgcagcctgggagacacactagcatgctttggtgggaccagcctttccagggcatgctggcttcccctggggctgactcaggtcccgccctcttgtgtcagtgctaacaaggatcagattcgtccctgcccttctgtagagctggagggtgacctggagccaggggccctttagggctgagacatttgttagtcggagtgatgcatccctacccggcttcggggggagtcaggctgggctctgggcagtacagggagaggttcacccaggacccccatgccttcctcccccggtgcaggggcagtggtcaccatgctgactcctccctttgactccatgcacgggcgctggctggcctgtggttgcatttcccactcacctccttgctatccccagtc

SEQ ID NO: 244735 - DNA, 696 bp, Homo Sapiens
gcggccgctgccctgtccggcccccgctggagcagcccggagcagcgagcaaggagaaaggtgtgtgccctcttcctgattctggagaaaaatgccggtccggaagcaagatacccagagagcattgcaccttttgtaggaatatcgttcaaaactaagccaaactgaagacagacagctcagaagttccatagaacgggttattaacatatttcagagcaacctctttcaggctttaatagatattcaagaattttatgaagtgaccttactggataatccaaaatgtatagatcgttcaaagccgtctgaaccaattcaacctgtgaatacttgggagatttccagccttccaagctctactgtgacttcagagacactgccaaggcagccttagccctagtgtagagaaatacaggtatcaggatgaagatacacctcctcaagagcatatttccccacaaatcacaaatgaagtgataggtccagaattggttcatgtctcagagaggaacttatcagagattgagaatgtccatggatttgtttctcattctcatatttcaccaataaagccaacagaagctgttcttccctctcctcccactgtccctgtgatccctgtcctgccagtccctgctgagaatactgtcatcctacccaccataccacaagcaaatccttccccagtactgg

SEQ ID NO: 244736 - DNA, 521 bp, Homo Sapiens
ggaacaagatacttttttgaaaaatggagaaccttactacattcttcagcatccaaatattcttcagtgtgttggacagtgcgtagaagcgattccctacctcctggtgtttgagttctgtgacttgggtgacctgaaggcgtatctgcgcagcgagcaggagcacatgcggggggactcacagagtatgctgctgcagaggatggcgtgcgaggtagccgcggggctggccgccatgaacaagctgcacttcctgcacagtgatttagccctgcggaattgttttctcacctccgacttaaatgtgaaagtgggagattacggaataggattcagcaggtacaaggaggattatattgaaacagatgataaaaaagttttccctctgcgatggactgctccagaattagtaatcagctttcaagacagactgctaactgcagatcagactaagtatagtaatatctggtctctgggtgtgacactttgggagctttttgacaatgccgcatgtacgcttg

SEQ ID NO: 244737 - DNA, 1134 bp, Homo Sapiens
ggaagtggagctccctgtacgcgcggccctagtcggctcctcaacgtggagcgatgggaggccttgagaagaagaagtatgaacgaggctcggccaccaactacatcacccggaacaaagcccggaagaagctccagctgagcttggctgactttaggcggctgtgcattctgaagggcatttatccccatgaacccaaacacaagaagaaggttaacaagggttctacagcagcccgaacgttttaccttatcaaagacatcaggtttctcctccacgaacccattgtcaacaagttccgtgaatacaaggtgttcgtccggaagctccggaaggcttatgggaagagcgagtggaacactgtagagcgtttaaaggacaataagcccaactacaaactcgaccacatcatcaaggaacggtatcccacgttcatcgatgccctgcgggacctggacgatgccctctccatgtgcttcctgttttccaccttcccgcggactggcaagtgccacgtgcagaccattcagctgtgccgccggctcactgtggagttcatgcactacattatcgctgcccgtgccctgcgcaaggtcttcctgtccatcaaaggcatttactaccaggccgaggtactggggcagcccatcgtgtggatcactccctatgccttctcccatgaccacccgacagacgtggactacagggtcatggccaccttcaccgagttctacaccacgctgctgggctttgtcaacttccgcctttaccagttgctcaacctccactatcccccgaagctcgagggtcaggcccaagcagaggcaaaggccggtgagggcacctacgcgttggactccgagagttgtatggagaaactggcagccctcagtgccagcctggcccgcgtggtggggcctgccacagaggaggaggccgaggtggatgagtttcccaccgatggggagatgtcagcgcaggaggaagaccgcaggaaggagctggaggcgcaggagaagcacaagaagctttttggagggcctgaagttcttcctgaaccgagaggtgccccgtgaggcatggcgatatcatcaggagatctggtgggaagtgtcctggacaaatctcagcagg

SEQ ID NO: 244738 - DNA, 407 bp, Homo Sapiens
tgcacaaagggtattttttgtagatccaatttctctagagaccctctgaggttactaaggtgtctagctttctactctggttttcaggattctgagctagaccaagggaagtaacatgttcttcaacaatctctacttcctgtgacaaagtatttctggaaggcatcatttcaacaagaagctcactgctactaccactttgtttagaaatacttcctctgaaatctttaaacgtgcttcccacatttcgtaatccttttgaatcactattctttgctattgatttagaagttcttggttttgagtgaacattttttgttgccattgtacgtggttttttaggaaaaggttgttttgttaagatctgtacaaatcctccacgagcagccagattctgacgacggaga

SEQ ID NO: 244739 - DNA, 451 bp, Homo Sapiens
gccggccgggctgcacaaagtgagcaccaaaatcaaaagttttgaattaaaaatggactctgtttagaaagatgcaaccaaaaaacttatggaaactaaaatatacgttctttgttcatctatttccttcagaaagctttcataacagaaagagcccagagtccatttactcaagtgtacatagataccttttatttgaaaaatatcccaacttttcaaatcaataagaaaaacagaagaaaaatttattctaagacttctaaggaaaaccattaatctagcatagggtgagtgggatagggaagatctcttatcataagtcaacaatgaagaccatgatacctattcttgaacagttggattcctaagtatggctcttgacttgcttaatcctctctttaaggacattttattttccctatgtagcctttgtgcagcccgggaccgagcc

SEQ ID NO: 244740 - DNA, 321 bp, Homo Sapiens
gttctgtgtttaacagtttattttaaggctactacaaaggatacagatgaacaacagccacatgaaggggtacctggggcaaggtccagaagcatcctgagcacaggacttgctgacttcataaagctggagtgcgtcaccttcctggcacatcaaaatgtttgccaaccctgaagctccctgaactccatagttaacggattatgtcttgttgacataggcctgatggattattgacacaaatctccagcccctctcccctctctggaggtgggagactgaaagtttgaaacttccaatcatgatgtgtctttgtgcaac

SEQ ID NO: 244741 - DNA, 552 bp, Homo Sapiens
tacccggagttgtcatcccaagcttatgctgtttttctaaaagctctttatggggctgatattgggttggtggtctttgtccagaaatatgaagggacaaagagggccataaccctcccttctgagagtttccaggaggagtccgagggtctagcttttctggtgaagccagttcctgttcctgccttctttcctaagggcctgctcgctctggcttccaccacagtgccaagcccctctggtctccaggggagggattgctgtgttacatagcaggatcggggtaatcaggccaacaggggagatggtggcgatttttcttttttaatctgtatttattatacagtcttgtttctttaagcccatactctgtctcttcccccgtcttcctctcaggtgacagtatcagtgagtgccatacagaattgtgtattcaccagcatcatgaaacagttgtggtcttttgagttgatcttggcagagtaaagggacgtgtcctggagccattcctgaatctccccttctttgtgacagctcctcccacccccccaa

SEQ ID NO: 244742 - DNA, 329 bp, Homo Sapiens
atcttggaatccaaaataattttgattacaagcgctttattaagtttgcccgtgtctgtgaagtagactatgagttgcgtatttgtgctagagataaggaagttggaaatctgtatgacatgttccacactcgcaactctttacaccgtagagcttatcaacacaaagttggcaacattattgataccatgattacagatgctttcctcaacgccgatgactacatagagattacaggtgctggaggaaaaaagtatcgcatttctacagcaattgacgacatggaagcctatactaagctgacagatgacagtatccgggtccggctg

SEQ ID NO: 244743 - DNA, 593 bp, Homo Sapiens
gcctgggtggcgaattcggcacgaggggctccacaagcgtggtgaatacatcaagacctggaggccacggtacttcctgctgaagagcgacggctccttcattgggtacaaggagaggcccgaggcccctgatcagactctaccccccttaaacaacttctccgtagcagaatgccagctgatgaagaccgagaggccgcgaccctacacctttgtcatactctgcctgcagtggaccacagtcatcgagaggaccttccacgtggattctccagacgagagggaggagtggatgcgggccatccagatggtcgccaacagcctcaagcagcgggccccaggcgaggaccccatggactacaagtgtggctcccccagtgactcctccacgactgaggagatggaagtggcggtcagcaaggcacgggctaaagtgaccatgaatgacttcgactatctcaaactccttggcaagggaacctttggcaaagtcatcctggtgcgggagaaggccactggccgctactacgccatgaagatcctgcggaaggaagtcatcattgccaaggatgacagtcaccggggtgaccgag

SEQ ID NO: 244744 - DNA, 390 bp, Homo Sapiens
tgacgagttccatggttcttgtcctccaaattcaatctgatggagaatatatgatcctagccttagggttcctagtctaatggaggagataggggccggttttgtcttggcgatcccagtctgatgggggagatggtagcaaatctatgtcctagagactgcagagaaatggagacggatttcatggagtctacatggctcctccctggcaggacacactggatcagaatcaaataacccatctggggaggcaagactcacacagggccaccggcagagggatgggatcgaagggaggtggtggcagggacaggagggatgtgtgtgcagtgtgatgtcgaggtgccagtggaggcactcacagcacctgggggaggatgacagtcaccg

SEQ ID NO: 244745 - DNA, 380 bp, Homo Sapiens
ctgtcatctcatcaatgaaggagtaactgatcaatgaagccagcaatgcttttttcttggcatcatcaaagctgacatttagaagagatgctggtgatagtcatctcatcctactcaatttttcaaaggccgcaaccaaccctggagcaattgagaggactgtttaaacacagagcttaacaatggcagaattgtatatctcgtgcttaacagattttggttgaactttaccctaggtccaggggtcacgcaaactactgcctgtgggcctaatcttgcccaccacctgtatctgtaaataaggtttcattggaacacagctgtggccatatgtttgtatattgtgtgtggctgcttttgcattaggatgacagtctaca

SEQ ID NO: 244746 - DNA, 503 bp, Homo Sapiens
tgcactgttgttcatacccccccttcaacattgacagacttcaagaactagtgctcagggggaacagccagtacccaggcgccaagtacatcatccgagacaatggtgatcgcattgacttgcgtttccaccccaagcccagtgaccttcacctgcagaccggctataaggtggaacggcacatgtgtgatggggacattgttatcttcaaccggcagccaactctgcacaaaatgtccatgatggggcatcgggtccgcattctcccatggtctacctttcgcttgaatcttagcgtgacaactccgtacaatgcagactttgacggggatgagatgaacttgcacctgccacagtctctggagacgcgagcagagatccaggagctggccatggttcctcgcatgattgtcaccccccagagcaatcggcctgtcatgggtattgtgcaggacacactcacagcagtgcgcaaattcaccaagagatgacagtctcacggg

SEQ ID NO: 244747 - DNA, 591 bp, Homo Sapiens
ttaagctttcaaagcttaatagtgtctgacatttattaaatataaggaaaaaacctttgtacaggtagtgtattagagcagggaaggtagcagggcttactgtgttgaaccaaaggcacccatcagagagacagctgcaaattcagaagtaaacaggattctaggctatactaactggtccacaggagaaaatgagagattcgatttggttgccaggcgcacttaagccctggcagctatgtggcaggaacacaagaggtctctggggattggggaggaaatgggtctcgctgaaggtgacaggcttccttgggggacggccagctgtctggatcactgtccaggggctgtgtccagctcggatacctccgaggtgagtccacatctactaggtagccacagtctgttggtgaaatgcggtggatggcgatggcagtggtagcgtaggtctgtgggcagaatgatgtagttggctggcagtccggaggagtggaggtggtttggcagcagcgtgctgtgggtggtctgtcctagtatgtaacaggagcccagcttgcacgctgaagtgctagaacaccgtcgaagggttgt

SEQ ID NO: 244748 - DNA, 983 bp, Homo Sapiens
  misc_feature (79)..(79): n is a, c, g, or t
cggggtaatcgcatccggctgcgtccacgaatatgccgccctaccgggggccagtcccccagggggccggccgggccgnggccgtgccaccgctgttaacgggccgctggtatatgctcgcaagggccctggaccagaagctggtacgggaagctgggccccggggaactctgagcgccccccgttcttgttgttcagtcaaaggtcggacacgttattaaaaataaggaaaaaacctttgtacaggtagtgtattagagcagggaagggagcagggcttactgtgttgaacaaaaggcacccatcagagagacagctgcaaattcagaagaaaacaggattctaggcaaaactaactggtccacaggagaaaatgagagattcgatttggttgccaggcacacttaagccctggcagctatgtggcaggaacacaagaggtctctggggatggggaggaaatgggtctcgctgaaggtgacaggctccttgggggacggccagctgtctggatcactgtccaggggctgtgtccagctcggatacctccgaggtgagtccacatcactaggagccacagtctgttggtgagatgcggtggatggcgatggcagtggtagcgtaggtctgtgggcagaatgatgtagttggctggcagtctggaggagtggaggtgggttggcagcagcggctgtgggtggtctgtccagtatgtaacaggagcccagcttgcacctgaagtgcaggacagcgtccaaatgtgcatggaggggctgggctggcaaaagagggcggaggcagcgcgctctagagtgcggcccaggagctgcagcaggagcctggagcgctattcctggaacaaaggcaagcactacgcgggaggggacaggagcgcaggggacatcgcggcggctcgagggggagggaggcgcggagggagcggacgcgtgggtcgacgatatcccgaaattccggaccgtacc

SEQ ID NO: 244749 - DNA, 509 bp, Homo Sapiens
atcactgaggagtgaggagccaggcttctgacgacagctccctaggcaagagtgccaacatcctgatgatcccacaccccgacctgcaccagtatgaagtcagcagctccttgggatacaccagcactcgagatgtcctggagaacatgatggagccaccacagcgagactccagtgcaccagggaggtttcacgttggcagtgcagaatccatgctgcatgttcgacctggtggatacacgccccagagagcactgattaaccccttcgctccctctcggatgcccatgaagcttacgtccaacagaaggcgctggatgcacacttttcctgtggggccatccggagaagccatccagatccaccaccagacccgacagaatatggcggagctacaaggcagcgggcagagggatccaactcactcctctgcagagctgctggagttagcatatcatgaagctgctggaaggcacagcaattcccgccagcctggtgacggcatgtcc

SEQ ID NO: 244750 - DNA, 486 bp, Homo Sapiens
aaggaccccactcgtaatcagtgggaatgaaatgatgtccccaaggactaggccacgcaggtccactggctattctgaggtgatagttgtcgttggaggatgtgagcgagttggaggatttaatcttccatacactgagtgctacgatcctgtaacaggagaatggaagtctttggctaagcttccagaatttaccaaatcagagtatgcagtctgtgctctaaggaatgacattcttgtttcaggtggaagaatcaacagccgtgatgtctggatttataactcacagttaaatatttggatcagagttgcctctctcaataaaggcagatggcgtcacaaaatggctgtcctccttggtaaagtatatgttgtcggtggctatgatgggcaaaacagacttagcagcgtagaatgttatgattccttttcaaatcgatggactgaagtgctccccttaaggaagccgtgagttctcctgcagtt

SEQ ID NO: 244751 - DNA, 549 bp, Homo Sapiens
gctactgctggtgtgtgctggtggacacagggcgcccgctgcctgggacctccacacgctacgtgatgcccagttgtgagagcgacgccagggccaagactacagaggcggatgaccccttcaaggacagggagctaccaggctgtccagaagggaagaaaatggagtttatcaccagcctactggatgctctcaccactgacatggttcaggccattaactcagcagcgcccactggaggtgggaggttctcagagccagaccccagccacatcctggaggagcgggtagtgcactggtatttcagccagttggacacagaaagaagcaacgacattaacaagcgggagatgaagcccttcaagcgctacgtgaagaagaaaaccaagcccaagaaatgtggcccggtgttacacggactactgtgacctgaacaaagacaaggtcatctcactgcctgagctgaaggactacctgggtgttagcaaagaagcagacgccgtcgtataaggagcagaaatccaagggcaggtggagagtcagaaggca

SEQ ID NO: 244752 - DNA, 307 bp, Homo Sapiens
gctcggtaccgccttggtccactgtggtggaatgtctacgggaaactgatgcctccctcagccggagagccctggaactaagcctggctctggtaaatagctccaatgtgcgagccatgatgcaagagctgcaggcctttctggagtcctgccctcctgacctacgggctgactgtgcctcaggcatcctgctggctgcagagaggtttgctccaaccaaacgctggcacatagacaccatcctgcatgtgctgacaacggcgggcacccatgtgcgggatgatgcagtgaccaaggcggaccgagc

SEQ ID NO: 244753 - DNA, 525 bp, Homo Sapiens
cggagaaggtgaacatcttcaattgaggatggatttcctgtctccgagcctatgtgtgttggtgaacttgacactaaattggagttttcattctcccatcatcttcctcagtccatctcctttttttccaacccatcttcttcaacgtcttctgacctttgttgctgtcagtaatttcagaatgaatagatgcagaagcatcatctttttggaaagttccttcacttccaatcttctcactacattttccagctctatttttatattttggaagctctagtgtctatttcatcttcatagtctgtattctgtaaaccatattttactcacattttacaaattattttcttatttccaggatctttttctttcttagtgttggaccgacgacacattcacctttcttatcaaggtgaaggtgagctctgacctgctgtgggtcccagccatcacagagtatcactgtccaggtgttatccgaatggataacacagtctctccaatttgcactttcatgtctatctg

SEQ ID NO: 244754 - DNA, 434 bp, Homo Sapiens
gaaaggatggcgtgagtgaggtcactagagagagagaaaggttgaaacgcctcaatcctgagctagggatgggaggtgtgcaagagacccgaacaagctaaggaaggcagaggtgggtccacaaagacaagcagctcatcttgtttctaaacaagcccccagataggccttccgatgggaggctgcaggaaactaggaaaccaaagagaagggaggatgggtttagaattaacaggcatccccagcccaccccagcgtcactctgggggctctgtgtgcatcatctgagcagacaccctgagccacaaagtgcccaggtcagtgctgatggctaacacagagtacatacccagcacatagtacaggctgcccagcatgtagtacaggctgcccagcatgtagtacaggctgcacgctgctctcctggaatgtgg

SEQ ID NO: 244755 - DNA, 566 bp, Homo Sapiens
ggggcggctgcggggtcggggtcgcggccagggccaagccgcagcgagttcacaggcggaacccctgcaggcggcgccccctacgcgaggtcacccctgggaaggagcgcagcccacccggcccctccgcatccgagcaggacgcccgtctcctctccctgaggatttcaggtctccttgtcccaggaggcttgtgccaagatggcatcagctggagacacccaggcaggcccacgggatgcagcagatcagaacttcgactatatgttcaaactgctactgataggcaacagcagtgtgggcaagacttccttcctgttccgatacgcggacgactccttcactcccgccttcgtcagtactgtgggcatcgatttcaaggtcaagaccgtctacagccatgacaagaggatcaagctgcagatctgggacacagcgggccaggagcacctatccgcaccatcaccacggcgatatctatccggggcgcacatgagcattccgtgcctatgtatgaaatcgcccatcatggatatccttttcctctgtgcacggactggccgcgc

SEQ ID NO: 244756 - DNA, 439 bp, Homo Sapiens
agacctaaccccacactcattttatattgtgtttggttgtgagttacatgattgctgcaggcaccatatttatttctgtgctccaggtctctaaaggtcctaatccagtcctgaccaaacagactagtgatggaccatcgtgagcttctctcaggagaaatatcaagagggaggccaacctgtaatcataagaacttctgctattttaatgccattcatcagactacagtcaatcaccatgcttctggctttttgtctatctctgctgtcttgtacatcctgagatagtccattctgagaactgtaccctagatcttgtattggcctgatgccgtgtcaaagatgtaatccatgctgcttaagtgagtttgtgcacacgaatcaccatatctccgcaagtttggatttgattcagtagttcgatgtgcgttagttgacg

SEQ ID NO: 244757 - DNA, 450 bp, Homo Sapiens
tactctgctgcctcggtaggcttcctttgggacccgtggaggcatgtctgactcctcaggagctctgtatttagtgggccttgtcctggggtggcggctccaggcctagtgagacatggcagaggccagggcagggagaatgtgaagctggggcgagggtctgtgacgaggccgcctgacgcctcagcaccaggtggacacagttgtgtgcatgtccctcttggccaatgacaggtccggttcaggtggcccttgcccagggacagaggcttctcctggctccgtgccttccagctctcagtcctggtgtgcacagcgtcaccgggcttccgatagctgccggcctcaactctgggagagggcaggtggggcggcaggaggtgcctgtgctttcctaggcatgagcaggcatgagaggtgcacatgctcctgctcacctgggcggcgcct

SEQ ID NO: 244758 - DNA, 226 bp, Homo Sapiens
taaccccatgtcttgctttgccctgttttgtcctcctggaagatgaggggcatctattgacatcagaggttcacaaagccctcagctctggtgaggagagcctgcactcacaaggccacccttgggaacaggtcgaccatgacggccacttctccatgcggagagactggtgagtaggagctggagttcgaatgggacattatcattcatcgctcttctacttggt

SEQ ID NO: 244759 - DNA, 224 bp, Homo Sapiens
acggggattttgtggctttggaaaatggcaacatcgacaccatcactccaagacaatcagaagaacctcacatcaagggacttccagaggaatggctaaaatttcccaagcaggctgtattttctgtaagcaatccacattctgaaattgttttggtggccataatcgaaaaagtcttgatgggatacattgcagtgtgccgaccttatatgagacccagctcc

SEQ ID NO: 244760 - DNA, 534 bp, Homo Sapiens
cggggattttgtgcccccaacacagcactatctgaaaccaggatggattgaattgaaggcccctcgttttcaccaagcggaatcccatctaaaacgtaatgaggcatcactgccatcaattcttcagtatcaacccaatctctccaatcaaatgacctccaaacaatacactggaaattccaacatgcctggggggctcccaaggcaagcttacacccagaaaacaacacagctggagcacaagtcacaaatgtaccaagttgaaatgaatcaagggcagtcccaaggtacagtggaccaacatctccagttccaaaaaccctcacaccaggtgcacttctccaaaacagaccatttaccacaagctcatgtgcagtcactgtgtggcactagatttcattttcaacaaagagcagattccctaactgtaatacttatgtccccagtgttgagacagcacttgaatcaacaggcgtcagagactgagccattttcaaactcacacctgtgcaacatgaagcctcattacagctg

SEQ ID NO: 244761 - DNA, 549 bp, Homo Sapiens
tacgtattccagagagataggtaccatggaagtaattacattgggagcattgggagaagatgggaacatataaatatctcatcacacaaatcaaaaattaggaaatgtagtagcatatttcacatgatcttttgtaacaataaatattccattttaatagtatgttgaaaaatcactcataagcctttcctttctgcagtattttatctgtttatttcactctaaagttacagaaacgtaacgtataatcaagttccttattggctgcctcttaacataatttttgttattcttcctcctcagtattggttagtgatggaatgcgagaataaagctgaatttatctattttcacttatgattaaaaaaagataaattctaagtaggtattttaaaagatagtttgacatatacactcccagtgttggacttgaaattaagaggtcagctggtattggtatgaacattaacaaagacctacaggctaaacaagaaatagttaggctatatctaatttgcctgtgtataaagattatggatttctcacata

SEQ ID NO: 244762 - DNA, 717 bp, Homo Sapiens
ttagcggtcgagcgaagatgatgtccttggtttacttatacgctctggcattcgtacatcactctaaaaggtatgttcccctaagttcctattgacggcagttaattaagaactgggtatatcttattttctctctccttttaccttttctattaatcagcaaagttattgagtagcaatttgttaaatgaagaagtaatgaatggttgaaactagctgactgaatcagatgagctcaatagctgttgtcagattttacttagaaggcagactcttaaaaaatgtctcttcttcctctctccattacttatgttagaaaactgaaactacttttcctatttcttttctctatcccatgaccctttatggccaatccagttccaccacgtttattagcttgtttttaattgaatacaatgttgcttccttatagacaaaggccatacttgctaactttaactaaatttgggtttggagagttttaatctgcctttgtgtgtaggtaattagaagtataaagaagatagcattttatcctgttacagaatgtaggttctggaaaagtgatacaaaagcttgagatatataaacagacttaaaaaatagatgttggccttcatttcctcagtgatgagaggactggcaagaaatgtccaagtatacaatcctacacctaacagcctcgatgttcgttgggaccctgcaccaggacctgtg

SEQ ID NO: 244763 - DNA, 425 bp, Homo Sapiens
tcagctcgtccataagtgcaggaaagcaagtaatgccccagtacatgtgatgttcctgttcagtttgatatttatctgaaggctgattgtccacatcccattaggttttccaagctctgtgtcagctttaataatcaggaatacaaccagttctgtgtaatagaagaagcatccaaagcaaatgaagttttagaaaatctgactcaaggaaagatgtgcctagttcctggcaaaacaagaaaactgttatttaagtttgttgcaaaaactgaagatgtgggaaagaaaattgagattacttcagtggatcttgctctgggcaatgagacgggaagatgtgtggttttaaattggcagggaggaggaggagatgctgcttcctcccaagaagccttacaggcagctcgtctttcaaggctacctac

SEQ ID NO: 244764 - DNA, 406 bp, Homo Sapiens
tcgacttctcacggccttttctcttgcttgcctgcggtgccaggagagggtttggaatgaggaaaggggttcccacgcatctctgctgtatgttctgtgaatggaaacactgtgccaagcctcaagaggattacgcttccaggtgtgtaacgtgttttctgtgtctgccgcttccagcagctgatatctttggaacaaataatccacgtcagcatggggaccaattaggatgcaatgacaaactgacttcccccaaagcagacactactccagtatgtcccagtagaacactcatttgcaatgtgttgagctccgttaagcacacacacactcacacaacaggcttacgaggctcaggcctggcgggtcagaaagcccgctccctctccgcaaggctaaaagggta

SEQ ID NO: 244765 - DNA, 803 bp, Homo Sapiens
  misc_feature (711)..(711): n is a, c, g, or t
  misc_feature (753)..(753): n is a, c, g, or t
  misc_feature (760)..(760): n is a, c, g, or t
cccggcgctcggagcccgagtccgcgggaagatggcggcgccgctcatccccctctcccagcagattcccactggaaattcgttgtatgaatcttattacaagcaggtcgatccggcatacacagggagggtgggggcgagtgaagctgcgctttttctaaagaagtctggcctctcggacattatccttgggaagatatgggacttggccgatccagaaggtaaagggttcttggacaaacagggtttctatgttgcactgagactggtggcctgtgcacagagtggccatgaagttaccttgagcaatctgaatttgagcatgccaccgcctaaatttcacgacaccagcagccctctgatggtcacaccgccttctgcagaggcccactgggctgtgagggtggaagaaaaggccaaatttgatgggatttttgaaagcctcttgcccatcaatggtttgctctctggagacaaagtcaagccagtcctcatgaacatcaaagctgcctcttgatgtcctgggcagggtctgggacctcagtgacattgacacggatgggcacttggatcgagatgagttcgccgtggccatgcacttggtgtaccgagccctggagaaggagcccgtgcccttcggcctgccccgtccctcatccacccttcaagagaaagaagactgtgttccctgcgccgtccccgtcctgctgncagccccaccaaaagacagcttcgttcacgccgtcccacggnaacgtancagccttaacagacaggagctgtccccaacacagcttaacaac

SEQ ID NO: 244766 - DNA, 296 bp, Homo Sapiens
cggcctatgagctgcaggctgggcctgaggtccaggatctatttgggcttcagttggcagaggaccaggaggagaagcaaccacagctcattgtgatgggcaacctggaccgtgagcgctgggactctctatgaccttaccatcaaggtgcaggatgtcggtcagcccctccacgcgccagctgtgcccttctgcgtgtcaccgtgcttgacaccaatgactacgcctccaagtttgagcggccctcctatgaggccgaactatctgagaatagccctcatagccacggggaccag

SEQ ID NO: 244767 - DNA, 402 bp, Homo Sapiens
ctggccccgctgctatgaggggacgctgggccacgcaggtgctcctgggtagttgagcgagtcaggaccaggctggggatctgtgtgccaacgttagctttcccaacttttgctgtgttactctcaaatggttgagagagacacagaaataacacaatcctagagaatttctgcattgccttgttaatatctgtgaagacaaaagtatttactggactggcgacaagttttcagaacagtctggagaaatcacaagttttaatactgactggggatctaagtacacttgtttcagtcttctcccaagagaaatagaaaagccgatggattttcttcgcctctcttctgctgcacttactccccatgcctcgtacttctcagtgacagagatcgttatactta

SEQ ID NO: 244768 - DNA, 545 bp, Homo Sapiens
tactcttctctgctctactacatctgtgttgcagatgaggatgattacagggactttgtcaacctggatcatgcccacagccttctgagggactatcagcagagagaaggcattgccatggatcagttgctttcccaaagccttcctaatgatggtgatgaaaaatatgagaagaccataattaaaagtggagatcagacgttttacaaattcatgaagcgaattgctgcttgtcaggagcagattttgaggtattcctggagtggagagccactctttttgacctgccctacatcagaagtcaccgagctcccagcctgcagccagtgtggaggccaaaggatatttgagtttcagcttatgccagcactggtcagcatgctcaagagtgctaatttaggtctttctgtggaatttggaacaattctagtttacacatgtgagaagagttgctggcccccaaatcatcagactcccatggaagaattttgtattatacaagaagacccagatgaattattgtttaagtagagcagagaagagta

SEQ ID NO: 244769 - DNA, 955 bp, Homo Sapiens
  misc_feature (133)..(246): n is a, c, g, or t
caaaagggggtatttttttccgtagccttgggggcctttccccgaggtaagatctggggacccaccaaggccattgcgcccaaggaccgccggggttaatttttggttatttttcagtagaagacgggggttnnnnnnnnnnnnnnnnnnnnnnnnnnnnnnnnnnnnnnnnnnnnnnnnnnnnnnnnnnnnnnnnnnnnnnnnnnnnnnnnnnnnnnnnnnnnnnnnnnnnnnnnnnnnnnnnnnccaactagaactgtaattttcaaaatacagctggagaggaggagagaagacccctcagaaagctatagatgagtctgcccaattcagtagatctactttttcaagggacctggaatcaaaccactacacttacccaaattatgaggcaaaggttttctcccctctctgtgccaccacctgaggcggtattccagacaagagtacacaattttcactttttgtttttaagcaaggttttaattaagctgcatggcatccagaagagagaaatgtaccaaagaatccaacctgagaccagattatacattttatgaggggggaaaagatcactgctatttgggacgagggagcagtgtaatcatgaatataactccaaaataattcatacaataaattatttatctaaaagaaattgatccacatgcagacagatgaacacacacacgcacacgcgtgcgcacgcacacgtgtcattctagtcatttattcagtgttgactgtgacttccatggagggcaccatgagaaaggaaaagattagacatgtgaaaagaaggctaggccccatcttgccaccagtggaatgagatttaagaccactagagaaggaacccactaaattgccagaaacaagagtagaaagaaacagcagttatcaaggaagattttaattgcttcaaagagggaaaggaagaaagcacagaaatcta

SEQ ID NO: 244770 - DNA, 473 bp, Homo Sapiens
tcctcctcctcctcctaaagagacactgcctgattcaggattttctgccaatattgaggatattaatgaagcagatttagtgagaccgttacttcctaaggacatggaacgtcttacaagccttagagctggcattgaaggacctttacttgcaagtgatgttggacgtgacagatctgctgccagcccggttgtaagtagtatgccagaaagagcttcagagtcttcttcagaggaaaaagatgattatgaaatttttgtaaaagttaaggacactcacgaataaaagcaagaaaaataagaaccgtgataagggggagaaagagaagaaaagagactcttcattaagatctcgaagtaagcgttccaaatcttcgtgaacacaaatcacgcaagcgtaccagtgaatctcgttctagggcaagaaagagatatctaagtccaggtctcatcgctctcaacacgttccggtc

SEQ ID NO: 244771 - DNA, 301 bp, Homo Sapiens
aggtgctggtttcttcaggcagagggtctcttcgatgtcagcatctcattagatggtgcttggccctgagaccatcagataggcccaccttcgaagaaatccagaaccatccatggatgcaagatgttctcctgccccaggaaactgctgagatccacctccacagcctgtcgccggggcccagcaaatagcagcctttctggcagtcctcccctctcctgtcagatgcccgagggaggggaagcttctgtctccagcttcccgtgtcccacctctcgggatcctctgagagcagcccccc

SEQ ID NO: 244772 - DNA, 290 bp, Homo Sapiens
caataccgtggccatgtgaagtggcaggatccagaggcacaaggaggcagtatactgtgccactgatttacctgtggaaagaagaggtaaatgggaagccaaaggaaagagaataatctaaggctagtatgagctagatcctgagactcacatggtctggggggtaaagaggccggagagctgcaaacactgggaggcaaggttcagggctggactcagagctagaacaaagacaggcagagtgagtgagcaagcaccgcgcactccttctttccagacccccaaacctt

SEQ ID NO: 244773 - DNA, 358 bp, Homo Sapiens
gcctggtggtgctgctcttgtattccttgcaatgtgattaagagtgccttagatgtgggaaagctgtttctgatcctcttatcagagtgtaaagtaaaacatgcttgactggttaataaaaacggaagacagttagaaaacatttgtaggctgtgcgatggagtggtccagaattgcagccagtagttggtgggctggcctgtggctgctctaggaagtgttcagcacaggaagtgacctttatatttcttcctagccttactgtggcctctgtctcttgaccaatgaagtgagctgactactgccatcttcctaagtaccataatccagcagcaccaccagacatacacgcgccgta

SEQ ID NO: 244774 - DNA, 544 bp, Homo Sapiens
ggcagtgcacctgtttctgtgttgttcttgagtatccctgattgtaaatgaacacattgccaggaagctgagaccaagaccaaggacgagatggctgctgctgaagaaaaagtcggtaagaatgaacaaggggagcctgaagacctcaagaagccagaggggaagaacagaagtgcagctgctgtgaaaaacgagaaggagcaaaaaaaccaggaagcagatgtccaggaagtgaaggcaagcacgctgagcccgggtgaggagtcaccgtgttcttccacgccatcatctctcttcatttcccattcaatcctgacctccataaagccttcatcagaggaggagaagaatttggggagtcaaaatgggacagcaatatctgtgagctgcactacaccagagacttgggtcatgaccgcgttcttgttgaaggcattgtctgcatttccaagaagcacctagataaatacattccttacaagtacgtcatttataatggggaatcttttgagcaatgtgttcattttactgtcagggtaccgag

SEQ ID NO: 244775 - DNA, 177 bp, Homo Sapiens
tcgtcgtcgtcgtggttcaccacttgagattctgggcagagctatgaatgaacacatttcaaatgctatcaatattttatgaatttccatccacttactttaatggggaactgtaaaagcatttaaccatattataccccatctctcaggcgctgcataattcctacagagctgtta

SEQ ID NO: 244776 - DNA, 424 bp, Homo Sapiens
tcggtacccgcctggaccctctctgggcaaggtgtagtgatacatactaggcaggagatgggaagaatttggcgtcgaaagattctcccatctcatctacagcctttttcgtcactattgaaaatgattttaaacttcgaaaaataaatctaatttatttagttagtataaataatctaatgtatttagttagtccaaataatgaaatccttattcaatgattgaggaaactttatggccccaatccacatccacctctaccaactaaaaagtgtggtttctgcttctcagtagcaatgaggtctaagccagcatttcatccgagcttaggttcctaacctgcgtttggcgtgggaagaattcagtggcaggttagaatgccaggagacgggagagccacaggcaggggtagagagggtccagg

SEQ ID NO: 244777 - DNA, 531 bp, Homo Sapiens
  misc_feature (82)..(82): n is a, c, g, or t
gccagtgcacacagggcttcttcaggccaaatcagctttctgcgtaaaggagaagacgtttggagttggtttcccaatgcgngagaccaccagccaagcagcagtgcccacggagccagaggcagcccagaccctccttggacctatggggagccgagggctaggtgagaactaggcaagctctgggatcctgagccaagccgcattggggctgaggtttgttccccgagcccagtttccctttgcagaatgcagctcctagaagcgcgttttgtgccgtttcggagctaggccctaggtgggtccctccctagctggctctgggtgggttgctagggccagtgcacacagggcttcttcatgccaaatcagccttctgcgcgaaggagaagacgtttggagttggtttcccgctgcggagaccaccagccaagcagcagtgcccacggagccagaggcagcccagaccctccttggccctatggggagcctagggctgggtgagaactaggcaagattgttcggggcctg

SEQ ID NO: 244778 - DNA, 427 bp, Homo Sapiens
cttaccgtaaccctatcagcccttttaataacatcaggcctaattatatgatcaggccccgaacaatccctcatatggggtctctaggaaggcaggggtcgcacacagctcacctcggcctttcggcggttgtacctcttgactgtctccagctgctgctgctccttgggtggctggtaggtgctctgggggacctgctgaagtggtgggaggaagagcctatggtcagcagctgcgagtgggagggggcctagaaatgccagggctgacagcttggtggatgtgggtgaaggggagggtggtggcggcctgcattggaggagaaacagggctggagctaacaccaccggatgctggtgggtcagcgttggcagtaaagggaaggaggtcaggctggtcattgttcggggcctggggtaccgagctc

SEQ ID NO: 244779 - DNA, 466 bp, Homo Sapiens
ctagaggatcccccaggtgtcataaaggaagttaagataagcatttattcaaaataaaacacaattcataaatccatgaatcttattttagcttttgattacccaagatttcatattttggccctattccctcataccagctccaatctaaaactgactcccaagtgggtaactcagctgtaattcaaatctgatattgttctatcttctatgctcttggcttcattaatcttcatacttttcaacatgtgtaaaccacatgcacaagccaggtttcttaaagcctcctgctccccatgatctttactttcccatatctgaatttctttctcaaaatgttgtttgcccagaaatttccttcaaaaagagagagcaaacttttataggaagaactattatttgcaaatggttagtgtaccacggagctgatgctttccttggtttatgacaccgtgggggatcctcc

SEQ ID NO: 244780 - DNA, 300 bp, Homo Sapiens
cacggtgtcataaagcatagtgtgagagtcagaggtgcatctttttagagtgacattcttttcaaaaacagaaaggaaaatattcaatataaaatatttgtcttacatttatttatgaacctgtttaaaggtgtaaattcatctttttagtaacttatggttcttgagaacttgggaaagggaaggaagatttgattttaaactttaagggagaaaatggataggagggatcagtagtttcaactgtagttagtctcatcagaaggggagaaagtacctagtttatgacatgtaagtacg

SEQ ID NO: 244781 - DNA, 401 bp, Homo Sapiens
tcatacaatatccacacaatacacttatgtacaattttatgaacagagaaaaccacacccacatgtactccttgaatatctaccagctaccttggttcactgtgtgttaggaaacacacccatctggtctgacaactttccatccttccaccatgcagcagtaacacacaagctataacccttctgagacctacttccccacaagcaaacttcaggttttcttcaaggtaaagtgccatatttatgtaatatttatgtatttaaccacttttaacatgtgtaaaactgcgttactgtttttattagtttcccatctttttttcatgtgtcactgacaacgattttaagtgctgtgcttctaaccttcctttttctcgtaagtatgtgtgatattgtatggg

SEQ ID NO: 244782 - DNA, 357 bp, Homo Sapiens
gttactcggcaggcgtctctcatgtgtgtcatctgcgtgtatgtcaaggaagtgagatgccaatttggggtcttgaggctgaccagttggggtgcttgggtgatctctgcttcattagtcatgggtggaagaaaaaccacaccccccgcacccctccgttctttctgcatagactcacttgttaaatagcagttctgttgagagtggagttactgcagggaagctaccggacctgcctgggagccagtgaagggcgagtcagggcacgcgtcctggaggctgccagcgtccttgtagcagagcagtttcttgccgcttgggtcttcagcacgccaagccccccaccgaccctccacc

SEQ ID NO: 244783 - DNA, 260 bp, Homo Sapiens
ccatctgattccatccctggaaccggaaacctcagttggatttgaagcttatacacctggaccatcctgacagcaagttacctgataagttgtctgcatttggaagaatggagcagacaagcatggagagaagggacgtgtgccctgattgtttgagggtttccaggctcattttctgcagacactgaagctcctctgctcactgtttcagtaaaagtggtctttgtagatcttcatttctgcatccccgagtatgcggt

SEQ ID NO: 244784 - DNA, 146 bp, Homo Sapiens
acttaatttcattcaataaatagagtgaataagatagaaataaattaagacagaagactagataataaaaatacaatgttacctctgactaaacatctctctattaagcaatggtatcgtagtttatattcatagcaccatcgcgt

SEQ ID NO: 244785 - DNA, 661 bp, Homo Sapiens
agtaaatgaacacattgccctccgtaggcagcattgaacttcttttggcagctagcagctctctgcagacagaaattctttatcaaagagtgaatttccagatccatcatgaaggaggggaaaatatcagtgcttcaccattaactagtaaagcagtacaagaggatgaagtaggtgttccaggtagcaattcagctgacctattgcgctggaccactgctaccaccatgaaagtcctttccaacaccacaaccaccaccaaagcggtgctgcaggccgtcagtgatgggcagtggtggaagaagtctttaacttaccttcgaccccttcaggggcaaaaatgtggtggtgcatatcaaatcggaactacagccaatgaagatctagagaaacaagggtgtcatcctttttatgaatctgtcatctcaaatccttttgtcgctgagtctgaagggacctatgacacctatcagcatgttccagtggaaagctttgcagaagtattgctgagaactggaaaattggcagaggctaaaaataaaggagaagtatttccaacaactgaagttctcttgcaactagcaagtgaagccttgccaaatgacatgaccttggctcttgcttaccttcttgccttaccgcatgtgttcatttataatct

SEQ ID NO: 244786 - DNA, 684 bp, Homo Sapiens
tcggtcctgatagtgaaatgacacattgccatcagacgcagtgaagcatgtcatacagtgagtgtctggtcacagcaggaagatggtgaatgtcagctaatgagtattcatcaccaatgaatagtaacagttttttttactaaggctatgtaatgtagcctcagaatcccactcagcatagccccctggcagcggtgcctctgagagctggcatgatggagagagcctggttggccttactggtgtggttggggcacttgggagaacgccttcctcacaaagctcatctggagggttttcggacttgtaggatagctttttcaggggccttgcctttggcagggcagggacgtgtactgctgcagtctagggtatgggataactttctaaaccagacccagaacttcatggccgcaggggccttttagccatgcggggctaggagctgacacagcgtcagcagcatgagggcctgtggtgctgggcggcagagcccagagggagcccctgctggtgtgactttagtgtaaaggctgggggataccagattcttacagaagacttaagacgggcacagtgatgtctgctcttgtgacccttgcagtatgaattagtaaaactgaaattattacatttcctctattaggataataaaagcaatgtgttcattatactgtcagggga

SEQ ID NO: 244787 - DNA, 479 bp, Homo Sapiens
ggtcgagctgtagaggatcgcctgacagtaaaatgaacacattgcctggtgtgcgccgttgacaagaggttcttgccagatgacaatggccacaatgctcttcttggtttctctgggaattgtgttggctgtggaaagaaaggcttctgttacttcacggaattctccaatcatataaatctgaaactgaccactcaacccaagaagcagaaacacttgaagtattacctggtccgtaatgcacaagggactctaaccaaaggacctttaatctgttggaaaggctcagagtttagaagccggcagatccccgccagtacttgttccagttccctcttcccagccctggagagcacggctgccttccccagcgagcccgttcctgggacgaaccccagcatcctgatgggagctcagcaggcaggaccagcttctgatcacccctcactaaacgcagcaatgtgttcattttactgtca

SEQ ID NO: 244788 - DNA, 428 bp, Homo Sapiens
tatattttacacatttttgggccatgaaaatggctccttagacccagagcagggcatgatcccggaaatgtgggcccctatgttggcacaggcattagaggctcttcagcctgccctgcaatgcttgaagtataaaaagctgagagtgttctcgggcagggagtctccagaaccaggagaagaagaatttggacgctggatgtttcatactactccagatgataaaaggcgtggcaggtgccagatgtagagaagagaaggcgattgctagagagccttcgaggcccagcacttgatgttattcgtgtcctcaagataaacatcctttaattactgtcgatgaatgtctgcaggctcttgaggaggtatttggggttacagataatcctagggagttgcaggtcaatattctaacccatcacccggaa

SEQ ID NO: 244789 - DNA, 200 bp, Homo Sapiens
tgcagtgcaagaaagccttgctgacacacccttggcctgaagcggtgagcacatgagattgtgtgacaacgcttcagagaaaaacagagatctgttcctccaagctcagattgatttaacatccttgcttctcctatttccttcctggctttacatatttgtagggtttttactccttctccagagcctactttttccta

SEQ ID NO: 244790 - DNA, 255 bp, Homo Sapiens
ttgaaatgggcacagaaattttcagggtatgacagctaaagggtgtttttgaagaaaagagtttttgaaggaaagagaaagttctaaaatttatcaggtgatagttgcacaattttgtgaataaactaaaaaccactgacttgtacactttaagtgaattgtatggtacaggaattatatctcaataaagctgttacactcaccccacccgccaaaattgagatataatttctggccatttaagggatcctctag

SEQ ID NO: 244791 - DNA, 351 bp, Homo Sapiens
ttgaaatgggcacagaaattattctgtatgacaccataatagtgaatacatgtcattatacatttgtccaaacccacagcatgtacaacaccaagagagaaccctagtgtaaactatggactttaggtgatgatgtgtcaatgtcggctcatcaactgtaacaaacataccactctggtgggggatgctgatgatgagggaggctgtgcctgtgtgggggaaatacatgggaaatttctttagaactctggagcccaggtgccagggtggagtctttgttctcccactttctagttggttgtcctcagcaagttacgtaatttctggcctcaatttcaacatcggtccggc

SEQ ID NO: 244792 - DNA, 633 bp, Homo Sapiens
  misc_feature (364)..(385): n is a, c, g, or t
  misc_feature (476)..(496): n is a, c, g, or t
  misc_feature (501)..(515): n is a, c, g, or t
  misc_feature (519)..(530): n is a, c, g, or t
  misc_feature (565)..(574): n is a, c, g, or t
ggctgtgaatgcatcttaggtataaaaatgcaatacagatttttatattttggtgtggacatggctcattttgttttaccagttatttgcaagcaaaatgtaatttaatgtatagatgatttctaatgtctcctgacaaactgtaaatactgcatttcttttgcgtatataattgcttacagcttttctcatttgatatatagcattgtacatatgacaagtcttttgcaaaactgtgtgatctttgtgaaagtagtacagtatatgacctttaatttcttttttattttaaatatactgtcacactgaagcactggttgggcattttaattcatgttaataaatcacaattatgtcagttttnnnnnnnnnnnnnnnnnnnnnngtgcaaccccacaacaggtacccggggccaaacacaactccccaacccaaaagcatcatgggacaaaaccacagcccctcctcccgccttnnnnnnnnnnnnnnnnnnnnnaaacnnnnnnnnnnnnnnnaagnnnnnnnnnnnncttggggtgggggggcgctctccccacccccaagnnnnnnnnnntctttttgaagaacaccctttctttgttggtgcgggcgcccacccgcgccccaccatac

SEQ ID NO: 244793 - DNA, 283 bp, Homo Sapiens
ttgaaatgggcacagaaattccaaaacactagggacagagctttgaattttaagtacttgaagttcccaggccttaaatttatataaaaaataagtaagtctgttgtattctcttatgtacgttcattgacctataaaattctcttaaatacacccattggtctatccattgaaaagatacatatactgtcctaggtaatattattaagtctgaacacttgagaaggaactgaatcactgcactattatcctagagcatacctattttctgtgcccatttcaa

SEQ ID NO: 244794 - DNA, 637 bp, Homo Sapiens
aggaaggcaattttgcttgaattagacgtaggtcaagtagttaattttatagacattaaaattctggcccactttccatggaatgggcacagaaattatttgggctatgtggagcaagctgtcttgcataaaaagctatattgggctctagagaaagtgagaatggaaagaatttgagagatacgtgagacccaaataaatcaaagacacaattaagaatgttgaatagaatacaatgacaagaagcctttccaagacagtaaatccaaaaagcctgctaaatagcataagacaggaaaaagataaggaagcaaagggtggctgggaagctttaatccagagctcccgatatacaagagaggcatcaactttctttttaaaactgtttgcatttcctatcaatttctgtgcccatttcattgaaatgggcacagaaattggagtacaggtacttatggattttgctctaaaaaggagcagataaatagagcaacagctgaaagagtatgtgggataaagtgatttttaaaataaaagatattccaagaaacacttaaaggatattatccatagaagaagaaaaattgattatggatgaaagagaagagaaagtagagaatttctgtgcccatttcaa

SEQ ID NO: 244795 - DNA, 195 bp, Homo Sapiens
acctgaaatgggcacagaaattcattctctgctttcatctctcaaagggatccaattcataactcagagctgcaattaaaaattcacgtcttccattttctgacttgttctcattctctgactgtttcagagtctccccacacatcacatgaacccaaatcacattctcaatttctgtgcccatttaatagggga

SEQ ID NO: 244796 - DNA, 130 bp, Homo Sapiens
ggccctgtatttgggcacagaaattttagaaagaatcaagtttgccacccaaatgctaccactgttaatcttttggtgttaaatgttccccctagacatttctgtgggggatcgctctagaaatcgtcct

SEQ ID NO: 244797 - DNA, 185 bp, Homo Sapiens
ttgaaaagggcacagaaattttagaaagaatcaagtttgccatcccaatgctacacactgttaatcttgttggtgttcaatgttccccctagacatttctgtgcatagatatctgtggtgtgtttacatagtcgttattctgtatataccatttctgtgcccatttcaagggtaccgaggctaca

SEQ ID NO: 244798 - DNA, 321 bp, Homo Sapiens
ttgaaatgggcacagaaattaaaattcgactatgcaagggttgtgctagtcatagaaggaaggacattgtactgggacatcaggaagaccagattctggccctgtctctgtccccactggctgggagaccctggacaagtgcctttgttcctcagggctttcctcttctgcagcaatgaagcaaatagagggagaagctggatgttgatgtttacctgtgatccatttctggctctaaagttgtgagtttatactgatattagcagccttacagtgtcattttaatttctgtgcccatataaacggggatcctgctagaga

SEQ ID NO: 244799 - DNA, 205 bp, Homo Sapiens
ttttgcttcgtactgtgtatggaacagtttggtatgaaaattaactgtagcaaaagcatagttaactttagtagcatatctaggcatctcttttctcacacatcacgtctagatacagatagcaaatcctttaggctctgccctcttagaacaggggttagcagattatggcccccacctctttatagttcatgagctacaaatg

SEQ ID NO: 244800 - DNA, 272 bp, Homo Sapiens
ttgaaatgggcacagaaatggtcattatgtcctatagggtgtcggaaatatagtcaattggtaatttagcctagacgaccttaaatggactaagaaatagaattatgtgaataatgtatttttcctctttattatgtaggtttaattgaagtagtatattattttcattacacatttacagtgtagtatagtactatctcacatataactgctgggtgatgaaaaatagccttcacaaactcatgttccgaaactttctgtgcccatttgag

SEQ ID NO: 244801 - DNA, 474 bp, Homo Sapiens
  misc_feature (76)..(76): n is a, c, g, or t
atctccacaaatttctgtgcccatttcaattgaaatgggcacagaaattcaaatggcataggaaaagttcataacnaaaaaaaataattacctacccagaaagggcaggtgctctgctaaaatttttattagaacacatactgaaggtgttattagaaaactacataaagtattgaagtatggagttaacataaacaaagacattcacaataataccctcaggaatattaagtcaatgagaacgaaaatgctgaaattatagggaatgaataagagaaatcagaaaaacagagaaccttggctcacctacaggataatctttaaccatagaaagctgtcaatttcactaatatcaatttccataataaaatgtaacttacacatgtatacacaaaagcaacaattgtatttttatgaactctgtgggatttcagagcacagaaatgtatccaataactgtgggccgagctcgag

SEQ ID NO: 244802 - DNA, 262 bp, Homo Sapiens
  misc_feature (45)..(129): n is a, c, g, or t
tttaaatgggcacagaaatttattacttttttgtagagatggggnnnnnnnnnnnnnnnnnnnnnnnnnnnnnnnnnnnnnnnnnnnnnnnnnnnnnnnnnnnnnnnnnnnnnnnnnnnnnnnnnnnnnagtatgagccactgcacctggcctaagggtcttgctttttaaatccagtcttacaattggtgtctctataccattcacatttaatatgattctttctctgccttctgttaattgatttctgtgcccatttcaa

SEQ ID NO: 244803 - DNA, 137 bp, Homo Sapiens
tcctgatatgggccagaaattagaagagaaatatttataattttaacaaacaaattacagtaaaaaatgtacatgtctcagattaagccaaggagtacgtatccacaagtaatcagaaaacaaggagctttcttttt

SEQ ID NO: 244804 - DNA, 287 bp, Homo Sapiens
cacagaaattctaaatgcaaatgcttctgagggaggcacgtggaatgacttaagattcttaccaaattagtaactggttgatgtcaagggtccacagaaagccactatctacggaaactatctacctgaggctgagtctgtgtgacacatgggggctgtcagggatgtcggacggtcagatactgtccctcaccggaggtgctgtctgagaatgctgatggataagggttaatgcacctctgtcaaggagtgtgtatttctgtgcacatttcaagggatcctctaga

SEQ ID NO: 244805 - DNA, 430 bp, Homo Sapiens
atacggaaagtcagttatttcaatgctacaatgtgtaattaagtaaatgtgttaatcatttggcttacccttacaatactgtattattccaagaatgaaagttctgattttaactaagccacaattcaatgttgagtacaagaaagtctacctctacctaagctgcctctatccctgacatggtcacaacctagagatcaagcagccagtttgtcagaggcattggaaccagagcaattccatcttgaagaggcagtaggtaaaatcaggcagagacctgttggctgcattcttagtagtcacaagatgtttagggttacaggaacagattaataacgttcactaaacaaacccaggacttaacagacccaggaaacattttgatgtcgctgtatctgttagtccaaactgcaccattttctttctttcc

SEQ ID NO: 244806 - DNA, 560 bp, Homo Sapiens
tcgagctcggtaccatccatacggaaagtcgcttaacctctcggaatcttgtttctatctagaacgtagggacttgataactaccttgcagtgttattgtggggcttatgtgaaagaaggaattttcaaatgcttcaagtagtgcttggctcattaaatactgattgaatctgtatctgaacaaaggtgattttgtatgagcctgggactcaagatgggccagacatgaggtcgaacatacagagctagtcctgctgcctctgatctgaggcagccctcgtcagaccctcctcctcaggtgtacatgtgtgttcaacccactgtctggcagagagggagatggaggggcagggtggctgccagagtggtttttgccctacagccctagatcagcacactgctcctttagctggcttgggtttcttataattgttagaagcaaacctgggcatggtgcctattgtgtgtactcccccagtcatgggtttgctttccaggtcagtttagcatgtgccaatcctaggatgataacagctaactgagaggtccgagctcgatca

SEQ ID NO: 244807 - DNA, 462 bp, Homo Sapiens
cggttagtctcagattctgtatctgtctcaagaattattattggagacataagtaacctctaattcggttagttgaaattcctattaagactgatctctgtcacagatcaaaatactgagaatttgtgttttaccagcaggtggcacctcctgcctgctgcctcaattttaatctttacccttggtgaggaacctcaccttttccttagagtcagaatatgtaaggctattcactatttttgcttttctccaaagatcaatcaatatttgtcctgtcttagttatagaaaataacttttggatcttgtcacattttggacaggttgtggcttttatttatctgagaaaagatttcaacctataattataatttatttgtatcataattattatggtaggataaaaaggaattacagtgttttctgtctcatacatcttgagactgcctttcttacgggtacg

SEQ ID NO: 244808 - DNA, 379 bp, Homo Sapiens
ggagcaggcaaatatatttttatgtggtataatgtcattagattatttcctgctgcttaagacagcaacttctggatgacattttggaatgtattctgtggctctaataattgttggtaaagatattgagccttctgttttcttgaggggagttggggtgcttgtttttgtacttggaaagggagactcgtatctcttgcttttttctttaattaaatttctgttttttacattaggacatgatagccatcttgcttctttctttaaaaagctgcctggaatgggagtttccagtggtagtactgcatgaagattcatgagactataaagctctttggaaaccccccaacttagcccttccactttcctacatatctgg

SEQ ID NO: 244809 - DNA, 272 bp, Homo Sapiens
tcagctcggccctagggatcttattaaaaataattgtttttttactgccttctagtcttctgtttccttactaatattctctcttgttttattacagaaagtggagtattgaaatatcctactataattgtattgctctctttgtgtttattcagttttgttagtatttgctttatatagctgaaaccccaatatgagacacacacacataaatacacacatgtatatacaaatttttaataagatccccaggtgtccgagctcgatcgtac

SEQ ID NO: 244810 - DNA, 187 bp, Homo Sapiens
actgtacttaatgccacttcactgtacacttaaaacattattaaaatggtaaaatgtatgttacatgtatttaccacaattaaaaaaaacatttttaaaaggaagtagtaaagtgttgaccctattaaaaaggaggagggcagtattttgggattttaataagagcccctagggtccgaactgagtg

SEQ ID NO: 244811 - DNA, 584 bp, Homo Sapiens
gattgccttgttaaaatgttccagccgtttgcttgttaaagtcaccccgttctccgttctgaggtaccgaggggacacaatgcactgtggaagcccacagggacctctgcccaagaaagcctggttgttgtctaagttttcccgcgattgagatagcttgagatatggccttgtgggaagggaaagacctgaccatcccccagccctacacccgtaaagggtctgtgctgaggaggattagtgaaagaggaaggcctctttgcagttgagataggaggaaggcatctgtctcctgcttgtccctgggaatggaatgtctcggtgtaagacctgattgtatattctatttactgggataggagaaaactgccttatggctggaggtgagacctgctggcggcaatactgctctttactgcactgagatgtttgtgtaaagtcagacataaatctggcctatgtgcacatccacggcgcagcacctttcctctaaacttatttatgacacagagtcctttgctcacatgttttcctgctgaccctctggccaccatacctatagtcctgccacatccgtactgccg

SEQ ID NO: 244812 - DNA, 424 bp, Homo Sapiens
  misc_feature (150)..(150): n is a, c, g, or t
  misc_feature (176)..(176): n is a, c, g, or t
  misc_feature (258)..(258): n is a, c, g, or t
  misc_feature (278)..(278): n is a, c, g, or t
  misc_feature (303)..(303): n is a, c, g, or t
  misc_feature (312)..(312): n is a, c, g, or t
  misc_feature (324)..(324): n is a, c, g, or t
  misc_feature (331)..(331): n is a, c, g, or t
  misc_feature (333)..(333): n is a, c, g, or t
  misc_feature (338)..(338): n is a, c, g, or t
  misc_feature (364)..(364): n is a, c, g, or t
  misc_feature (397)..(397): n is a, c, g, or t
gacgctgtatttgatttacaatgaacaagatttacaaaagggggtggggtggtcttggaactgctcccagtccccccggactgggtggggctctagggcagcctgtctgacagaccaggaccccaggatgtctgggccccgacgtagganttgacctacgtctcacttgacctttnacgtggggcccagcagccgtgagtccacccagagtgccggcacccttggggaggccgttaaggtcaggaaggcatcgtaccnttttttctcctcctcccatntcgtggtggacagacagacataggntctgggaanttgccctggggncaacagntncagtnttcccccaggggcccaacctaggggnatgggaggcggttgttggttcctttgggcggangcggaggcagcttcccccagtttggca

SEQ ID NO: 244813 - DNA, 534 bp, Homo Sapiens
ccgcctactactactaaattcgcggccgcgtcgacggggcaaaagcacctgctcgggtgattctgggggcccacttgtctgtaatggtgtgcttcaaggtatcacgtcatggggcagtgaaccatgtgccctgcccgaaaggccttccctgtacaccaaggtggtgcattaccggaagtggatcaaggacaccatcgtggccaacccctgagcacccctatcaactccctattgtagtaaacttggaaccttggaaatgaccaggccaagactcaagcctccccagttctactgacctttgtccttaggtgtgaggtccagggttgctaggaaaagaaatcagcagacacaggtgtagaccagagtgtttcttaaatggtgtaattttgtcctctctgtgtcctggggaatactggccatgcctggagacatatcactcaatttctctgaggacacagataggatggggtgtctgtgttatttgtgggatacagagatgaaagaggggcagggactgcttcagtttctgtcgac

SEQ ID NO: 244814 - DNA, 534 bp, Homo Sapiens; identical to SEQ ID NO: 244813

SEQ ID NO: 244815 - DNA, 329 bp, Homo Sapiens
cggcggtgatctgagaggacccgtgcagatgacattctttaacaataaataattttatctcacatctttagtcaagtttctcctaagttgggggagaatggggaagaaaatgtagtaggctttgtggggactagcaacagaacgttttatcctattttgtgactttcagtattaagagattattgatcacgttgcagagttacaaggcaagcactagtttaaatctgaattagactagggccattgaccttatatacctgttaaggacactacggtgtatacgattgtagagacaatatacacataatggggtatcctaagggtaccga

SEQ ID NO: 244816 - DNA, 206 bp, Homo Sapiens
cgagctcggtaccctatgtgaactgatccaaaatctcaagctttattaataaagatgaagaattttccaaaaggttttaaaaagtgagtgtcaaggggaattgtgttacttctgtactgggagcttataggactgccctatgtgaggaacgttaatcccaggacatgaagataagctagttgattgccccgattctgaaatgacac

SEQ ID NO: 244817 - DNA, 300 bp, Homo Sapiens
ggcaggcagtgatgctgaggtgatctagaggatcccgctcattcttcaatatttaacctctctaaaggaaaaacagccaaaccattttaaaaacaaagatctttctcgcctcaaccctttccctcttctccccttcacaaaccttgttccatgccttgtcttccgatgaaccacaattctccactgaaccgaggtgagagtgatttgtgcaactatcactccactgaagttgaaacttcaatctttttaaagttcagaggctacttgtctcattgacacataatggggtagggtaccgag

SEQ ID NO: 244818 - DNA, 238 bp, Homo Sapiens
cccaggagaagactgaggcggaaaaagcagctattgggatgagaaaactcaaaaaatgctggctccatagagattgttgctcacatttaaaacccttacatctattttagaaccaaaacaatagaaattgagaagctgactttaaatttcatgtggaagccaggcatggtggctcatgcctatgatcacgcacataatgggtatcgggatcctctagatcacctcgcatcactgcctg

SEQ ID NO: 244819 - DNA, 638 bp, Homo Sapiens
gaaaaaagtggaactggctggagttacagagagagagtctggggatgcgtgagaagttaattccttcaagtcagaggtgatgaccccttggattagtgggagatacgggagggaggctgtggtcccttcccatggagatcttcagagtcaccctgcacaagctgcagagagatgcaggaggcggcctcagctgctgggtcagactgcccttgctcctcaccagcctacctcccttcccagatcctgaaccactggagtcttcactgagaagcttaacagtccagcaggcccccatcatgagagcaggctcccttcggggtgggtggatgaggccattgtcatggatgagggcagggtcgaaggagatgccgtcggtatagagtgtgactgtggggaactcgaggttcagagcgtagtggtgccactcatcatcacagacctgggagagtagggtaggggcaagagcctctcaggtaattcgtcttcagagagctaaccctaggcactgccccatctcctgggagacaggggacagtccctttattcccagttctaccaacagggcttactagtgctttgctgcctatccagctcgaggaataacatccttgtcctcactacatgccaggggtaccgag

SEQ ID NO: 244820 - DNA, 520 bp, Homo Sapiens
atggcatgtagtgaggaacacatgtcttccatcgaggctgtggaaagtgacttgaggactcgcgtcaatgggtgggaggcccaccatctcctcatccagcttccctggagtcagctcagggtccagctccacagaagatcgcagcccctccatggcaccacagtcaccacagggctccgcccagtaaccgtggatcccacagccacaacagacacccagagaacaccctgacattccgcctggcatccaaccagcagcgggcaccctgaactggtcaactgtatgatcagctagagggagaaatttgtaaatagaagtatacatttctctattattgtttaacagtaatacttttctgttttcttattcttttatattaaccaaaacttaaaatatagtgaagtgtgcagatgttaactgcatgatttcagaaattttaaaattttatatttctttccgtagcccgcagccctctccatgtatggctcatgtcccattacaccagaaatcttacctccca

SEQ ID NO: 244821 - DNA, 333 bp, Homo Sapiens
ctcgggtacccatggcatgtagtgaggacacagattttatgcaacctcaagaaaagaagacaatccagtgagaaggaaaatgactcaggcactttggacacggtaggcgctgtggttgtggaccacgaagggaatgttgctgctgctgtctccagtggaggcttggccttgacacatccggggagagttgggcaggctgctctttatggatgtggctgctgggctggaaatactggagctcatcacccctactccccagctgtgagtacctcaggatgtggagagcatcttgtgcgcaccatactgctgagaatgtcctaacctacatgccat

SEQ ID NO: 244822 - DNA, 441 bp, Homo Sapiens
actctagaggtccccgcatgtagtgagtgacacagatggcacgtgggcagataatgccagtgagtaacactaggaggggcggttgagttctagggaggggagagtaatgagtaaataagcaatggttcttaaatccctgcaactggacatctctctcctcagtgaaaaagaagaaagggcaaggcgaagactctttgtatttagccaagtagatgtgtacagaagtcagtgttttatcagaatatgctgttttgcaccaagcaatctgggtggagcacagtgtgctgactctgttatctacacatccccctgcagctttcctcgtgttgggcctgagtgtcttgaccagttagggagttcatgccatcaccaggcttggaggcctggagcctcgctctcctcgcgctgtttcttgtcctcattacatgcgatgggtaccga

SEQ ID NO: 244823 - DNA, 606 bp, Homo Sapiens
  misc_feature (113)..(195): n is a, c, g, or t
ccattaaaatgccagtataaggttgaagaacgacacataagaactaaacggttaagaagatatcaggtggacaaaaagtattaggaggactagggatagtggctccttcctgnnnnnnnnnnnnnnnnnnnnnnnnnnnnnnnnnnnnnnnnnnnnnnnnnnnnnnnnnnnnnnnnnnnnnnnnnnnnnnnnnnngcgtttatctctacgaaattttaaaaattaggtaggttcagttagcatacccctgtagtcttagttacttgggaggttgaagtaggaggaaggcagtacgaaagagtgtaatggttgggacatttagtgggttagtggaagaatctggaaggatcagcatctactaaagaagttccaaagtaagtatgaagagaaatgaatacaggacattttcaaagagctaataaagaacacttcccagcattacaaatcatgagtccacatacttagcaggcccattgagtacaaagcacattccatttcaaaagatagccggcgaaagcacatcaatactcacctcacctagggataaaaagagatcctagtttgagaccggcctgtgcaacagtgtgtgtcctcactacatgccat

SEQ ID NO: 244824 - DNA, 505 bp, Homo Sapiens
gagctcggtacccgccaggccaggattgggaaccttctggttcaggctcccttcctttgctctctgccatcttctgtcttttggccaatattaacttgaatcccatttcataccctatcattttcttctccctcatgtagctctgtcccatttctcagacctacatttgctcacatgatttggttatagagtgatttctggaaggtcatggctagagtggtccttggacatcttttagtttaatccctggtattagaaattccaccagagggaaattggcctgctcaaggctacttacctagttatggagtaagacttgatcttcttttccccagttctcttgccgtctggtgtctggctcttcattttctgtgtgccgttccccttttcttacagtttccagcggaagggaatccccgttgtgacccatgtaattgacacaagcagctagcagcattccaggaccccatgccacctgcctactacatccaggggatccttagat

SEQ ID NO: 244825 - DNA, 305 bp, Homo Sapiens
gagctcggtacccatggcatgtagtgaggacatgagatttgtggggtcagggacagaataatacggtttttctctatgccccttcccaagctcatgtgaaagtacactccctcatgttagagtcggggcctaggtgggaaaatctttaatcataaaggggtgggagtggatccttcacctatggcaaagcactaagcccttcatgccatcctcctgatagtgacgtcgagttctcatgagatctagtagtttaaaaggctgtggaacctctttcctctctctgtcttgtcctcactacatgccat

SEQ ID NO: 244826 - DNA, 274 bp, Homo Sapiens
gtgatctagaggatccgggaggaggatgtggtcaatacacaaaagttaggtaaggagctgagaaatggccactagatgaacaattctggtgttgcgtggtgaacaaatccacagtatactgatcttattctactgtggggatcgggggggcagataaattggcaaatatgagaggattatagaaagaggtttgttgggggcacaaaagttggagtggccagtaatgttagggagagatatcagaaaacatttagttgtcctcattacatgccat

SEQ ID NO: 244827 - DNA, 345 bp, Homo Sapiens
tcggtacccatggcatgtcgtgaggacagaagaatcacatcccaatttctggcatgactcccaagtgcactagccggattagaggacatgcgtcattcccacttgagaatctcaataataatataagctggcattccccacatcttgaatataaattagctttggactactctatactgtatagataaatactaggattacattagttggtatgaagtgtatggctccgaccatagaaaggtatctttcttttcccgaagtgatctgacacatattccatgggaaattacatttatatgtgtatggatttctatcttgttcactgtatgtctcactacatgccat

SEQ ID NO: 244828 - DNA, 364 bp, Homo Sapiens
ggtacccatggcatgtagtgaggacataggaggtgagccgtagtgtgcagactcaaccctgatgcctgtagatattgcttaggcttagtgtagagaagaaatcagctctcccagggcaacttgccattgctaggtttagttaggagtgagttctgttttgttaatttcaccaatatttgcatttcatagttgtaggttatcagcccattttgagaatttaaggtgcttatcccgtgttcccattatattaacttcaccttcaaacatgatgtttgactatgtttcccttactcaaaagtaataccatagtctattgtagaaagttttctggtgggtggagataagaaggggcctctagatcaac

SEQ ID NO: 244829 - DNA, 242 bp, Homo Sapiens
atggcatgtagtgaggacatccatttgctgactcaaacagttactgagtcgtctgtcaacttcctgacctttgtaagtctcctggcccctctgcttgtcctttgcccctggaattccttttcttgttcttcctagttatttccgtttttttcccctcctaccccctgaagacactggcctgggaggagccttgggattactgtgtgccatgccactccctgcctgtcctcactacatgccat

SEQ ID NO: 244830 - DNA, 488 bp, Homo Sapiens
ctggcatgtcgtgtggactatgacattggatggctactgatggagtaaacctgtgctttggagagagacgatgaaaggttgaggatgatggctctccaattaaaggctaaggacgaaagccagtgtgcctccttagcagccatatcaaggaagtaggagctgcatcaggcagccacagcggaagatgaagctcaggatttaattataagagcagaagaacgccctaaaggttttccgccctagtgagtgtactataccaaggtcaggagcatagttgcagaagtgggaccctgacactttagatggggcatctgggtcactgcacttgagaaccttaaaaccccacatcaccttgagtgctctgggtctctagaagtgtcccactcctccctcaaggacactagcaccccaaccattggcttgaagatcacgaagtattatctgccttggcacagggaacacccgctggtactcactacaatgccatg

SEQ ID NO: 244831 - DNA, 773 bp, Homo Sapiens
tgtttccctttgtctataaatgtgatacattgagttatctttggcaaaatgaagcttacatgtttagaggacaggggaaagtgattacactttgagaagtgtttacttgtattttagccaagacacccaggcgtaaacagagtctgactttgttaggtcacactcattttcacttataggaaattaagatacaggaagcagttgttaatcagcctaattattctctgattgggcaagatagggcttgttagtgatacctgaggtgagtttccactgtaggtgtggagagaagcaattaccagatggaggaaaaagccacctgagtggtgtgaaatttgtctttccctatgggttagtgtcccactgggacagattctgaccttcctaggtcatattattgtgaccttgctgctagtgattactttggatgttatgtactattgccctggacaagtttcttgcccattctcttcagataagccaggaacacatttattgaagccagaaaaatacaggtgttagccaacagtgactttaaataaatacatatgtgtatatatatttatgtccaaactccttccaaaggccctgtgatcagcagccctacctacatctgtagtctcctcttaaactggtactcttgtgcccagattgcttgactgcagtggtcactgttttatttaaacatgctcgacgtcttgataccctgggcctttacatacatactgttactctgactggaattctctttcatgtgtcctcactacatgcca

SEQ ID NO: 244832 - DNA, 644 bp, Homo Sapiens
cagtgtgctatccgcatagagcagagttcctaacagcctttacccaattccttgatcacataagcaggcttttagtttatgctgctctgtgctgctttgtgttgcttaagtttctgtgtctgttcccagacattttcttgcagctgcaggcatccccccaccctccctgtataagcttctcgcttccgtatcttagtgtgcctaaacggaaaggaatgtacttattaagtctcacagtttttactggggcccattgtatgagtatgaagtcgagactctcccactcctgtgcttgtttatctgtgcttaaagctgtctatctgtccaggtgcaacctgaggttttcccaaggttgttttattttttgcctgttgctgtgacttttcaggtaggctgctgctgcagtctgaattttttcaatgatttttccttcccgtctctctcattttcatttgcatttaagaaaatttccagtaactacgacaagttcacatgctttttacttactctattttctctggagcggagtccttgtgtgagaggaagcagcagagacctgggaaaggagctttggtctaggagtcaggaatcagggatctactgcatagctttctaagtgccttccactccacacttgtgccctc

SEQ ID NO: 244833 - DNA, 1203 bp, Homo Sapiens
ccagaaagactaaaatcactgaagatagtagattggaaagggttcaaatgccagtgaaatggtatacccagaaaaatgatggaaaggaaaacggaacatgatgtacatctggatcagtccctgtgaatacagcaacacacttacaaatgagaaattgaaaatagaagagtatataaagaaagggaaagaggattatgaagagagtcatcagagagctgtggctgcagaggtatccgtacttgaaaactggaaggagaggtgaagtgtataagctacagatcaatggagtcacaagcagaagcctttctgaagaatctggggctgtattagccgtgatcctgcagcatatcctgacatggagtctgatatacgttcatgggaattgtttctttctaatgttaccaaagaaattgagaaaacaaaatctcagtttgaagaacaaattaaggccattaaaaatggttctcggctcagtgaactttctaaagtgcagatttctgagctttcatttcctgcctgtaacacggttcatcccgagttactccctgagtcttcaggccacgatggccaagggcttgtgacttctgcaagcgacgtgactggaaaccacgcagcacttcacagggatcctagtgtgttctctgctggtgattccccaggggaggctccttctgcgctgttgccagggccacccctggtcagcctgaagccactcagctgacagggccaaacgggctgccagcagctctgtcagaacgaagccctgtggctgatcggaagcagcctgttcctccaggacgtgctgcgcgttcaagccagtctccaaaaaagccgttcaatagtattattgagcatctgtcagtggtattcccatgttacaacagcactgagcttgctggttttattaaaaaagtgcgaagccaaaacaagaactcactctcaggattgagtattgatgaaatcgtccaaagagtgacagtacacattctagatgaacagaaaaagtaaaagccaaacccaggaaaggacaagaggacttatgagcccagctctgccacccccgtgaccaggtcctcccagggctcaccctcggtggttgttgcaccatcacccagaaccaaggggcagaaagcagaagatgtccctgtgaggattgcactgggtgcaagttcctgtgaaatatgccacgaggtgttcttactc

SEQ ID NO: 244834 - DNA, 600 bp, Homo Sapiens
gtaaagctctcagaagagtacctgtttattagcacacgatgctatatagatgcttgctgccattattataatgccagataatttggcaggaggccaacttgtacaaatccttacaaatttcacaaagacaatgtccagaaatacagttaggtactaaaatgagttattcagaaagccttatgagacagtttttacacaaccagtggccaaactatcaccacataaaaatgcttcaactataatctttagagaaacttgtggcacactctgagccatgaattatatgagcagaagagggccttgagaacttcatatgctgtgacctaagaggcagatgtacgtggcaaactgattcttctggcaccactcagctacatatctgccctgaagtatgtatagttatggagcttgcccaccaaactactgggatagtaaagggtgaggtaacgatgctttcaatattgattctttctctaatttcataaactctgtatttctcctcacatctgatgaaggaccatatcagagggctatcgttcactacccatagtgaactggtctttctgccattggaactctctgatattggctcggcatctc

SEQ ID NO: 244835 - DNA, 434 bp, Homo Sapiens
aaaaagacaggacacaaataaccataagacaaatgaggtatcagaggtacacttaaaagcactgagaatctttaaatctagtaaatttaatacaaaatatggtaacttcaatattcgttttgtgtttgttttttaaatacaggatgattcaaagccgccttactcctacgcgcagctgatagttcaggcgattacgatggctcccgacaaacagctcaccctgaacgggatttatacacacatcactaaaaattatccctactacaggactgcggacaagggctggcaggtaaatgccttcagtttgttgttaaatagaggctgatggataccgagaagaaagtggagcggctgctgtctgggtacacaggcacaggataggaaggtagaaggggggttgacctcccgtgctgagagaaatgagatgttgaaag

SEQ ID NO: 244836 - DNA, 511 bp, Homo Sapiens
  misc_feature (400)..(400): n is a, c, g, or t
caaaaaacagccattaaaaaccagtgaggtctactctgatgatgaagaggaggaagagggtgacaaatccagtgaaaagtcagaccgctcatcacgaacatcatcgtctgatgaagaagaggagaaagaagagatccctcccaaatcccaaccagtttccttacctgaagaattgaatcgggttcgattatcacggcataagctagaacgctggtgtcacatgcccttctttgctaaaactgtcacaggatgttttgtgcggattggcatcggaaaccacaacagcaaaccagtttaccgggtcgctgagattacgggtgttgtggaaactgccaaagtttaccaactaggtggcaccagaacaaacaaagggctgcaactacggcatggcaatgaccancgcgtgttccgtttagagtttgtctcaaaccaagaattcaccgaaagtgagtttatgaagtggaaagaagcgatgttctctgctggcatgcagttgcccactctagatgaa

SEQ ID NO: 244837 - DNA, 420 bp, Homo Sapiens
tttgagacctcgggctggttacctaactcctgagcctcagtcttcccatctgtgaagtaggtggcaatactcttgccacggaatttaggagaggactggatgaagtcacatatggaaaaaggacaaggctgcagggagacaggccggcagccatgactttcatgtctaagttcttgaaacctaaatgtgtgtatcaactgagacaacccaacaattccatcagcatccctgcagtcagatatactgctaagctctgatattatctgtcattatctgagaacagagctctgtccttcgcttagggtgagacaggacaagggaggagaggcaggccagtccacccagatccaaggatatgcaagaatggaagggtcaagagccacggatatgtatgcagtggaaatgtagggtgtgctttca

SEQ ID NO: 244838 - DNA, 321 bp, Homo Sapiens
gtaccgtgtgtcgagtaagggaaggaggaacatggagaggagagcagcgggcccaggctgggcagcctatgaacgcctcacagctgaggagatggatgagcagaggcggcagaatgttgcctatcagtacctgtgccggctggaggaggccaagcgctggatggaggcctgcctgaaggaggagcttccttccccggtggagctggaggagagccttcggaatggagtgctgctggccaagctgggccactgttttgcaccctccgtggttccgttgaagaagatctacgatgtggagcagctgcggtaccaggcaactgg

SEQ ID NO: 244839 - DNA, 253 bp, Homo Sapiens
gaaatctttagaagccacagggctagaagagaagtcaccagacacctagggacagtcctaggcctagaaagccctttaaagtaatagtgaattgttttataattaagttattgagtggcctactgactgccatccaataacctttatcaccaaatttgttcagtgtttgctattgggagattgtccatatccctccgtaattaagggcgcatgtaatacgatcttcttacagccaaccttactctacacacag

SEQ ID NO: 244840 - DNA, 214 bp, Homo Sapiens
gctcagtcaaaacaaaacagaaaaatcaaaataacattgactcttccaaccactgacatgttgtttaataatctaagcggcagtcctggaggctaccagacttactgagttctacctgagaaacagccaagcaaagtgtgagagaagggttaagactggcttacaatgagatgcttcaaatgaaaagtgtaataactgaaatagacaataaact

SEQ ID NO: 244841 - DNA, 220 bp, Homo Sapiens
caggaggagaaggagcagatcaagtccctcaacagcagattcgcggccttcatcgacaaggtgcgcttcctggagcagcagaacaagctgctggagacaaagctgcagttctaccaaaactgcgagtgctgccagagtaacctggagctcctgtttgctggctacatcgagactctgcggcgggaggccgagcgcgtaaggccagcagcgtaccgacttg

SEQ ID NO: 244842 - DNA, 245 bp, Homo Sapiens
ttgtctttaccaaaactattttcctctggtcacattctatcctcacaaacctagtcaaaagaatgaggggaagttgctgtcattttccctgtaaaaaaaggcaggcaccatgagtcttaccaagtatagacaggtatctggataccacttactaaagccacactgaattacatgggctgctctatactttagtccattcttatcccatgccaatgcgctcattttcgtcattctatagctgatgc

SEQ ID NO: 244843 - DNA, 573 bp, Homo Sapiens
cggcgcggctacttcgacgaggagatgaaccgcgtcctggcggaccccagcgacgacaccaagggcttctttgaccccaacacgcacgagaacctcacgtacctgcagctactggagcgctgcgtggaggaccccgagacgggcctgtgccttctgccactcacggataaggctgccaagggcggggagctggtctacactgactccgaggcccgggacgtctttgagaaggccaccgtgtctgcgccgttcggcaagttccagggcaagacggtgaccatttgggagatcatcaactcggaatacttcacggcagagcagcggcgggacctgctgcggcagttccgcacgggccggatcacagtggagaagatcatcaagatcatcatcacggtggtggaggagcaggagcagaagggccggctttgctttgagggcctgcgcagcctggtgccagccgccgagctgctggagagcagggtcatcgaccgcgagctctaccagcagctgcagtgaggtgagcgctctgtgcgagacgtagccgaggtgacacgaatgttcaggggacactca

SEQ ID NO: 244844 - DNA, 330 bp, Homo Sapiens
ctgctggcccttacgcgcgaacttccggcccttggagcggacgtagggtctgtggggagaggagggagtgagaggggggccctcttaaaggaggccattgtggagtggcacaggaacaccacaagcctgtcacattcagccccaggagagtcaatgctgctggaaaagcttggcagagtgggaagccaaggagccaggaggggctatggaagcacctgccccaccacctggagggtcccatcctgggctggcaatggccggtgaactgcatgctccccaggagatgcctgctcaggacctggaatacacagcaccaagcagtgatgaaga

SEQ ID NO: 244845 - DNA, 311 bp, Homo Sapiens
cgcttcggcaggcatacggccgagatagaggcccgggcagaccgcttctcctcctgcatcgacatggggcacggagctgctggccaggagccactatgcggccgaggagatctcagagaagctgtctcagctgcaggcacggcgccaggagacagctgagaagtggccggagaagatggactggcttacagctggtttgggaggtgcttgtgtttggaagagatgcagggatggcagaggcctggctctgcagccaggagccactggtgcgcagcgctgagctgggttgcacggttgccgacgcttgatca

SEQ ID NO: 244846 - DNA, 449 bp, Homo Sapiens
catacgcactgactttcccatgaagttcaatggggagagcccaagtccaggtgagagtggcacgattgtggtcaccttgaacaaccataagagaaagggcttttgttacggctgctgccaagggccggagcaccacaggaatgggggacccttgattcccaaaaagttcccacttaaccaacatagaaggataaaattatctcctcttatgatgtatgagaaattatccatgattagatttcggtacaggattctcagatcccagcacttcagaacccaaagccaggtttgctagctaagagaagccccgcgaagctgggtacagaaagtcactggggaccatcaagagacccgtagggagaacggtgagggtggcagttgcagcccctttccttccccagaactctaagacccttcttgtcggcatcagccgtaccttcctgatatgc

SEQ ID NO: 244847 - DNA, 702 bp, Homo Sapiens
cctgctgagggaggagtacattggggacaatggggatccccagaccctccaagcgcagttccaggagatgatggcggactccatgtttgtgatccctgcgctccaagtagcacattttcagtgttcccgggcccctgtgtacttctacgagttccagcatcagcccagctggctcaagaacatcaggccaccgcacatgaaggcagaccatgttaaattcactgaggaagaggagcagctaagcaggaagatgatgaagtactgggccaactttgcgagaaatgggaaccccaatggcgagggtctgccacactggccgctgttcgaccaggaggagcaatacctgcagctgaacctacagcctgcggtgggccgggctctgaaggcccacaggctccagttctggaagaaggcgctgccccaaaagatccaggagctcgaggagcctgaagagagacacacagagctgtagctccctgtgccggggaggagggggtgggttcgctgacaggcgagggtcagcctgctgtgcccacacacacccactaaggagaaagaagttgattccttcattcacttcgccattcattcatacttccgtccatccattcagaagcatttattaagaatttactcaggcatgatggcccagatcgcgtaatcccagctagttgggaaggatgagatgggtagtgatggctt

SEQ ID NO: 244848 - DNA, 204 bp, Homo Sapiens
accccacctctgaccgagttcccagtgctccctacttcgaggttctggagaagtggatctacaggggcatcatccacgacccatacagtgagtttatgctcgaggagcacgagctgcggaaggagaggatccaggaggattacaacgacaagtactgggaccagcagtacaccatcgtccagcgtggatcctctagagcaccac

SEQ ID NO: 244849 - DNA, 367 bp, Homo Sapiens
  misc_feature (27)..(27): n is a, c, g, or t
  misc_feature (31)..(32): n is a, c, g, or t
  misc_feature (51)..(51): n is a, c, g, or t
  misc_feature (59)..(59): n is a, c, g, or t
  misc_feature (124)..(124): n is a, c, g, or t
  misc_feature (163)..(163): n is a, c, g, or t
ttttgctgttcccatgtgtaagtggtnagtnncggtgcctttgcccccagnatgcatgnctttaattctttcttttctgtagaaaccaacagtttccatttatgtgcaatgctaaatccaaagntcacttcagagtttgttttccaccatgtgggtaatcagncattcttaatttcgttaaagttttgacttgtaatgaaatgttcaagtattacagcgatattcaaagaaagaaccacagatgtgttaaccatttaagcagatcatctgccaaacattatattactaataagacttaaccaacacttactattcagtcatcaaagtaagtaaacattagatgctacagctagctcaactgtatccc

SEQ ID NO: 244850 - DNA, 496 bp, Homo Sapiens
  misc_feature (437)..(437): n is a, c, g, or t
atgaaataatatattcttattctcattgtttgaaacctgtctttgaaattagcacctttgttatttatgttgtacttgtgaaaacagtaaaatagtttggatagttatgcaaatgcacctatgtgtaacttccccccaaccccaagctgtttcggaagatatcataatcattctgtgtaacattatgcaaacttctaagcccaaacatgactttgtttttaaaaagttcattaatctaatgtctaggattataaaacatttttttgtgtctaaattggaccccaaacattgtacagtttggggtagtaagctaaatttcatcttgtgggagattttgctaaacagactaaggacccatggatttaggctttgcttcaaattcaggaatgtttaggcatggagttggaggtaccaggtagtgtttaaggtagggttcntcactctctaagggccgttttttcccttaggccagacccctgttggatagaccagattt

SEQ ID NO: 244851 - DNA, 431 bp, Homo Sapiens
  misc_feature (20)..(20): n is a, c, g, or t
  misc_feature (50)..(50): n is a, c, g, or t
  misc_feature (69)..(69): n is a, c, g, or t
  misc_feature (95)..(95): n is a, c, g, or t
cccttacatgaattatcctntacacagatttaaggagttcagagcaaaancttcatgaaggagcccaanaccccggagtgcacccattcgtggtntcctacgggaacagtacctgcagaattacatctcacccccagcactgggaaagtcctcatgaatggacccagtgcagccccaggcagaaggggatgaggaggaagaaggggaggaggagagttcgctgatagagatcgcagaggaagctgaccctgattcaagcagaccgggtgattgaggaggaagaggtggtgaggccccagcggcggaagaaggaagagagtggagcagaccaggagttggctaaaatgcttctggccatgaggctagaccattgtggcactgggacagcagctggacaggagcaagccacaggagagtggcagaccaagcgc

SEQ ID NO: 244852 - DNA, 1071 bp, Homo Sapiens
  misc_feature (52)..(161): n is a, c, g, or t
  misc_feature (314)..(323): n is a, c, g, or t
  misc_feature (409)..(433): n is a, c, g, or t
  misc_feature (454)..(573): n is a, c, g, or t
  misc_feature (732)..(732): n is a, c, g, or t
  misc_feature (811)..(811): n is a, c, g, or t
  misc_feature (816)..(816): n is a, c, g, or t
  misc_feature (1020)..(1020): n is a, c, g, or t
aaaacgggcgccaaaaagggacaagttttttcgccgccccgttgtttccccnnnnnnnnnnnnnnnnnnnnnnnnnnnnnnnnnnnnnnnnnnnnnnnnnnnnnnnnnnnnnnnnnnnnnnnnnnnnnnnnnnnnnnnnnnnnnnnnnnnnnnnnnnnnnntgataaagaattccacccaccttttccgaaaatctcccgcccccggggccaaattttaaataaagccccccgggggcccccttgtagggagccacaaaaggccccggaaccccccttggggtttttttaaaaacccccggttcccccgggggnnnnnnnnnngggggaaaccaaccccttttttttgcccggatttcttttggaaaaaataaaccccagttccctttccctttggggcccgggccccnnnnnnnnnnnnnnnnnnnnnnnnngggggccggggggccccccannnnnnnnnnnnnnnnnnnnnnnnnnnnnnnnnnnnnnnnnnnnnnnnnnnnnnnnnnnnnnnnnnnnnnnnnnnnnnnnnnnnnnnnnnnnnnnnnnnnnnnnnnnnnnnnnnnnnnnnccaaagaattgtaaaatttattgtataagtattgcagcttttcagaatgtcatcattgccactaatgattactgatacacaacaagcagtttcttcaggcctgtggattggcatcccaaattacagagtctttacgccaacggggacgtgggtgcgcgncccgcatgccacggaaagcttacataagtttaacttgaacagaacttgggaaatggggctgcaaaggagagcagttccnacgcnaggaaccaacgtgaaagcattggaatcagcacaacagccatggaatcaggcaggcaggggagataattttctcctctggaggaaaggtggtgattgacaggcagggagacagtgacaaggctagagaaagccacgctcggccttctctgaaccaggatggaacggcagacccctgaaacgaagcttgtccccttccaatcagcnacttctgagaacccccatctaacttcctactggaaaagagggcctcctcag

SEQ ID NO: 244853 - DNA, 555 bp, Homo Sapiens
gatgcaagtgtccgaaaagagagggggcccagaactgaagtggaaaaaagagttgtggcttcactcttaacacgggatggatggcataggttcagaagtaagtgaaggacaagtgttggttcttggggccacaaatcgccctcatgccttggatgctgctctccgaagacctgggcgatttgataaagagattgagattggagttcccaatgctcaggaccggctagatattctccagatactgcttcgaagggtaccccatttgctcactgaggctgagctgctgcagctggcaaatagtgctcatggatacgttggagcagacttgaaagtcttgtgtaatgaagcaggtctctgggccttgcggagaatcctgaaaaaacagcctaacctccctgatgtcaaggtggctggactggtgaagattactctgaaggatttcttgcaggcaatgaatgatatcagacccagtgccatcagggaaatagtcaattgatgtcccatatgtatcctggtcagatatatggaggacgtggaagtatctaactgactctg

SEQ ID NO: 244854 - DNA, 574 bp, Homo Sapiens
tggtgatctagaggatcccgagaggtgggacacgggaggctgtgggttggaagctgagcctggagggggcctgcctcggccgcctcagcaatgtgaatgggtccggtgcttggagctgaggggcaaggctgggcatgtcctgtctgtgtgcagaatcttatcaaatgcccccagtcccaggggtaggcaggcacagagtgctgtctgctgaggtgggcgtccagaactgccgccaccttccctgcccctcacaggggcagccctttcccctcagtccccatgggcctccttggcagcaggagctgtccttttgttgggtgccaggaaagggcctccagcctctacagcttcaaggaatgggaaagggagggtaggaagagggagaagtgtcagaattcctccccctgcctctcctccctgacccagggctggtgaggagtggggccccaacggtgagagggaacggtgctgctttatttgaaatgttttcttacctcattcctgccccaggaagggacccagcctcactctcctggggtgccccgtggtcccacctctcgggatcctctagaag

SEQ ID NO: 244855 - DNA, 417 bp, Homo Sapiens
gggggtccagactgtccactcgggggtggagtgagactgactgcaagccccaccctccttgagactggagctggcgtctgcatacgagagacttggttgaacttggttggtccttgtctgcaccctcgacaagaccacactttgggacttgggagctggggctgaagttgctctgtacccatgaactcccagtttgcgaattatagagacaatctattttgttacttgcacttgttattcgaaccactgagagcgagatgggaagcatagatatctatatttttatttctactatgagggccttgtaataaatttctaaagcctctgttgcttgtatgttttcggcttctacaacaactaggactcactccccctccccatggtcccaccctctcgttatcctctagaacagctatc

SEQ ID NO: 244856 - DNA, 239 bp, Homo Sapiens
cagaggtgggaccacggggaccactgggcccctcaggggaagctgctaggggaaggactggccgtggctccagaatgtgctgcctttttaagttttgtttgttcacactcctatatatgattgtttgcacagagggcgctcctgtttttaaaacattttgaaaacacctggctgaacagtgctctgcctctaactccctccatcacactccagaactacccattcctcatgcattacca

SEQ ID NO: 244857 - DNA, 439 bp, Homo Sapiens
acgaattttcatatggagccgatggtggtgcccaattcttggaaaaacgcctcaaggtctcagggaaccagcatgaagaactacagaacgtcagaatacacatccattcctgtttcacccacatttcctgttttctgctacctcatcctggcttaaaagtagctacctatcccaactttgatggaaaattgaaaggcttatataaagatctatcaaggtgaagaattaccacatcccaaatccatgttacaggccacagcagaagctaaccatttagcagccgtggcaactgcctaggacacatacaaccaaaaaaatggaagagatttgtggtggtgacaaccactttctggccccatatgacttgcagaccaacacctgcacttaaggaagatctgtgagctattccgaggtgaagaagatgggtggtcagacataa

SEQ ID NO: 244858 - DNA, 114 bp, Homo Sapiens
tgctgggattacaagtgcgagccactgcactcagccaatctgggagtatttctaaagaaaaaaattactttgatttgtggaggactaaatcataatacatttctatgcaacaat

SEQ ID NO: 244859 - DNA, 487 bp, Homo Sapiens
tatcctgccatgctcccctatcctgtacccatataaccccaaacctcgggctccagaagcagatgagcagatgaggagacgcctctattccgtgtcgtttagaatgagcagacagttgtcttcaccatcccagacaagcagatgaatggtgaaacgatacagcagagaaagagagaagaggaacatttgaacgccgagaggagttcagccgagggtggtcggagaggtttggccacccagcaggaagattatcttcccgtgccatccccgcttccagctctgcatccatccttcagagaaccacctccaccactcaataaaaccctgcattcaaccttcaagcccatgtgtggcctgattcttccaggatgctgggcaagagcttgggatactaaaagtggtcacattggccctctgcccttgtgaaaaggcagagtgtccattgagccgattaacattcaagccatccactgacagcagggctaaa

SEQ ID NO: 244860 - DNA, 564 bp, Homo Sapiens
tggtcggggggtgaggggggaggtatactagccttaggtgaggcactaatacagaggaatggagggaggttcagaccacacagccagatatccagcggggcaagaggcagcactggacaggaggggacaaataagaggggacagaggtggaaaggctaaatgtccttgaaaagaccttgaaaacacctggtgtaccgcccactgggagacatacacgtggcccctccacttctttctcctgactggctaaagacagctgcgaagtgccatgctaattcacccaggtcttcgctgagtagctggacagtgtgtcatcagtctaattccatcttctgctctaattggctgtgatcaattccacccccatttctaattggttgggttatgcagcaatccagcactgtccatcccaccttttctcccgctctgcgtggcactaggcggcaaaacccgctatctttaacaatgcggcaagacccgccatgatgtccacgtgacaatagccatgatatacatatgacaacgcctgccatattgtcctgccctaagggatcctctagatca

SEQ ID NO: 244861 - DNA, 496 bp, Homo Sapiens
ggtggtgtctagaggatccctcggtcgcgaatcaggtacaaagcaaagagatgaaaacacctaggctttcccagaaacatgggtgatttttaccatttctgggcgttttttcccctgtaaaatggaaataatatatgtggaaataaagaaagatcgccaaaactggaacgggcagaggctctttattccaagcttggaagggagtcagccaccatcacttgcattttgtcagaggccaaaggcaggcagaggagtgggaaagctttacagtgggaagagggaaggcaccagtatgccttgtatgaagcccgctggtgtgggaaagctgcaggtgggctaagtagaaatggggcatcctgtgccatttattatgtttggctttctctgatttgtccaaagctggaagtggggaccaaaattagggaggctgtcagttatgaatctagtcctggccacctggattcgcgccccagggatcctctagaacaccacacaa

SEQ ID NO: 244862 - DNA, 220 bp, Homo Sapiens
ctgcactccaccatccacattggttttcaggcagctgggctgtgcagacaaatgggtaaatcaaccctgcatctttagacaaggccatgtccattcccatgtgggtggacaatgttcagtgtccaaaaggacctgacatgctgtggcagtgcccatcatctccatgggagaacgagactgccagcccctccgaggagacctggacttcgcgcccgaggga

SEQ ID NO: 244863 - DNA, 172 bp, Homo Sapiens
ctctgtttgctcctctgtacctggattcgcgcaccaggtaggtcaatgactgggtcatggctctgacacctgaggcagaaccacatgggaggtaggcattccgcccccagcctagggccctccacatcccacgccgcttccttcagtgcagggtgatgctgccactgaccag

SEQ ID NO: 244864 - DNA, 350 bp, Homo Sapiens
tgcatcagagaactccatttccaggttgctgttcttctgctggttcccctggattctgagggcggagatgcagtcttagaggccctggacccctgacaaagagacagagtccccactagcatctcctgacacccgaggagccctgagtcaccctgagatagagattcccagtaacacatccagagtagagacccctgttagccagccctcgatcattgaggccccattattaacagatactcccataataacccccaaatacagaccccatgtcacccagaaagagatttcctgagtagcaccttcaggctagtccctatctctcaacctctctcatgagctgatgtcgc

SEQ ID NO: 244865 - DNA, 682 bp, Homo Sapiens
atgaaacaattcaggaatgccttgttagaggggatttgtggcttatgaacatacagaaagcaggaatcaccaggacgccctgtgggttcacagagaaaatactctttcaagagaatcttgtttccttccttgataggattaagagaccggtagaaatgagggagatcaagagtttatgaattcagtagggcatttgataagttcaatggggttgacatgaatttggtgcatggaccattggatggcttggggactggttggatacggttcttcagaggctacaatttaatgttctcagagagaggttctgaattcaggacttcaagcctctatcctttgcaaagtcccattggacatttttatcactggcttgaatgaaaataaagaggccatgtttattgcattcgtggataggctgggaacaaagatgtcatgactcagggtcagaatcagcatccaaatcactctcactcctagactagaagcaatggcctggacccaagaatatgcaatggaaagggaaaggagctatttctggcacccaagagctacttgcccaggcacagaataaggaaggcatggcctagcagcagacgacttaaaaaggtgtgaggggcttttgttgacatgagtcaatgatgtgctgtgtgtgtagagctttgcctggatcctcggagtcagc

SEQ ID NO: 244866 - DNA, 335 bp, Homo Sapiens
gaaaacaggctgtgggtttggaagaagtcaggctgtgggtgggaggggaacagaagtagaagcaagcagtcaagtgagttgagggtggacgggacaggcccagtcaggcgcagaggcaactgaaggaatcaaggcattcaaaccaggctgtggctccaagaatgtatacacttaccctcaggcctccgattccttggggtctgatgtgcatgatatgtgtgtgatgtaagggtggtctgagtcatgaaagtctgtcagaagtggcgtcttgggagggaaggatgtcagctcaatgcaatctcctttcgtgtatgatcctacagctggcttttgta

SEQ ID NO: 244867 - DNA, 342 bp, Homo Sapiens
  misc_feature (177)..(177): n is a, c, g, or t
ctgcccttttggctttcctaggtgctacagtagcaggctgttttccccttttccatagaggggaatattctgcatcacccctttgtttgccatttcctacgaggtgaaacgccatcattaggattcactgtagcgttagtgctattaaactcactagcatttttattaatgtccgtnatctacactaagctatactgcaacttggaataagaggacctctcagatcactcacaatctagcatgattaagcatgtcgcttggctaatcttcgacctcttgcatctttttctgccctgtggcgtttttgtcatgtgcaccatgatcgcgcatcttatcacccga

SEQ ID NO: 244868 - DNA, 1057 bp, Homo Sapiens
gggatggcggcggcgcacggcgcctgagcgggccggggccatgagcgccgcccggccccagttcagcattgatgatgccttcgagctgtccctggaggacgggggccctgggcccgagtccagcggggtcgcgcgctttgggccgctgcacttcgagcgtcgggcccggttcgaggtggctgacgaggacaagcagtcccggctgcgctaccagaacctggagaacgatgaggatggagcccaggcctctccggagccggatgggggagtcggcaccagggattccagccgaacttccatccgcagctcccagtggtccttcagcaccatcagcagcagcacccagcgctcctacaacacctgctgcagctggacccaacaccctttgatccagaagaaccgccgagtggtgctggcctccttcctgctcctgctgctggggctgggtgctgatcctggtcggcgtgggactggaggcgaccccctctccaggtgtctccagcgccatcttcttcgtgccgggcttcctgttgttggtgcctggagtctatcacgtgatcttcatctactgcgcggtcaagggccaccggggcttccagttcttctacctgccctacttcgagaagtgatcgcggcgcagcgtggaccccttgcgcccatgggggcgcccctcttgccctgttccgttcccctcatctcaagggaagaggccctccaggaccctcgaaaccccagcccctagggagtttgctcaggaagttcggggcatgcaggcctgggccctggggaaaacccgcccggtcgcctggctctggggccttaaacttattcctcgggcccgtggcgggctgcctagggtggctgggttatttttggggcctgacgaaaacgaggctaatttaatttccccccccggagccgaggagcgcgggggacgcaggcctccaagagcgccatccttaagtgtctccggagtcggcgtcaaaacaacaagaaaggggccacctggggattgttgtggcccccacaatggggagtccactttgactagcggggt

SEQ ID NO: 244869 - DNA, 1087 bp, Homo Sapiens
  misc_feature (48)..(78): n is a, c, g, or t
  misc_feature (130)..(217): n is a, c, g, or t
  misc_feature (1038)..(1038): n is a, c, g, or t
  misc_feature (1040)..(1040): n is a, c, g, or t
ggggcgctgccctgcctcgctgggcggcgcgcgcacacgcagacgcgnnnnnnnnnnnnnnnnnnnnnnnnnnnnnnncccgcgcggttccacgcccctggccgcggcccgggcgctgcgctgctcgacnnnnnnnnnnnnnnnnnnnnnnnnnnnnnnnnnnnnnnnnnnnnnnnnnnnnnnnnnnnnnnnnnnnnnnnnnnnnnnnnnnnnnnnntggcccgcgctcctcctgctggctggggattttccagcctgggcgctgacgccgcggacctccctgcgaccgtcgcggaccatgggcgacaaagggacccgagtgttcaagaaggccagtccaaatggaaagctcaccgtctacctgggaaagcgggactttgtggaccacatcgacctcgtggaccctgtggatggtgtggtcctggtggatcctgagtatctcaaagagcggagagtctatgtgacgctgacctgcgccttccgctatggccgggaggacctggatgtcctgggcctgacctttcgcaaggacctgtttgtggccaacgtacagtcgttcccaccggcccccgaggacaagaagcccctgacgcggctgcaggaacgcctcatcaagaagctgggcgagcacgcttaccctttcacctttgagatccctccaaaccttccatgttctgtgacactgcagccggggcccgaagacacggggaaggcttgcggtgtggactatgaagtcaaagccttctgcgcggagaatttggaggagaagatccacaagcggaattctgtgcgtctggtcatccggaaggttcagtatgccccagagaggcctggcccccagcccacagccgagaccaccaggcagttcctcatgtcggacaagcccttgcacctagaagcctctctggataaggagatctattaccatggagaacccatcagcgtcaacgtccacgttaccaacaacaccaaccagacggtgatgaagatcaagatctcagtgcgccagtatgcagacatctgccttttcaacacagntnagtacaagtgcccttgttgccatggaaaagcttattgacacttgggg

SEQ ID NO: 244870 - DNA, 420 bp, Homo Sapiens
atttccagtctcctactgaactgtcacggcagacctctctgtatctatatttagagctgtatgtccatatatttgcctgaatgtgtgagttctgggaagtatggattcattgccaggagctggtgatttcctaagcagaggtcgctaactacaagaaatgttacactcggtgagtaggtggtactttctgaagattattggtaacccagtgttggtcgtcttgagtcatggatttaaatgacggctagcaagctcttaaaccccttctgctttatatgatacagagtatgtacctgcaggctgcgctgtccactgtgaagggtttttcagaatatgcactctcttgaataatcagtgactcttgtgaagattctagaccattggaggaggaaacagtgttttcctcatgaagggttttga

SEQ ID NO: 244871 - DNA, 107 bp, Homo Sapiens
gagagcaggaatcttcagtgatccacgggcaaatatgcagccatggtgggcaccggttcctcccgcgaccttggtgcccacgtctctccctccagtacctacggcac

SEQ ID NO: 244872 - DNA, 263 bp, Homo Sapiens
acgtatggtgatcacccctggggtggcaaacttagactagaacaaacccccatcctgatcctaacggcccccaggctgcatccgttatgcgacactcacgtgtgcacactctacaaatggaaaacccaaagcttctatttgtctaggtcagtggtcaaggacccctttaagaacttgtgagaggtggtgaacgccttgcataccacgttagggggctcgcagagactctgcagtgcggtccatggacttttaggagtcccctg

SEQ ID NO: 244873 - DNA, 215 bp, Homo Sapiens
gcccaggagttctacccatttctagtctttctcctgcttgtgccatctaccattgactctatgctcccctagaaagaaagggaagtcttgagtctctgaacataagtgagtttctttccgttccctatacatacccttctattccctggctcccacggcttttgcaccttctatttcctctgaatgcttttctcctttctgatcctccctctatg

SEQ ID NO: 244874 - DNA, 318 bp, Homo Sapiens
ggagcagcttgaccacattgccgagaaagcttgctggtggggttccctgcaagtgctctgggcagaggggagacctgcgggcccatcggcggcatcgggcccaagggtattcctggagaagacggctaccgaggctatcctggtgatgagggtggacccggtgagcgtggtccgcctggtgtgaacggcactcaaggtttccagggctgcccgggcccgagaggagtaaagggctctcggggattccccggagagaagggcgaagtaggagaaattgactgatgtctggatgccgatgatggagtccctggatcctct

SEQ ID NO: 244875 - DNA, 327 bp, Homo Sapiens
gagtggacatcagtagacctctggaaagtatgcccttagtcgattcttgctggtattgcttctgcactctgtcgttacctcgccctgtccaaagtcgagatggagatttctgtagctgtcggctcctctgaggtggaatgtgtctgtctctcgtccgcatttcatcaggaggaccttgggtcataggtgtggtatgcacattcttgtttcagaagctcctgttaaaacccccccaaccctcagactttacttttttaaatgggcagcttgtctgtgcttggcctctgagagctggagctgcaggagctgtaagttgtccccattggc

SEQ ID NO: 244876 - DNA, 153 bp, Homo Sapiens
aatcttgttctgtttattgtggtggcagaattatcagtgttacaaaataagagtgaaaaagattttagagcaacgtacagaagaacttctaatagtaagtgtttgtattagtccatttccatgctgctgggatcctctagatcagtacacacg

SEQ ID NO: 244877 - DNA, 171 bp, Homo Sapiens
aagctttaaaaaatactttaacgtaataatggtaatgcagagaactagaattcaacatattacactgctaaaatattcatataaatactatatatgcatgggttcattccattagaaaaattcacctatcagaatattaaagaccagtatcagcaagcacaggaggtgctg

SEQ ID NO: 244878 - DNA, 198 bp, Homo Sapiens
aatttctcaggttctacttactgggaatccaagacatgaatggcacaagaacagaatggagacgccttggctgatgtcagagtgtaagacggttaacatgaaaccggcctggagaagtctgggaggcgtgagagggaagagctgaaccagggcgaagctacgtgaaacatttagtcctaaccgtccacactgcctaga

SEQ ID NO: 244879 - DNA, 350 bp, Homo Sapiens
gaaatcagttccaagtttatttatagatatatctttccaacacaacactgaccgcttagataaaaatcttaagttatttatttctgtgttttaaacataaatatgtttacttgtgatttagctttggagccaatttaggtaagttatctacttagccaaatgtactctagtagactagaaccattctttgtgaaatgtcaaaatatggctatggtttcaggaactttaaaatcggttgtattttactttaaatagagatgtagcaatatctcgtttgctaatatttatattgatgacttactccttttttgttgaattgtacttctggttttataacctgaaatcatcta

SEQ ID NO: 244880 - DNA, 139 bp, Homo Sapiens
tgatctagatgatcccttacggtctgcgccagaccgaactcaccgacgccgacagccccgccgtcggtctactgggcggggttatgaagtctcagctcatccataccgcgattaccagtgaaatctctgtcggcgagtg

SEQ ID NO: 244881 - DNA, 176 bp, Homo Sapiens
cattggataagcggatgagggggggatggggtgtattttgttgcaagtttgtgaggggaaaatgttttggtttgtttctactgacctgaatgtgttggatctacacgtgttgttttgtttttgctttattgatgcacggaatcgcctcagttgataggggtaccgagctcgaattc

SEQ ID NO: 244882 - DNA, 806 bp, Homo Sapiens
  misc_feature (113)..(122): n is a, c, g, or t
  misc_feature (148)..(208): n is a, c, g, or t
  misc_feature (223)..(304): n is a, c, g, or t
  misc_feature (308)..(317): n is a, c, g, or t
  misc_feature (343)..(356): n is a, c, g, or t
  misc_feature (363)..(486): n is a, c, g, or t
agggggccaaggtggggattccccgggggattcaggttctcccaccccgttggggagggttcccagtcggcggaaagttttaaaaaattccacccttctcccaataagggccnnnnnnnnnntaaatttaaattaggcccccctgggnnnnnnnnnnnnnnnnnnnnnnnnnnnnnnnnnnnnnnnnnnnnnnnnnnnnnnnnnnnnnggttcccccgggggnnnnnnnnnnnnnnnnnnnnnnnnnnnnnnnnnnnnnnnnnnnnnnnnnnnnnnnnnnnnnnnnnnnnnnnnnnnnnnnnnngggnnnnnnnnnnaaaaaaaggttttaaaaaattttttnnnnnnnnnnnnnnccccaannnnnnnnnnnnnnnnnnnnnnnnnnnnnnnnnnnnnnnnnnnnnnnnnnnnnnnnnnnnnnnnnnnnnnnnnnnnnnnnnnnnnnnnnnnnnnnnnnnnnnnnnnnnnnnnnnnnnnnnnnnnaactgctgccaccaccatgaaagagtggccaccacatctttattgcatactcaggtgaataacttattatacaatgaacactcctccattaggagaccatgcccacttacagaatgcagccgtaaatgcggtaaatctatttacagaggttggggtgcaagatgagagaagtatcagccccaggaatttgaagtgagaatgatctacaaattctcctgacaatggagcaaccgggcttgtgctagtgaggtctgaaagaattcctggcagagctgtatgggggagattagatctcggaagtgacagctattttcggggtt

SEQ ID NO: 244883 - DNA, 264 bp, Homo Sapiens
gttgtagatgccagggtgaactttattttcttataaactataatgagaatgagagaaacatatagcactgaagtgctgtgtttccactttattaaatcatcacagtaaatcagaattaaagagtaaaagaggttaactggagagtcgggtggctgccatcagtggagatgtgtgctttctcggtgtggctgcctggccgcggtgtgtcctggtgcacacacgttctgcaaggtgttcccaccacctagcgcctatacgtaccga

SEQ ID NO: 244884 - DNA, 355 bp, Homo Sapiens
atttttttaccaggtaattatttttattttaaagggcataaatctgtaggacaaagtggagagaatggagcaacaatttcgaaagctggaaagcagatgcctgatctgcagtaactaacttagcaggcgcacagaaaccgatcttttggctggcagtgaggaaagctgaaaaacaagttgatttacaccatcgaccccattaaaggctcaaaaatttgttgtatcatgtacttctgagtacaggagaaaaggtggggcaacatgcaagagatgcagttgaaacactgtcaaagtctatcagatccctagatagctcctcttgttcatatagcattcccctcacctaggcgcctta

SEQ ID NO: 244885 - DNA, 847 bp, Homo Sapiens
catcagaagaatcacgaccgtgcctctgcccactgcgcccaacatacccattatcgattatgaggtgtccatcagcggagaatggtctccgatggcaggccaaggtgccatcagattgaagtggagacagcacaaggtggcagcccctgatgtcgtcgtgccaacgctggacacagtccgccacgaagccctcttgtacacttggctggccgaacacaagcccctggtcttgtgtggccctcctgggtctggcaagaccatgacactcttcagcgccctccgggccttgcctgacatggaggtggtgggtctcaacttctccagtgctactactccagagctgcttctgaagacttttgatcactactgcgagtacaggcgcacacctaatggggtggttttggctcctgttcaacttggaaagtggctggtgttgttctgtgatgaaatcaacttgccagatatggataaatatgggacccagagggtcatatccttcatcagacagatggtggagcacggaggcttttaccgtacctcagatcaaacatgggtgaagctggagagaatccagtttgttggggcttgtaatccccccacagaccctggaagaaagcccctctcacacaggttcctgcgccacgtgcctgtcgtgtatgtggattacccgggccccgcctccctcacacagatctacggcaccttcaaccgcgccatgctgaggctcattccatccctgcggacgtatgcagagccgctcactgctgccctggtggatgttctacaccatgtcctcaggagagattcaccccagtatacaccaccgtcactatatctactcactccc

SEQ ID NO: 244886 - DNA, 500 bp, Homo Sapiens
  misc_feature (95)..(162): n is a, c, g, or t
catagcaaaaccctgtctctgcaaaaaataccaaaattagctgggcgtggtggtgcctgcctgtagtcccagctactcaggaggctgaggtgggnnnnnnnnnnnnnnnnnnnnnnnnnnnnnnnnnnnnnnnnnnnnnnnnnnnnnnnnnnnnnnnnnnnntgacagagtgagaccctgtctcaaaaacaaaactgtcagtgaggcctaaagaccctgataagaacctgaattctgtgttcttgcctttttcactgactgcccagtgaagcttctgccagcgtcccctgcctcttttcctactgtcttcccccttgctgagtgtactctcaccatactgaccctcttcaagttccggaaatgtgtgttcttcagtacccaaggtcccttccttgagcatactattctcacagctggaagcccgcaggccccaccttagttaatgcctcttcagtcctgagctcattgtgattctcctcttaatcacttcctactcatca

SEQ ID NO: 244887 - DNA, 357 bp, Homo Sapiens
ttggtgagcctatcctgtcggttctacctttaaaacaaatccaacattcagatacttttcattacctctgcacctaccaccctgatccacgttaccatcgtctcttgcctggtgagataatagcctaactgattgccctgcttttgcccttgcctgtctacagtttattctaaacaggaagccggagtgatcctttcaaaacgtaaatccaaattatatagctcttctgttcaaaattgttcagtggctttacatatctctcagggaaaaagccaaagcccttagagtggcccacaagatcacatatgacttggctcccagttactgtcttagcctcatttcctctccacctgcgtt

SEQ ID NO: 244888 - DNA, 361 bp, Homo Sapiens
aaagaagaagagagaaagcatagaggggaaagatggccggaggaggaaaagtgcttcggactctgggtgtgaccctgcatcaaagaaattaaaaggagacaggggtgaagtagacagtaatgggagcgatggaggtgaggcaagccgagggccctggaaaggagggaatgccagtggagagccagggctggatcagagagccaagcagccaccgtctacatttgtcccccagataaaccgcaacattcgctttgccacttacaccaaagaaaacggcaggactctggtggtgcaggatgagcctgtaggtggggacacacctgcatctttcactccatattctacagccacaggtcagaca

SEQ ID NO: 244889 - DNA, 711 bp, Homo Sapiens
tgcttcttgtgctggaagcattcggtaggcccggacgaagttatagtcatcggcactctccgtgctcaaccgggccaggatgctcacttcgatctgaccttgtcgggcataggatgggtggttcttcaggatcttgatggctacgatctcattggtgccccgtgttccagcacttgaccacttgcccgaacgtccctcggcccaagaactttaagacctcgtaggtttggtccatggagccacagcacctcatgctgcaccagctgatagtcgccctcgctgttggagccgctgtttttggaggtggcagtagacgtggtggcagtggcgacagtggccccgcttgcattattctgaatcatgggtggatgctcctcgatgatctgcacgctgcttgtgttctcgatctcctcgctcttacgcttgagtccacatttttggtaggtatcaaggaggctcacagtgcttcgacgcattaggttgtgtggtccgccgaggacttgcccggtgacagaagtgctgcttgctgaggtgaccacgatgtgcccggtgcttcctgggaagacgatggtctgctcgtaaggtaggcttgggtttgggaccggcaaggaggtgctgacggttgtggtggctggctgcgacagggggatgttcttgctctggctatacactttgctgtgggagccgtacccagtcatgtcccagttggaa

SEQ ID NO: 244890 - DNA, 1034 bp, Homo Sapiens
  misc_feature (850)..(861): n is a, c, g, or t
  misc_feature (863)..(871): n is a, c, g, or t
cgagtgggtccctgctcaaacagatcagccagggacagaggctccttgctgaaatggacattcaaacccaagaggctcccagctccacaagtcaagagctgggaacaaagggtccacacccagcaccactgagcaagtttgtgagcagtgtgagcacggccaagctgaccctggaagaggcctacaggcggctgaagcttctctggagagtctcactccccgaggatggccagtgcccccttcactgtgagcagattggagaaatgaaggcagaggtcaccaaactacataaaaaattgtttgaacaagaaaagaagttgcaaaacaccatgaagcttttgcagctgagcaagcgccaggaaaaagtcatctttgatcaattggtcgtaacccacaaaatccttcggaaggccagaggaaacctggagcttaggcctgggggagcccatccaggaacatgcagtcccagcagaccaggctcctgagaagaactttcagccaataaagcttgtgcttcccccaccgagctcacgctgtctctttgttccaagtgtggttcctatttattgaggaagaaagagctgtctggccaaaggaaatctattttttcccttcatgttttctctctgaaagttggcttgagagttgttgtcagaaaggtgcaggtgctccacaaacgggtggtaaaaaggcctcgagctcttggatgttgtatttcagatcaggggcaggcaccggagttgaggctgtgcgccttggtgggcttcacgtcttcccctggatttgcttagtactcagccagtgccacagtttgaagattctcattaaatgattcatttcattgcaaaannnnnnnnnnnnannnnnnnnnaaacatgtcggcccggcctcggccctcggagaagcttttctagaaccattcggttttggcgcgccgggccccagtcagggtaagtgaaccatgggtcataagctggtttccctagggagatccctgggccatggactaagtgcttgggaattcctcaccaaat

SEQ ID NO: 244891 - DNA, 293 bp, Homo Sapiens
acctgtccagccactgggcttgtcctggtaccatgtctttctctccaaattttccccaggatggagatctaggattctctatccaccttccccaggagctatttctcagccttgatgtaccctagaaagctggtggaaatattcccacatgtggggttcccaggtctatggaggcaatctcaggcctagcttggagctggcagaacatgctcccacagctcctatctctggtctcaggtctcttcctctaccatatctctcaaatgatgttaaaaagacttctcgggccgggc

SEQ ID NO: 244892 - DNA, 145 bp, Homo Sapiens
caagcgtgtgggcatcctctcctggcaccctactgccaggaatgtcctgctcagtgcaggtggtgacaatgtgatcatcatctggaatgtgggcaccggggaggtgctgctgagcctggatgatatgcacccagacgtcatccac

SEQ ID NO: 244893 - DNA, 174 bp, Homo Sapiens
gcttctaattagaatcactcctttcctttcagaattttccagaacctacaaatattcactgagcatgaggtagttttgtttcctaattagttttaatggctgccccgaggctggttcaaatttgcactcagagcctgcctttgaaggctggaatactctcggtagccactcgtt

SEQ ID NO: 244894 - DNA, 786 bp, Homo Sapiens
  misc_feature (43)..(44): n is a, c, g, or t
  misc_feature (136)..(137): n is a, c, g, or t
aaagttttgaagcccttgcccaaagctttaagtgtcatggtannccagttaactttgtaggagcctgggaagcccaccttttgctcaaaaaaatgcagactttctgccctttgaaaaacaccaccacacctgattnnttaagtgcttaaaggacagaaaatgtcgttgctttaaattgttgctttgttcagagacatctggatttgctgtatccatacaagcaaaagcttttccaattccagaaccaacccacactaatttgttattgcctcgtactgtattggcccagctgtaatcaactcagcaggcttttggttgtaaattcaagtggaaattgagttggtcttatttgtgcccgttgatatctgagggctgtgaggaagatggcccgtaggtccaagggaatagtgttgaaaacgctgacccgtactgggcaggtggccggctgtccctcaggcaccacaacgccgagccacggtaaggggcatgagccacatttgcagaatatagccagagtccttccagaccctcctgattcgcgcccggaggcatcccagggcacacacgctgtcaagggcctactccggtgtcttggccgagctctctgtgtgttcttaaccgaagaggctacggcttagagtggaaaggagcatgtgatggccagcggtgggcagcctgtgtactctgccaagtttgggtggtccaggtccccacgatttctgtgtggagggttgtccggcatctggccactaggggggccggtggttctcacacacacgcagcccc

SEQ ID NO: 244895 - DNA, 438 bp, Homo Sapiens
atggtaaagagtattatcaagccctcctacaggaacaagaagaacattatcagaccagggcaaccagtctgaaacgccaaattgcccaactaaaacaagaattacaagaaatgagtgagaagatgcggtcactgcaagaaagaaggaatgtaggggctaatggcataggctatcagagcaacaaagagcaagcacctagtgatcttttagagtttcttcattcccaaattgacaaagctgaagttagcataggggccaaactacccagtgagtatggggtcattccctttgaaagttttaccttaatgaaagtatttcaattggaaatgggtctcactcgccatcctgaagaaaagccagttagaaaagacaaacgagatgaattggtggaagttattgaagcgggcttggaggtcattaataatcctgatgaagatg

SEQ ID NO: 244896 - DNA, 314 bp, Homo Sapiens
aggagttccctggaaagcagataattatgaagtgctctaaccaaataactttatagagaaggaggtttgcttatcagccattctttcgtttttccttctggagtcctgtacttacatgtacacgcatacatcagccctatatcagctctggggaatgttgtgtttggaataagccagcgagtttgttgtgttcccataatttgtccggaggtgagcaggtgactcaatctaatctatgtttaaagattgaagagaggaaacctaggattggaggatggggaaacagggggagtaaggtgcaggagattgtcatg

SEQ ID NO: 244897 - DNA, 411 bp, Homo Sapiens
tttttgtaattttgcatatatttctatgctctagtgaagaaatgtaagatacaagagaaatgatactttaaaaataacatttcccttattaaatttttatcagtttagagtaattttaattctaagtatatactttaatatgagagaaatattcatttctctcatctgatcattattaagttcattttattagccatcatggagattattttgcttcagagaacaactttcatcggctattaagtagcaaaggtactttttgcattgaagtatataaaagtggctaagtgtcttgtctttccaggtttaatctctttctcttttaaaaagaaagtgaagggacaaagttcttcaatattaaattgaactaaaagaaattacatgaaagagaagcataacctacttaatcag

SEQ ID NO: 244898 - DNA, 352 bp, Homo Sapiens
  misc_feature (94)..(94): n is a, c, g, or t
ctctttttgtatctggagattgcatctttgactagaattttgtcaactgtatatcatcttcccgctaagatgactccttttccttcctttattncagtcagatgcttagctgcatgaaactctagattaaagcagaatccaaagtgcatctggttgaccactcaccctcccctgcgtaaacttctgcccttcctagcaaactacttctgtcagtatgatgtgatcctctcaagagtttttttccccccatgaatttatgtacaaatatatatacttcagggaaaatatcgtatatataggtttttgggatatgcataacatcacagtagtaattttctttgtgttctctaac

SEQ ID NO: 244899 - DNA, 160 bp, Homo Sapiens
  misc_feature (103)..(103): n is a, c, g, or t
gtaagtgtgtcttcattttcattcatctcaaagtattttctaatttctctttggtttcttctttaatcccttggttatttaagactattttatttactttacnacatatttatgagtttcccaaaaattgtttttgttattgattcctaaattcagatcc

SEQ ID NO: 244900 - DNA, 697 bp, Homo Sapiens
  misc_feature (493)..(493): n is a, c, g, or t
  misc_feature (663)..(663): n is a, c, g, or t
atgttgatgagacataacttgctctgtttgttcctgggcttagtctgctgatacagaggccttattccaaggccctcagaagatactgtgtggatagcactatgctcaagagagagcattcctgttaaaccttactattggcccactcccagtatttttccttggtcctcttatctcttttgttcatattccccaccaagtttctgcctcctctaatgcctggcctctagcttggattatcaggctttttctgtttcattcatatctgcttatcaatgggggcagaaatagaatgaaatggagaaagatgctcctgaaatgttgggagaatctgataaggtatctactgtatgccagaaggagagtaatttttgcaatacaaaatgactgattttctcaattctttttagtagatactttgttagaccaaaagagtatctgtcgcttttccaactttgagatacattatattaatagaagctccatttctatnacttgaaattaagaaggcagctaagaggaaagcaggtggaaggaagaaggaagaaatctgactatcaagacattgttatttgtgcctattttaattgattcaggttaatttcaagtgacagattccttatccccataaagaactcttatggggccaggcatggtggctcnctcctataactccagcactttgggaggccaagac

SEQ ID NO: 244901 - DNA, 375 bp, Homo Sapiens
aactccacagtttcttgaatttgctctacttcgggccatcccttggttggctaaggcagacccctcaaaggcaggaattgaggggactttatcttcattcccagcagccatgtaccacactcagtgcctggacatggtagatggctgcctaatgaatgaatctgatgaagactccagcacagcactttatagatattaggtgctcagtaaatgcctgttgtttgattaactaggtcagggtaactttcctgttaagcacttacaggcacaaagcccagaatagaatctatgagcttgtcagggcctatgaaaatgtttcagacctgaacattaacaacagaatgactccaggatacaaaaaggaaactgcaaagt

SEQ ID NO: 244902 - DNA, 229 bp, Homo Sapiens
aacaaagccacgaataacctataatgaggatgtactgagtaaagatgctggggaatgtgcaatatgccttgaagaattgcagcagggagatactatagcacgactgccttgtctatgcatatatcataaaggctgcatagatgaatggtttgaagtaaatagatcttgccctgagcacccttcagattaagcgtcagcttcctgttttataggttttcttgtcttgaca

SEQ ID NO: 244903 - DNA, 313 bp, Homo Sapiens
gtagcaaaatagttgacctgatggctggttggctcccaagaatctctctgtcctggtagccagataaagtaatcaaagggtaatcctatacttggtaagccagtggagtacttaggaacaagtctcatgttaaagggcttcttccatggagtgtggttaatgtgcaaaaacatgtctataaataaggctgttaggacagactcaccataacaggaaataccagagagatcaagggtatccaggaaagtccaaagatgacaatgtaatacaaatagagcaattaagaggttacattcttgcattgtaagacatg

SEQ ID NO: 244904 - DNA, 606 bp, Homo Sapiens
  misc_feature (592)..(592): n is a, c, g, or t
cccccttttcctgggccatgaccctgactggaaagtgtgagcattcccaccccattctccctcttagtggccacagcccctgcctagggcaggtggatcttttttaagcgcttgcttatcgctcagttaatcctcagatgtgtccattttcacagcatcactattgtatttataagttaaatgacatccagaggttgagcaagtacagctcagatgggacaggaccgtggcttagcctccagtctctgctggcactcctctgtaccccacagattcctggagttctgtaaagaaaacggagggtataccgggtgtgccttccctgccaaactggacctgcaacagggacagaatttactgcaaggtctgagcaagctcagcccctctacctcaggggccccacagccatgactacctccccccaggagcgggagggtgaagggggcctgtctctgcaagtggagccagagtggaggaatgagctctgaagacacaggacccagcctttttgcaccaggcaagccttaactggctgcctgacccttgaccagaacccagctgaactgccccttcaagggacaaggaagctggngggagggagtttac

SEQ ID NO: 244905 - DNA, 665 bp, Homo Sapiens
ttctttgttttctgtttatctggtgaaaagcaaagtagataagcatctacaccatgttttatctttgtatagtatttccacaatgccttattcctagtaggtacttaataacatagatagatcaaatgaattaatcaaatgagggtctgtggtatgctcctcccttgttatgggatacacctacctggtttctaggaacctgattgttggcaaaagattgagactgttctatctcccattgctgtaactgctgggaaaattaagctctggtggccagtgcagtataaggaaaggtttctgaatacccaaaagactatcataaatttgaaacactcttacctcagttatctacaaatcaggagtaataattaattattccttcctcatctggtcactttgaagctttaacagcatgtccttagcacagtgtcaggaagacaatgaaagttattttctgtatccaacattgtatctcagtccacgtgaatacctgccctccacaaacagactaaatattaagcatgttttaattctaacaaaataattttgttcttcctataactttattgccaacacatgtacaggaagaactaaaaaatataaaaaagacagacatctatactatatgctggtttgggcgatacatccgggatcctctgaacgcc

SEQ ID NO: 244906 - DNA, 659 bp, Homo Sapiens
gagtgtccgaaatccaccgtgattccagaacctggatcctcatcgccaagaaaaagcagagcaaggaaacaccatcacaataaactgtgtgacgttccctcacccagacacgatgccggaacagcagctgctgaaaccaaccgagtggagctactgcgactacttctgggctgataagaaggacccccaaggcaacggcaccgtggctgggtttgaactactgggcctccagaaacagctgaagggcaaacaaatgcagaaggaaatgtcagaattcatcccgggaaagggataaagattgaagaagactatgcgaagaacttagcttaggcttctctcagaactccttggcttcacaggaggaagggctccttgggagaggcgtgggcccaggtgaagaagagcctggcggacgaagcagaagttcacctcaagttctctgccaagcttcacagcgaggtggagaagcccctgatgtacttccgtgagaacttcaagaaagacatgaagaggtgcgaccaccacattgccgaccttcgcaatcagctcgccagccgctatgcctcggtggagaaggcccaggaaagccactcacagagcggcagagagacctggagatgaacccagcagctggagcgccaggtgtgtcacagtcacga

SEQ ID NO: 244907 - DNA, 298 bp, Homo Sapiens
atcttggaagctgagccccacgagttaggtacaagatgcccattatgctgcctagaaactcatggttgaactcataaattcatagttgaagttggtctacattttgaacaaacagacaagagcctagcataacaaatgttctgtgaacattatattctaagtgtggccaatggaagctattttgcaaatacaatgtttcttgagacgttatgtgggatctgaagaaagaagtgaaatgggtctaataaatgtgctgtaagaaatacatgctattcaaggagtgatgtgttaaaaacag

SEQ ID NO: 244908 - DNA, 264 bp, Homo Sapiens
ggtaccggacttcctggtgtgttggttggtgtgttggcatgaagctctagttcctgtccaaagggctgttttgagtatcctcacagcatagcagctggctttccccatagtgagcaatccaagaacatgacaagaagtgtaatacttttatgacctagcctcagaagtcacctcacatccacattctccctccaattctttccaagttccaaggctgaatgcttacaaagtatatatcacgtgtgctttactgaccattatatc

SEQ ID NO: 244909 - DNA, 816 bp, Homo Sapiens
  misc_feature (34)..(34): n is a, c, g, or t
  misc_feature (36)..(36): n is a, c, g, or t
  misc_feature (51)..(51): n is a, c, g, or t
  misc_feature (55)..(55): n is a, c, g, or t
  misc_feature (63)..(65): n is a, c, g, or t
  misc_feature (69)..(69): n is a, c, g, or t
  misc_feature (85)..(85): n is a, c, g, or t
  misc_feature (104)..(104): n is a, c, g, or t
  misc_feature (125)..(127): n is a, c, g, or t
  misc_feature (135)..(135): n is a, c, g, or t
  misc_feature (149)..(149): n is a, c, g, or t
  misc_feature (154)..(154): n is a, c, g, or t
  misc_feature (165)..(165): n is a, c, g, or t
  misc_feature (182)..(182): n is a, c, g, or t
  misc_feature (194)..(194): n is a, c, g, or t
  misc_feature (201)..(201): n is a, c, g, or t
  misc_feature (214)..(214): n is a, c, g, or t
ctttcttgggggccccccttcccccttaaccccntnccccggggttttggncaanccaaaacnnnaaantttttttgggcccccntaaaggaaaaaaggtcatntccttccttttgcaagggaannngccatttnctgccaaggcattntgtanaaacccttccncttaagcgccctgccantcctacacaacntaatggnacggtgcacgtgnttgtcaacaaccaagatcggcttcaccaccgaccctcgatggcccgctcctccccctaccccactgacgtgcccgagtggtgaatgcccccattttccacgtgaactcagatgaccccgaggctgtcatgtacgtgtgcaaagtggcggccgagtggaggagcaccttccacaaggacgtggttgtcgatttggtgtgttaccggcgcaacggccacaacgagatggatgagcccatgttcacgcagccgctcatgtacaagcagatccgcaagcagaagcctgtgttacagaagtacgctgagctgctggtgtcgcagggtgtggtcaaccagcctgagtatgaggaggaaatttccaagtatgataagatctgtgaggaagcttttgccagatctaaagatgagaagatcttgcacattaagcactggctggactctccctggcctggcttcttcaccctggacgggcagcccaggagcatgtcctgcccctccacgggtctgacgcacgatatactgacacacatcgggaatgtgctcagactgtgcccgtgggaaaacttactaatcatggcggctcaaccgaacctgaaaactctgg

SEQ ID NO: 244910 - DNA, 619 bp, Homo Sapiens
gtgagaatctcatagtagcagatctggctgtactggggggagcagtcaccgtcaatggcttccacccgcaggatgcgatcgtacagcttcccctctgtcacagccgcacgatacagccgttccacaaccactggggcaaattcgttcacatcgttgacccgcacatgcacagtggccctgcatataccagagagaaggagggatgaagacacggcagccagcctcgacattatacattgagatacagccttgatacagcaacaccgaggtacagcctcgatacgttacatcaagatacagccttgatacggcacatggagggacaggttcgataccgtacaccaagatacaggcctcaatactgtataccaacaaacagcctcaatatgggcacaacgagatacagccttatactgtacaccaaggtacagcctcgacacggtatacccatatgccagaaaggagcaagcaggaatcccgacggagagccagaacaggagggagccttcccatctatccctgagactgaggcagtcagcacgctcctccccaccccacagggcaccaagctgcatcaaagtcatgccagggagaggacaacacaccaagaagtccggta

SEQ ID NO: 244911 - DNA, 592 bp, Homo Sapiens
tttctgtgtgtgttgggagggcaggagcattccttgaggaggagtggcaacatcaaagtgtttgtgtcccttgccagcctccctggggtctggggacctgcagcagcatgtctggcaaactgagtcgccctcctgcctccagctctctgttgagcagagggaaggcatgggggcaggaagagagctgagcattgatggggatgggggtggtttgggaatagaaacttgttcttgcatgagatggctttggttgtcccagtactccagtctctcccttcccttacctggccccttggtgctccttcagcatttgtgctgtctacctctcactgggtcctggtgggggtcgggctcccttctcctggggtgattgatggcctgagcctggggtcctggtagtagagacccagctggcctggggtctgctttccgacattttgcctctctcactggtcatgtatttattccatatttatatggtctacttcctgtggctgggagcagcagctcctgaaggttccgtgggggtgcggggggttggacaggacactccttcttggaaggcaccaattttcccaggcccactcccatt

SEQ ID NO: 244912 - DNA, 669 bp, Homo Sapiens
gaatttctccaccagtaatccataagatgctatatttctgaagtattggcctgattgagcacatcaaaatgccatttctttccgtttctcatctggtgttttcagacataactaacactgaggaatagaatggaagtagagtataagacacttttgaaagcttgtattttcatatactctatttggttctgttgtaacagattagctccagggtttataatcccaacctatagactgtttatacaggtttttaatcccacctatcctgttgtttgttctgtagcacataacacctcctaacatcatctctaatgttgtgctttattatgtatgttatatatagatttgtctcagattagaatgtgaattccccaagggcagagagttctttgtattttgctcacggatacatccaaaagcctaaaatggtgtcttggcatgtaatagaagtttaaagtgttccataaatgataaatgaatgaaggaatagttgccatccaggtgaatctaaaataaaggctgttaccttgctaccttctcacctaatactattttccctcttctcttgagggagaaacaaactgttgctacaaatctcactcttcaggagatatatcccccccatttactctttgtcgaagcttcacagtgtcacacccggaccggcta

SEQ ID NO: 244913 - DNA, 417 bp, Homo Sapiens
ctggccacctctggaggctctgcctttcccaagggccctggcagagggtggggcactgcaccttaccccccccatccatgccagcacttctgcactacggccattctcctcttgggcgctcctcagcctcactgtgacctttctgccagagctcccagccaggcctactctgctgaggtggcgcttcctgctaagggcccttctctgccctttctgccctccttcccatcccacatgctgagccgccacaaagaccaaagaagtgatggcttttctctgtcccctgctgctctgaggggagaggggtgggtctcctgagccactcagatgggaaagtcccttactcggcccctccctccccagcagccccaagcttacactggatgcagcgatcaacacacccagaagtccggtacc

SEQ ID NO: 244914 - DNA, 437 bp, Homo Sapiens
  misc_feature (286)..(300): n is a, c, g, or t
gtttccaacagtcctttcgattatcctttattttcttatcctcccttctcttgtttcttttatttataagttaccattcctagtttctttgtacttgaaattttaagaaaccagaaacaagtaaatctggttgtatctagatctttgctctgtgtttcagttgtgccttaccctctgtaagatactgattcttcctggggccagtattaccttgtatgcaaatattacatatgatgggtgcattgtcagagggaaaatatatgtgtatgtacacatgtgtatgtgnnnnnnnnnnnnnnnctgccatacactttagaagaacgcttctcttctattccaataaaaagtccttttagcaatgcaacatattaacaaaattgggtgcattcagggtggtatggccatagaccagagcaacacaccaggaagtccggtcc

SEQ ID NO: 244915 - DNA, 445 bp, Homo Sapiens
tttggacccactctgctgaggcctcaggaagaaacagtagcagccatcatggacatcaaatttcagaacattgtcattgagatcctaatagaaaaccacgaaaagatatttaacaccgtgcccgatatgcctctcaccaatgcccagctgcacctgtctcgggagaagagcagtgactccaagcccccgtcctgcagcgagaggcccctgacgctcttccacaccgttcagtcaacagagaaacaggaacaaaggaacagcatcatcaactccagtttggaatctgtctcatcaaatccaaacagcatccttaattccagcagcagcttacagcccaacatgaactccagtgacccagacctggctgtggtcaaacccacccggcccaccaccaccccgaatccaatgcccaacacacccaggaagtccggtaccagctcgatga

SEQ ID NO: 244916 - DNA, 432 bp, Homo Sapiens
gtaatgctgctctgtatagtcagatattatttctgggacatctatggatatagtcttgattgctgtgaccatttgcaatgtgttatgtagaatctgccaataaaaaagaatactatgagcactcccttgggaccaagcactatgtaagcactgtaagggatccaaagacatagaagaccacatctttccctcaagcagtttatggtctagttgtagagatgaggcctgtgtagggaaagctaaatagcaatgcaagaactaatatagagtaaggccacaatctatgatatacataagaagcacatataggctgggcacagtggctcacacctgtagccccagcagtttgggaggctgagttgagaggaagatgtgagcacaagagttcaagaccagcctgacaacacaccagaagtccggtaccggctcatc

SEQ ID NO: 244917 - DNA, 837 bp, Homo Sapiens
  misc_feature (823)..(823): n is a, c, g, or t
ggaccccgcactttggatctccctgagcccagaaatcacccctggaaccagagtttggaggaggaactctgacttcttcagtggaaggctctgcccctggctcagtggaggatctcttgagtcaggatgaaaatacactaatggaccatcagcacagtaactccatggacaatttagacagtgagtgcagtgagttctaccagcccctcacatcgagcgatgatgcgctggatgcaccatcctcctcagagtcggaaggcatccccagcatagagcgctcccggaaggggagcagcgggaatgccagtgaagtgtccgtggcttgcctgactgaacggatacaccagatggaagagaaccaacacagtacaagtgaggaactccaggcaaccctgcaagagctagctgatttacagcagattacccaggaactgaatagtgaaaacgaaaggcttggagaagagaaggttattctgatggagtctttatgtcagcagagcgataagttggaacactttagtcgacagattgaatacttccgctctcttctagatgagcatcacatttcttatgtcatagatgaagatgtaaaaagtgggcgctatatggaattagagcaacgttacatggacctcgctgagaatgcccgttttgaacgggagcagcttcttggtgtccagcagcatttaagcaatactttgaaaatggcagaacagacaataaggaagctcaagaaatgataggggcactcaaagaacgcagtcaccatatggagcgaattattgagtctgagcagaaaggaaaagcagccttgcaacacacncagaagtccgtccg

SEQ ID NO: 244918 - DNA, 302 bp, Homo Sapiens
attgtaaactagtaaggtcaggatcgtgtgattgtaaactagtcaggtcaggattgtgtgattgtaaactagtcaggtcagggtcgtgtgattgtaaactagtcaggtcagggtcgtgtgattgtaaactagtcaggtcaggctcgtgttattgtaaactagtcaggtcgggatcgtgtgattggaaagctcgcaggtcaggatcgtgtgattgtaaactagtcggggtcagggtcgtgtgattgtaaactagcccggtcagggtcgtgtgattgtaaactagtccgggtcaggatcctgtg

SEQ ID NO: 244919 - DNA, 514 bp, Homo Sapiens
  misc_feature (22)..(22): n is a, c, g, or t
  misc_feature (31)..(31): n is a, c, g, or t
  misc_feature (477)..(477): n is a, c, g, or t
cttccttggtgtgttaataagnactgaaacntaaggaattgcttttacttcaccatccttaggccttaggggccccactcttcttcttcctcccagcagctggtcataacttcagtgacttctctctgtgtgtgcttggagagtccctgggagcagcctgcaggggcgggtgagagggggatctcccgcttcatgtttcttgtagtacggctgtaagaattgtggcagggccttctgttcaggctgcctaagcttcagtgcagcagtgcctcggactgggaacacccaacagaaagtctgcaagcaatgccatgaggtcctgaccagagggtcttctgccaatgcctccaagtggtcaccacctcagaactataagaagcgtgtggcagccttggaagccgagcagaagcccagcacttcccagagccaggggctgacacgacaagaccagatgattgctgagcgcctagcacgacntccgccaggacaacacaccaggaagtccgcgaccggc

SEQ ID NO: 244920 - DNA, 534 bp, Homo Sapiens
tgagctcggtccggacttcctggtgtgttgagaacacaagaactcctaaaaacggaaggaagaacaaggaggaaagcactaaaccaagaagaaactgaagctcaattttttggtttcaagctatcaaaagaatcaagaagaccaagaaggctactcttaaatgtacagaaatggcaaaagatttcctattagcaagcaacaaaaaaagagtagcttctgatggaagaaatttcagaggcaaaacagcttaaccccagaaacggaaactgaaaccagctgcctcaaacagacctaatgactttggcaacaatatacctttcatccaccaacaatatcaggaggctggagtagggccgatttcaaatcataaaggatcacatctttctattctctgcatagtctttgagaaagaatccaactccttcctgggagcaccacattgcccccaattcttcctggaaacccctggagctacagcaagaaattgttggccaggcgcagtagctcacacctgtaatcccaacacacacagga

SEQ ID NO: 244921 - DNA, 257 bp, Homo Sapiens
agctgcagtcactcagagatcccgacctcctgtgtggtgtttcaccatggacagaactcttaggctatcttctcatgaatgcttggaataaagggaggtgaatattctgcctttagcacaccatcagtgtacttaagcactaatattttggcacctttgaaaagaacagggctgcaagacgttattagcgtcagtacattccttaagttattagtgaaatgaaaatggagtttcagacaaccagccaacacaccaag

SEQ ID NO: 244922 - DNA, 290 bp, Homo Sapiens
  misc_feature (84)..(125): n is a, c, g, or t
ttccttggtgtgttgaggcgggaggattgcttaagctcaggagttagggaccactctgggcaatacagtgagaccccatttccnnnnnnnnnnnnnnnnnnnnnnnnnnnnnnnnnnnnnnnnnngaaggtgtcagaaatactcttttgagactacgtaataacctgggtgctgcctctaggtatctttgcggaattgttacagtaagtaaaactctctcaagccaacattcatggctctccatgaagtaatctctatttatttttttcacgtggcctccaacacaccaa

SEQ ID NO: 244923 - DNA, 597 bp, Homo Sapiens
acttcctgtgtgtgttgatatgtacatacacacatccaaacctaattggatttcttttaaaacaaaacataataaaatttgacccatctgagcagggctcctgtagccttgtattttggaaaatttgtatgtttaagcctgatgatgtccttgagaaaggtggtattctggaaagaccacagacattgaggtcatttgggctcaaattttggccacaccacttctgattgtgtaaccctgagcaaggtagatctctgagcatcaggattccctcttacatttttgatttcaactctccatcttaaaattttgccaccctaagacacctactttttccttagggctagttatatgtcagatactgtgttgggagtcttacatgcattaatgcccattcctgccagaaagatatctgtactctcattttccagatgagataagatggcagggtaaagtaatcctggtctgggaggaagagcatgggctgatttctgcttttggttccgccattttaacggcaagccatttaacagctctgagtctgtgatgtgtggtttaggagttttaaacgagacaacacaccaggaagtccggtcc

SEQ ID NO: 244924 - DNA, 581 bp, Homo Sapiens
  misc_feature (379)..(412): n is a, c, g, or t
cccggacttcctggtgtgttggttagtgcaggaggcttggtttttttcctgggtttcctctgctgctggtgctgaactttacgggagttatctcctctcaagaaattatcctttggaatgaataaataggcttttaaattgagattatctgggataaacctgacagctacctaaaaaatacttacatcccttaatattctatataatgcctaaaacatactggatgcccaaaactatgtataacaataatgaagacatcaaacttcatcaattccaagatctacattttaatatctctgcgattgggaagcattttaaattggtggcattttaccattgcggtcagcctgctgatggtcattatagttgacactgtctnnnnnnnnnnnnnnnnnnnnnnnnnnnnnnnnnnggttccagttctttgtactggcatcgtttctgaattaaggtttgtacactgttggtactacgtgtggaggaaaattttttgtgaatgtagaaaggcaccaagagcagccgggcataaaattaataattagtggagcacataattcattactgaagaccgaccaccatcg

SEQ ID NO: 244925 - DNA, 530 bp, Homo Sapiens
  misc_feature (517)..(517): n is a, c, g, or t
ggaccttcctggtgtgttgagcatagtttgtgattttaagggcctctaaaagtattagggaggcagcagccgctgcatggagacatgatggccagcctaaaacagtaaggtcaagttgtttggacaaaaaggctacaggacgcgatcccggtccttgtgtaagaattccgactgcacaaccctgcacttcagctgtgtgtaatgaaaagggttgggatgaatcagggaaagctagggtgggggcagtctttaaagctgtcttcaaggaacggaaagaggagtggggaaaggatttaggatctatggggtcagctaggtttccttttgtgagtgtatataatggttttgttaggatggcaaaaccaggtatccaaaggcgaaagtatccaaccatgccccggaaagaaaggagttgttgttttgtagaagaggttggggtttgagagattagtcagacacgatcagcagggagagcacgtgtgtttttatgagaattatgccgagacgggcaacacanccaggagtccggt

SEQ ID NO: 244926 - DNA, 187 bp, Homo Sapiens
ttggggactggagttagtccaggagtcttcaggtaacaccaaggtgcagcctccgccagatgccttcagttgccccaggaccttcttccagccccacatgatggctagatcttctgtgaaagggagctaggttggaacagagccaacattcccaacacaccaggcaacacaccaggaagtccggtcc

SEQ ID NO: 244927 - DNA, 339 bp, Homo Sapiens
gacacccgcttctgagaggaccattgacttagtgtcccccagtctcaattgcctgatggctgatgccagcccggcaaataggcaccgcactttactcttgggactcggggacttggcttccttcctggcaaggaccaggcagtggggaaggaggaggtcctccgtggtacatactgggtcaggcactagcatggaggagggtcacagagtggggcacgtgaggacccatggaaccgtcctggtgcccaggccctcacaagtaccaaagccagcaccaaaggagtcagggaaggggatcctcaagagtcagctatcaccatgactgcgttgcaggcacat

SEQ ID NO: 244928 - DNA, 142 bp, Homo Sapiens
cctccttccctgtcttttaatgcttccattatacatttgcaagtcacctagctattgctataagcctgagagggagtaaaaataagcacacatatgaaaatgtattaaaaaacacattataggttatatgtatccggggaag

SEQ ID NO: 244929 - DNA, 929 bp, Homo Sapiens
gggagagccggagtaacgggactcccagctgcgcgtcgcagtcccgacgcgagaagggctggagtcggcgtccagcctagagcccccggtgggagccaggccgggacgcgtgcaccatgccctacctgctcatcagcacccagatccgcatggaggtgggccccactatggtgggcgatgaacagtcggatccagagctgatgcagcatctgggggcttcaaagagaagagccttgggaaacaacttttatgaatactacgtcgatgaccctccccgcatagtcctggacaagctggaacgcaggggcttccgtgtgctgagcatgacgggggtgggccagacgctggtgtggtgtctgcacaaggagtgaccttctcatgctgatttgcagacggggcacccctgtggaggggctgctgtgggccctgacgtccaagctcctgcctcaccgtctgccttgctcctctcttcccaaatcatcaccgccatgggcccagccccaaatggcagtgaatggccttctctgaaaccctgcgtctagcagtgggagagggcagtgcccggtggcctggtgctcccagctggcctcctggcttcgggcctgggccgaagggccttgtgtagggcatgttcctcggggagcctgccccgggccggaagctgggcactccaagcggccctgggcgcgtgggctccctgcataactagcccccagcccataaaagggctgggatgaatccatgcacacgcgccagacacctatgaaaagtctttggggggccgccttcggcccttcaaaaaagctttccaaaacccatttcatttcgggggccgccggggcccccggaggggaaaggggaaaacgggggcccatagagttggttttcccccaaggaaaatccctgtgggcatagggacttaagggggg

SEQ ID NO: 244930 - DNA, 372 bp, Homo Sapiens
tcggtacccttccctgaggacactgtggagcagaaggcagaaagcgtgggcagaattatgcctcacacggaggcccggatcatgaacatggaggcagggacgctggcaaagctgaacacgcccggggagctgtgcatccgagggtactgcgtcatgctgggctactggggtgagcctcagaagacagaggaagcagtggatcaggacaagtggtattggacaggagatgtcgccacaatgaatgagcagggcttctgcaagatcgtgggccgctctaaggatatgatcatccggggtggtgagaacatctaccccgcagagctcgaggacttctttcacacacacccgaaggtgcaggtaagcaggctttga

SEQ ID NO: 244931 - DNA, 486 bp, Homo Sapiens
attcaggttgaatacaagaactatttttgtgactagtttttgatgacctaagggaactgaccattgtaatttttgtaccagtgaaccaggagatttagtgcttttatattcatttccttgcatttaagaaaatatgaaagcttaaggaattatgtgagcttaaaactagtcaagcagtttagaaccaaaggcctatattaataaccgcagctatgctgaaaagtacaaagtagtacagtatattgttatgtacatatcattgttaatacagtcctggcattctgtacatatatgtattacatttctacatttttaatactcacatgggcttatgcattaagtttaattgtgataaatttgtgctgttccagtatatgcaatacactttaatgttttattcttgtacataaaaatgtgcaatatggagatgtatacagtctttactatattaggtttatacacagttttaagaatttcatcctttta

SEQ ID NO: 244932 - DNA, 132 bp, Homo Sapiens
cagatagctagtctagcatagtcaggctcctgaggatgccagcccttctggtagcactgcacgtgcttaaagcttacatgactgcttgtcttccacagtgtgatgtatctacttccaggttcttgtataact

SEQ ID NO: 244933 - DNA, 608 bp, Homo Sapiens
tgccagttgctaagcagtgattgggaaccttcctttccttggcggagatgcatgacattccctaccgatccccagacacagcctgtgggactcttaggagaaatggtgatttactgaataactgacccgttgccgagatgagtacaatgaagtggaggtgatgaactcaaatcgtcttccagggccaggcggctgaccggggtgagcgtagtggcccgctggggaccatggccgccctgacagccacacccacctggagctgacttggttctggctgtttgctgccactgtgaaatctgtatctctctccatctctgctctactatccccggccttgccagacagtgttctttttcggaagaagtctagatttttgcatgaaaaaaactcaatctttaaaggtcgactcagaacattttaaggaggcctccacttggtctgatgcagtcttgctaattaagaactaaaggccttctgaccttcttggtgctcatgctgtacggcatctgaatgcctcgaccgagtccgagccgtgcagctgtcctccacctgcgaaagtaatgagaatcctatcacgggacataaagataggtctaaacagggtccat

SEQ ID NO: 244934 - DNA, 248 bp, Homo Sapiens
ggggatccaggacttttactttgtaaaatattagagtgttcaaagcaggcctttgctcggtattacattagcatggaataattgatattaggacgtgcggttctattttgttggtttcttaggaccgccgtaatgattaattagggatagtcgggggctatctgtattcaaattgtcagtaggtgtatattcttggatttattgaagactctactactgcgttagctacttgcccataggagtttttg

SEQ ID NO: 244935 - DNA, 370 bp, Homo Sapiens
aggaacggcggcaagaggcatgtgtgaccagatcagcttcccgctgggccaggccggctaccccgtgtacaagtacgtgccctatggccccgtgatggaggtgctgccctacttgtcccgccgtgccctggagaacagcagcctcatgaagggcacccatcgggagcggctagttgctgtggctggagctcttgaggcggctccgaactggcaacctcttccatcgccctccttagctaatcgccagctacaccctcagcctccagcaccccccgcccccgctcagcccatcaccacagctgcagctaaccccatcctcacacagattcacctttcttcaccccacacttgcagatctgctggaggtgag

SEQ ID NO: 244936 - DNA, 306 bp, Homo Sapiens
gaagaaaggggactgggtacttggagactttgcctgggcccctgggaacatgtgttatgtggtgaataaattcacaaggcaagagctggtgtacaggtttaggaagaaggctctaagcaagttcttacaggcacttgtttgtgacattcagtcagataatggccagaagtttttgttaagagccagttcttagaagaacctatgccaaggtcacccatagagtccattggtgtgaaagagaaagggaaagaggtgtggcgggggagcgtaagatttggagtcagaagtctcagttctgtcatttgt

SEQ ID NO: 244937 - DNA, 708 bp, Homo Sapiens
acctcgcttagtgctccctgcacaaagagtagaacctggacctcagggacacgctggtgctcaaggtcctcctggccctcctgggattaatggtagtcctggtggtaaagtgcgaaatgggtcccgctggcattcctggagctcctggactgatgggagcccggggtcctccaggaccagccggtgctaatggtgctcctggactgcgaggtggtgcaggtgagcctggtaagaatggtgccaaaggagagcccggaccacgtggtgaacgcggtgaggctggtattccaggtgttccaggagctaaaggcgaagatggcaaggatggatcacctggagaacctggtgcaaatgggcttccaggagctgcaggagacaggggtgcccctgggttccgaggacctgctggaccaaatggcatcccaggaggaaaaggttcctgctggagagcgtggtgctccaggccctgcagggcccagaggagctgctggagaacctggcagagatggcgtccctggaggtccaggaatgaggggcatgcccggaagtccaggaggaccaggaagtgatgggaaccaggcctcccggaagtcaaggagaaagtggtcgaccaggtcctcctgggccatctggtccccgaggtcagcctggtgtcatgggcttccccggtcttaaaggaaatgatggtgctcttggtaagaatggaga

SEQ ID NO: 244938 - DNA, 590 bp, Homo Sapiens
  misc_feature (75)..(75): n is a, c, g, or t
  misc_feature (129)..(129): n is a, c, g, or t
  misc_feature (169)..(169): n is a, c, g, or t
  misc_feature (307)..(307): n is a, c, g, or t
  misc_feature (373)..(373): n is a, c, g, or t
  misc_feature (512)..(512): n is a, c, g, or t
cccagtggtgttggtggtatgaagatttttagcatataatgaaacctatatttaaaaatggaatgttaaagtganaaaattattatatgagagttgaaaagtttatttgaaagccaccagaaaattggngacagcaaaggaaatggcacaaaacaaaatcaggaagggnaaaaggagcatgtagcaaaacctggcgaataacagtcataagtttccaagagtcctttcctagtgtagtcatggagtcatactgggaaataattacttgagcaatgaattgtgcaacacttgtgtgaaatgttgtctnccagggaagctggcctgggcctagatgtccagggtttttattgggagatcactcacataggcatcnccaccaacaccactagtggtgttggtggtgatgggtggcctgtcctcagagtttgccacttgttactgtggtttctgtcatgcagttcctgccaggtcagactcagtccaagcgggttggcgcggccacaggtgggccngggccaggagcaatgtgctgcccccctgggggtgctgccgggaccccctgccctcccactttcctcttgccctttcct

SEQ ID NO: 244939 - DNA, 238 bp, Homo Sapiens
  misc_feature (132)..(132): n is a, c, g, or t
  misc_feature (150)..(150): n is a, c, g, or t
agtggtgttggtggtgatgggcagtggaggcgctcacagacacggggaggcggaagcagaggggtttggtggagggtttaggtgtgtttagtctgaagacccccaggcgcagatgtccagttgtcaggtgtnccggggtaactgtgacgnataaaagggaagaacacctggagaacatggagcagcaccgaccagcataacaacagcaacataacattaccaccaacaccactgggga

SEQ ID NO: 244940 - DNA, 652 bp, Homo Sapiens
gatctccgtgaatttggccacaacactaagaagagcttccccatcctggtcgaatgagccggtccttacacggttattcccattgaggaggtgtgtaaccatgagcgatttgttgaaaggatcctgcgctgccccaaaagaggtgaagagacttttccaaagaactggcctggtattcatttcgaataacccttcggaatacatcttgacctgcccatctaacctgcgcactggactcggggcagatttacacatcaaactgccctcgtaagcaaagatgcctgttccccaagaatcctggagaacctaagactccaaaaacctggtactggaggtgtggacactgctgctacaggcggtgtctttgatatttctaatttggaccgactaggcaaatcagaggtggagctggtgcaactggtcatcgatggtgtaaactatttgattgattgtgaacggcgtctggagagaggccaggatatccgcatccccacacctgtcatccacaccaagcattaactccccatcgccagctgatgactcaagattcccaggagttttgctcattctaatgatggcccattctacttgctctggacctgcccccgcatcccctgcctccatccttgtaaagactccttctatgctgcaa

SEQ ID NO: 244941 - DNA, 433 bp, Homo Sapiens
tcatcttgggcctgtgttatccaagccaaagatatgggtggacactcttttggcctgtctgggaccacgacacttacagtgactcttactgatgttaatgacaatcctgcaaaatttgcacagagtaagttaatttcctgcactggatgagaatcttggtatgatgttttcatttgaatttatattataagtttttagtgataattaaaaacctgacagcaactattgagtggcttattatgtgccaggtatggcatgattttggtactaaacttattcccattttacagattacaaaacagttgataccatttgcaaatatcaagcgtatagtaagtaagaattagaaccagtatgtctgactgcaagttgtgcactcctttctcttttgcctgctatttctctttatgaagataacacaggcccaagatga

SEQ ID NO: 244942 - DNA, 238 bp, Homo Sapiens
  misc_feature (228)..(228): n is a, c, g, or t
agactctgtctcaaaaatacaatacaatacaatataataaaatgtcctcaatggggacataagataagtctgtctgccaaaggtaaagaagatgagatagagaaatggaaaagtggcatttccttcccaagagccaggagtgactttcaagatgggtccaagtgcagccaagctggaggctaagatgcaagggggtttacgcctctccttgctgtggggataacacangcccaagaat

SEQ ID NO: 244943 - DNA, 223 bp, Homo Sapiens
agggacggcggcaagaggcaggaaggggaatggaataggttaagtttaggcctatcaacctaagcaacaagaaataatctgacactactttatcaggcatattggggaggggagggtgtatctagctctcgttcagattatttggaagtgttccctgagatacccaccagcgtaaggagttctggccccaggcttgtcactagcagctgcagtcaacagttca

SEQ ID NO: 244944 - DNA, 387 bp, Homo Sapiens
cacaggatacacacatatttgtacacgggcacatcatctgcacacacacatgcacgcatacgtagcacaccctccagcacacatgtgttcagatcatgctctcatttacacgtgcacacgggcatgcacactcatgcacatgtactgttgactctatcttgagcttacacatcaaagccacgatctagttcagtacttacttgtttcttgatattccatttagcatttaccaagtaccttctatgtaacttggctaggcagtctttttttctcaaacaaaatccagtacaaatcctccctcatccatgaaatctttctggattctccaatgggattgaactaatcctcatagactttccatgtgcacctggtaccgagctcgattcg

SEQ ID NO: 244945 - DNA, 386 bp, Homo Sapiens
tatgcacaagagaaaatgaggaagaagcaaaagtggaaccctgataaacccatcaggtctcgtgagacttattcactatcaagagaatagcacgggaaaggctggtccccatgattcgatgacctcccccgggtccctcccacaacacatgggaattctgggagatataattcaagttgagatttgggtgggggcacagctaaaccgtatcacttccctaatgtactgggagaaaattgtcaccctgcacccagcgtgttcagatgaggctctgttttcagtggaaggtgtctgtgctgagcagatgtctagatggtcgatggccccttcctgcctgagcctgtcatgtgggctgtgtcctccatctggcactgttgttgcatacg

SEQ ID NO: 244946 - DNA, 604 bp, Homo Sapiens
ggtggttttatgtggcttgtgttttttgtatggcggccggggcatgggggattttatattcaggggttcgggccagggggcagccagtgagggacattccccaagggccacagggatgggggatgttgctgggaaaggaatttaaggtagagagggtgggaaggaaaaaccatagggagggccttagccctccagaggggatttttaagacagacagtgaaaggtgaggccttgaaaaaacaatgggaacatcacctcccaaagagggactgaggtggctggaggaaccagagccgcctctgcactctgcaccgagggtcgcgtgtggctgtcaggagagcagcgtaagcctgtggagcctctgctcgcttcctgctcaagaaagccagaagagagctggggcaggccaccagggcaccagacactcaccaagcggccatcaggactgggatgagaggacagaggaaggacattctgtccccaaacccctcccgtgtcctgacggccctagaacttggaggtgtcaggacacaacccagactcaaggctcctggattgaaaatgtggagggcttgggccaggctcggtggctcacacttgtagt

SEQ ID NO: 244947 - DNA, 320 bp, Homo Sapiens
  misc_feature (12)..(12): n is a, c, g, or t
  misc_feature (27)..(27): n is a, c, g, or t
  misc_feature (34)..(34): n is a, c, g, or t
  misc_feature (43)..(43): n is a, c, g, or t
  misc_feature (56)..(56): n is a, c, g, or t
  misc_feature (67)..(67): n is a, c, g, or t
gcggcacgccanacagacctgttgcanctgcggnaagtgcagnaaaaaagaactgnacctacacacnaggtgcagacccgacagctctgatgagcccatgaccacctttgttgtctgccaacgagtgtggaaaccgctggaaggtgggtgagcaggctcaggctgcccctcccagctccattctctggaggtggggtgtctcagcgtctgtggggtctgtggtgtgaactggggatggccctgcccaaccagcctcctgggagtcttgggcatggtgggtggagagcccagccttgggtgcgcctgtgcggccttccact

SEQ ID NO: 244948 - DNA, 400 bp, Homo Sapiens
  misc_feature (363)..(363): n is a, c, g, or t
tcagcattttcagtcagcgtgagcaggttgatagaaacatcagagaagccaaagagaaactggaggcagaaatggaagcagctaggcatgaacaccaattaatgctaatgaggcaagatctaatgaggcgtcaagaagaactcagacgcttggaagaactcagaaaccaagagttgcaaaaacggaagcaaatacaactaagacatgaagaggagcatcggcggcgtgaggaagaaatgatccgacacagagaacaggaggaactgaggcgacagcaagagggctttaagccaaattatatggtaaatagagtacaggaaatgataatgggtgatatgggtccccgcggagcaatatacatgngagatgcgtttagcccagccgctgttggaaatgctgg

SEQ ID NO: 244949 - DNA, 330 bp, Homo Sapiens
tcagcatttcacgcagcgcctccacctgtgtcggcagatgggtcctttcctgcctgcccacccttctgcgaaagcaagacctggaggcctggggctacaccgtgacccttcatgtgtaccatgggctgttgagcttcacggtgcatcccaagcccaagatccggaaggctgcccagcatggagtatgctcagtcctcaatggcagtgaattcatgtttgaaaagggccctgcccatcatcctgctgccatttccactgccaagttctgcatccaggagattgagaagtctggaggctccaagaaggccaccaccacgctgcacatgctga

SEQ ID NO: 244950 - DNA, 271 bp, Homo Sapiens
cgatattaggtaaagcagtcataagcttttttctaagttccatgaatcttacccagtgtataccgaagtatttaagcagcatctgaatatttccacccagcaatgttaatttatctaggaaagttcagaatttcatcttcatgttgaatttcccttttaacttccgttcatagacatatatgtgacttccaattcgagcctctggcaagtgagtgtggaagaaaacagcagttcttttataattgcttgaaattaggaaagcgcttatttc

SEQ ID NO: 244951 - DNA, 587 bp, Homo Sapiens
  misc_feature (354)..(354): n is a, c, g, or t
actctcaatgaccagctgcgggtttagtgacagtgcagatggagccatcagagtcctatgaagtgctgtcttgtatcccagcccccagccttccttataaccaaccaggaatatgttacactcttgttcgtttgcctgatgatgaccctacagcagtttgcaggctcctttagctgcaccatgaagtttacagtccgggactgtgaccctaacactggggttccagatgaggatgggtatgatgatgagtatgtgctggaagatctcgaagtgactgtgtctgaccatattcagatagtactgaagcctaactttgctgctgcttgggaagaggtgggagatacctttgagaanagaggaaacctttgccctcagttctaccataacccttgaagaggctgtcaacaatatcatcacatttctgggcatgcagccatgtgagaggtccgtataaagtacctgagtacaagaattcccattcgctctatctggcaggtatattcagaggtggctatgatttatttggtgaggtccaggctggccttagccgatggagtgaccatgcaggtgactgtcgagatagtata

SEQ ID NO: 244952 - DNA, 803 bp, Homo Sapiens
  misc_feature (154)..(192): n is a, c, g, or t
  misc_feature (770)..(770): n is a, c, g, or t
  misc_feature (772)..(772): n is a, c, g, or t
  misc_feature (776)..(776): n is a, c, g, or t
gggggcgcattttcggctggtttgattcatccattttgaagagacgggggagcggggggctcgtctgttccaggagccctgaaccaaagagcagcggagtttgagaagccagcagctcggggttcggcagcagcggtcccatcggctgaagttnnnnnnnnnnnnnnnnnnnnnnnnnnnnnnnnnnnnnnntcctggtctttggcttctcgactcggtcctgtttcgacagcgaacatgtcgcggcctgtcagaaataggaaggttgttgattactcacagtttcaggaatctgatgatgcagatgaagattatggaagagattcgggccctcccactaagaaaattcgatcatctccccgagaagctaaaaataagaggcgatctggaaagaattcacaggaagatagtgaggactcagaagacaaagatgtgaagaccaagaaggatgattctcactcagcagaggatagtgaagatgaaaaagaagatcataaaaatgtgcgccaaccacggcaggcggcatctaaagcagcttctaaacagagagagatgctcatggaagatgtgggcagtgaggaagaaccagaagaggaggatgaggcacccattccaggagaaaggatcccggcagcggatgaaagatttcctaatgggaaagatgatggaccatagttggcctatggccagttcccaaaaggaaaaactcaacggatggggttaaaaaagtccaaacccgggagggaaaattcacgcgccccacgacgcananatantccttggtcgggcgccgcttcggcccc

SEQ ID NO: 244953 - DNA, 1046 bp, Homo Sapiens
  misc_feature (826)..(886): n is a, c, g, or t
ggacgcgtgggtcgacccacgtcgtgcgtcgtacccgacgcggtgcggacccaggcgtcctggacccacgctgtcggccacgctgcaggaggaggcggccatccagcaggagcaccgtgagaaggagctgcagaagggctcggaggtggcgaaggattttgagcccgtacttgtggtagctgctccccaaaggccggggaccgagccacagccagaaatgcctgacacagtcctgcattcagagaccttgaaggacactgccccggtgttggagggcttgaaggaggaagagattcacgaaggaggaaatcgacatcttcagcgatgcctgctctaagctgcaggagcagaagaagtcactcaccaaaggagaaggaggagctggagctgctgaaggaggatgtgcaggactacagcgaggacttgcaggagatcaagaaggaactttcaaagactggtgaagaaaaataccgtggaagaaatctaaagccagcaagagattgacaaaaagggtgcagcaaatgatcgggcagatcgatggcttgatctcgcagctggagatggaccagcaggctggcaagctggccccggccaacggcatgcccacgggggagaacgtcatcagtgtcgctgagctcatcaacgccatgaagcaagtcaagcacattcccgaaagcaagctcaccagcctggccgcagcactggatgaaaacaaggatggcaaggtcaacatcgacgacctcgtcaaggtgattgagctggtggacaaagaagatgttcacatctccaccagccaggtggctgagattgtagcaacactggaaannnnnnnnnnnnnnnnnnnnnnnnnnnnnnnnnnnnnnnnnnnnnnnnnnnnnnnnnnnnngtgaagagctagaaccactggcctgggcacctgtcctcctgctgtgccgtcaccctggcaagggccgtgagggcgattgctttgtggtgattctcagtggctcatctaatattttggctggaataaatcagagacttccataatcaagtaaattttaatt

SEQ ID NO: 244954 - DNA, 745 bp, Homo Sapiens
tctaatgaatacgttagcctcacctaaaggcgagtcgcaatcttcaacaagcttgccagatttgaacgcacccgccccggccacccgtcgttgctctacaacaaggaggacagggccagtccataatcggaagtaggccatacccacaccggggaccattcggcaccggctagaggacacaatctacagttgtgccattccccagccactgccttcatgctgcccccgccggactggcagagccaggggtcagccacctgcctttgagtcatcaagatgcctctgcagccacaattctgacctaagtggcagggcccagaaatcctgaaaacctcccgctgccttttgtgatacttcctgtgctccctcagagagaatccggagtgacccttttgtcctttgacgtgattggcacttcgcagtctatctccgtgggtagcagacggctgctgcccttctctgggcatgttctgaatgtttacactggtaccttgtgttatcttctttagagccccctgcaagctgcaactctaggcttttatcttgcggggtcagagcgccctctagagggaaaagctagaggcacaggttttctgccggcccacaactgctgtcttgatttgcattttacagcaaagtgctgagagcctctagtcgcctcctgccatctgatctccctccccaccattcccgtactcagttgttctttggtctattcggaggccacggtgctgaggccctgcag

SEQ ID NO: 244955 - DNA, 407 bp, Homo Sapiens
cagaggttcatggaggctagggtcgaaagagatgtcgtttgtcttcgtatagacggaaatagggggaaatcaaaagatatttcttcattttaattggctttatttttaaggaaaggttattgtacgaatgactgtgttttcaaaagacataaaatattttaagtaaccttggggagttttgttaccattttagataactcaaattgaccacctaaataagaactcgtgagaagtatgcaaatgaatctataggtatccataaatggtagcaatggactgcaaatgtttctgaaaattctctcagctgaatatatacagacttattatgtttcaaacctttgctcctaagcattcatgtaggctgacttttcaatttcaagggatttcagtgccgctgctgaattcta

SEQ ID NO: 244956 - DNA, 657 bp, Homo Sapiens
  misc_feature (26)..(26): n is a, c, g, or t
  misc_feature (44)..(44): n is a, c, g, or t
tcgattatcgattcggctcttttccngtttttcatttccagccngcgcccaggtctccaggccatgggccttagacaccatgtctctcggtcacatggcaccaaaggatcacctatgagacagggacccccattcacacccagaatcctgattgttcacaactcactacatcctaacccaatgtctgtgctttgtttcacctggttggttctgtttattttcctacagtttctaaaaagatcctttcaacctaacaaatacatgttaaacagacagcaataaattctttttcgtttgaccaaataactctggaaataagcaactccagagactctagaatttggtacggaccagtaggaaaattatggaaattatagaatgctatcattccacttttcatcacgttggaaactctaatctaatccccaggttgcaactaaaatgctgaaataaccatcatggaaaggatagtctttcataatgttgtataaagtttctttgcattctaaaatccttagtgtgtccaagatcacaactgttggtcacatcagacaagcaatgaaggcaagtcagaaggtgatacaccgataaaaggcagagatgagacttctgcccccgagaaatacaaggaaacggagctagaaagagtcagtgtcg

SEQ ID NO: 244957 - DNA, 1520 bp, Homo Sapiens
  misc_feature (90)..(90): n is a, c, g, or t
  misc_feature (138)..(138): n is a, c, g, or t
  misc_feature (209)..(209): n is a, c, g, or t
  misc_feature (216)..(216): n is a, c, g, or t
  misc_feature (232)..(233): n is a, c, g, or t
  misc_feature (242)..(242): n is a, c, g, or t
  misc_feature (646)..(933): n is a, c, g, or t
ttcggcacaggtgatttgttctgttcatcgagagggctcccaaacatctgcagctgatttgaaattaaaagtaagtcgcagccgctcctnccgcagccacttcagcagcatcttagattttaagcctcacgtgcgcantggtttcatgaactattggctgcatcctgcttaggtgcccaccaagaaggttttacctacttaacaaaaangaaagangccaaagtgattaganngaaatgaantctctttttgggttctgtctactgaaatttaatatctcagtgaacagactaaaaggaatttagagtcctgacaacttaccagatttctcctgttttaaatatactgggactttaaaggttatatgtccggtcaccgtatgttttaagtcggtgttaatgctaacagtgttgaaaacaatatttcatgagatctaattgtggttgcccctataggtagcaggaaagtaaagttgcatttccctctcgcacattctacacccaagtgcctaaaagatctcattgtaagtgggtagtgttaccggaagccattgtgttcacacgggggaaatgccgtatatatttttcaacaaatattaacgtttatactttcatgtttgagaatttaattaaaaatatttgttttnnnnnnnnnnnnnnnnnnnnnnnnnnnnnnnnnnnnnnnnnnnnnnnnnnnnnnnnnnnnnnnnnnnnnnnnnnnnnnnnnnnnnnnnnnnnnnnnnnnnnnnnnnnnnnnnnnnnnnnnnnnnnnnnnnnnnnnnnnnnnnnnnnnnnnnnnnnnnnnnnnnnnnnnnnnnnnnnnnnnnnnnnnnnnnnnnnnnnnnnnnnnnnnnnnnnnnnnnnnnnnnnnnnnnnnnnnnnnnnnnnnnnnnnnnnnnnnnnnnnnnnnnnnnnnnnnnnnnnnnnnnnnnnncatgaggcggttagccgggcaccctctccgcgagggacttcccccggggggggtttttctaccaatttaatagcccggccccctggccaagaaaagtcgccaatcccggcctcacactctatataaaggtttttctcgcccgccctcatttacacacccctctccaccagaaggcggggggtgaagtcaaactctagagaattccctccccacgcggaaattccaccccaccccccctggcacaaaactgttgcggtgatataaaaaactgtgtaccactacgcgccgggaaaaaaatcgggcgctgtaagaaaacaccccgcccgcgatataacgcatccaccgccccgataagtaaaaaacccgtggggaaaacgaaacacacccagagggcatttgtgtgtgcccaccctaatataccataataattcctctgagtgaaagaaaccatcacgcgagggcaacatactgacatcaacatctactcaaccccctgtctccccgccccgatattactcccgcgcaagagacaggccgcgcccaccaccgctgttggcgagcgagaacgagccacgcgctagaatatt

SEQ ID NO: 244958 - DNA, 643 bp, Homo Sapiens
agtatcaccaaaaacttcaccagcttcaaatggagaaattgccgtctcgtaaacgcaatcacagaaatgattagctggatgaacaatgtggagcatcaaacttcagatgaagactccgtgcattcaccaagttctgcatctcaagttaaacatcttcttcagaagcacaaggagtttagaatggaaatggactataaacagtggatagttgacatcgttaaccagtcattacttcagctaagcacctgtgatgtagaaagcaagcgctatgaaagaacggagtttgcagagcacctggcggagatgaaccgccagtggcgccgtgtacatggaatgctgaatagaaagatacaacttttagaccaatttctagaaagtatcactgagagtgaaaataaaaatccagttcttgaacaaactggctggaagccacaagaagagagactgaaaactttcgaaaaacctgaaagtgtgatctcagtgcagaagctgctcctggactgtcaggatatagaacatccacttgcaattaaatccaaagcactagatgagttgcaccacagttatctgactttggagagtggggcagtgccattgttagaagatacagcatcccgaattgatgagttatttcaaaagagaa

SEQ ID NO: 244959 - DNA, 664 bp, Homo Sapiens
  misc_feature (72)..(72): n is a, c, g, or t
  misc_feature (304)..(304): n is a, c, g, or t
gcactcccaccctgttgaaagtctgcctttcttgctggctaggcataattaatactatgccatagtaccccncccttgttgtatttatttcttcaatttcctctggttgtggcagcttttagttaaaacaaagcttcccgaccttccaaacttgaatcaaagcccctgcgtcctggtgaatttattttagaggggggagttagggccttaattttgaggcaggacacaatggcttgtgggggtcctcccccttggattccccaaagggttgccttagagattgccgaataaacaccctggcaanctggtaatgaccttctgggagattctgacagattaaggtttcccaccaaacacagataaaagacaatttttcagaagacaatggtgaaggaactgagtaagtaaagcatacctgaaggcagtagaggtagttgagtggaaatgcatagagagctgggaggagtggagttcaccagcaaatgtgtcttgtgtatctggctgggaggtgtaattgggatggagaaaggaagggcagcatgcaggaagtcatgtgataggaatagagctgtgtgccaggggtggcaagttgactctgttggttggtaccaagagtttgccttacagtagttagacagagttagtttttgttctgaatgagaca

SEQ ID NO: 244960 - DNA, 586 bp, Homo Sapiens
ggggcctgaagttattttgcagtggctaatggcactgaggaatttcttttttggtgcatttggtttacactcatttcctctcctaattgttagttcatttgtaacagtgggtgagtgtttggaggaaaggagggagaagaaaggagggattctgtttctcccatgaaatagtctaattggttgggttgatggcagaaggaaacataggggagccttccagctcacagccaagggtcgggctcttaaacactatgcctagtgttttctgaatgctgtcttcatggagcacagctcttactctctttgtactttacatctcacccccactcattacagatgctcataacattcttaaaatattttagtacttggcatttttctgttttcagtcagctagaacacactagagtcctttcctcagatggcataatcctttataggctctgagcctgcctagccatctcctatcggtgttattactcctcatctcaggctctgagatgatactcagaccctaaactgattggactttttggaggagggtgccagtagagaggtcaggaagatgtggagatgatgatggaga

SEQ ID NO: 244961 - DNA, 208 bp, Homo Sapiens
gaaggttcaagtcagggcctgagtccaggtctctgctttctgctggacgggccaagccctgcattttggaccctgttcatctctccagccttgtttctcacaacttcctggcagaaaccttggctgcagtcactggcccttcccagcacatgcacctttctgcctctggactttgggttttgccagtcctgcgcccttcggtttttcc

SEQ ID NO: 244962 - DNA, 531 bp, Homo Sapiens
ggatcccgggacaccgacgtcaccagggagaggctgggggcccggcataaggaagccaccatggagcttctccgagtgaaggacctgggccatcgagctggagcggaataatgcagctctgcaggctgagaagcagctgctaaaggaacagctgcagcacctggagacccagaacgtgaccttcagcagccagatcttgacactgcagaaacagagcgccttcctgcaggagcacaacaccacactgcagacccagaccggcaagctgcaggtggagaactccacgctgagttcccagagcgcagcgctcaccgcgcagtacacgctgctgcagaaccaccacacggccaaggagacggagaacgaaagcctgcagaggcagcaggagcaaattacagcggcctacgaggccctgctgcaggaccacgagcacctgggcacgctgcacgagcggcaatcggccgagtacgagggcctcatccgccagcacagctgcctaaagacactgcatcggaatctgggagctggagc

SEQ ID NO: 244963 - DNA, 341 bp, Homo Sapiens
agaccaagcatttatctctcgctcaagcttccaggcttgctcccagccacggctgtatccaggactgttccacatgcctctcattctccccagggccagagggctaaggaggggctggggagtgtgcttcccctggctaaaggcaggagccccggaggaccagcaccaagcacaagcccactgcaaatctctgctcaccttgtcagttacattctattggccaaagcgattcacctggccaagcctaacaggaatgggtggggaggtacattcctcctagagaggggagtttgtgggaaaggagtggttactgctgagcaataatctagtcttctaataat

SEQ ID NO: 244964 - DNA, 401 bp, Homo Sapiens
cagtttcatcccaagaccataccatcctgcgccccatcccttgccgcctgtggaaaaattgtcttccacaaagccggttcctggtgccaaaaatgttggggactgctgtgcttaagaatctgccatgaatctgcagcctctattatatagctccctatagactttgcttcctaccgtcttacgttccgccttataggcatttgactttgcaacccttgtttttgttagtatgctacgctggtgacattgaccaaattgaccacacattaattataagcttagttggtgatgacctcaacggaataacgtgacataagtattgggaccatacttcttgcatgtatctgcaggtgggattgtaaacctggtggtccgagatggtcaaattcccacagtcataa

SEQ ID NO: 244965 - DNA, 396 bp, Homo Sapiens
ggaacggtgagaactccacagaagcaaaagcagtagattcttacaatcagtcgaagtccccacttggagaaatttaatggtcaaactgggtgtactcatcatcaaaagcaaagttcattcgtgttcgtgaacgacctggtacactgaatctccaaccaggcacctgaggacctgcagccttctgagttcgggagcaaatggatgtatccaacttgcaatggctggcttgtgcccagctcagcaccatacataaggaaaaagatgctctgtgtctcgatatgaagtcttctgcttctgtagatttgttcgtagactcgtcagactctcacagccctctacacttgacggccggtgtccccgagacggccggtgtccccgagacgccggtgtccccga

SEQ ID NO: 244966 - DNA, 539 bp, Homo Sapiens
ccaagttcaggagatggagaagaaactggaacacaagcaaaacagattcagaacagtgtctttcagaccatggtccaaatgcaacatagtggggacaatcaacctcaagttaaccttttttcatccacaaaaagtatgatgagtgttcagaatagtggtacccaacaacaaggtaatggtttattccagcaagggaatgagatgatgtcacttcaatctggaaattttttgcagcagtcttctcattcacaggcccaactttttcatcctcaaaatcctattgccgatgctcagaacctttcccaggaaactcaaggttctctctttcatagtccaaatcctattgtccacagtcagacttctacaacctcctctgaacaaatgcagcctccaatgtttcactctcaaagtaccattgctgtgttacagggctcttcagttcctcaagaccagcagtcaaccaacatatttctttcccagagtcccatgaataatcttcagactaacacagtagcccaagaagcattttttgcagcacc

SEQ ID NO: 244967 - DNA, 191 bp, Homo Sapiens
tttctttactttatttgacttttggtttcattacaggagaataaaatgtatatgcctgttacaagaagaaactactgaattactcatttatttttccttctactatggttgataccatcttttgacgttttgccttggagtagtttttagttaaatactaggtcatggtttaactgaaatgtcttttttcg

SEQ ID NO: 244968 - DNA, 453 bp, Homo Sapiens
cgaggtcattttcagggttaaggtggccctgaggctgtgcttgtttgagccactgtcccttcagttctgcccgtggtctacaagccacaagtggagacttgatattttgctcttgcgcattcttccaagtgcattcaaggcctgtgaaattgaagcatgatgtgtatattattggaaaaaaacatatagaataaatagtgaataatatttttatggaaatacttactctggaatcccttaaataatagtacctgtgttggggtacataaatttctcgataatattgtctgagtggagagaagcataaagcccaaagccttggttttcatatgtattataggccaatgaaaaagaacaatggagagtctttaaaatttgagtatagggcatataccatttaaaatgaaattatagttttcatgtcaaccaccctgaaaacggctgggggatctc

SEQ ID NO: 244969 - DNA, 553 bp, Homo Sapiens
  misc_feature (531)..(531): n is a, c, g, or t
gcttgtgatatgcacgtggcgaacatgctggttaaggtgaacgcacttatcaaggatcgggaaggatgctcctggcacagaattccaccggtgcaaggagatgtctgaatactgcagcactctgtgccgccacctctacctgttcccaggacaccctcccacatggtgtcacctccccatcatccacgccaagtggaagccactggaccacaggaggtgtgatagagcctttgatcttcaggatgcacggtctctgttctgccccctcagggatgtgggaatctcccagacttgtttcctgtgcccatcatctctgcctttgagtgtgggactccaggccagctccttttctgtgaagccctttgcctgtagagccagccttggttggacctattgccaggaatgtttcagctgcagttgaagagcctgacaagtgaagttgtaaacacagtgtggctatggggagagggcatataaattccccatatttgtggtcagtctccagcttttgtagatggcacttttagcgantgcttttattacattaaggaag

SEQ ID NO: 244970 - DNA, 939 bp, Homo Sapiens
  misc_feature (230)..(240): n is a, c, g, or t
  misc_feature (330)..(348): n is a, c, g, or t
  misc_feature (632)..(632): n is a, c, g, or t
  misc_feature (642)..(642): n is a, c, g, or t
  misc_feature (681)..(681): n is a, c, g, or t
gggtgacagctccgtctccgcagcgattgaggaaactgtggactgagattcctgtacaatttcatcccagaaactccagacttgtagtctccatgcaagatttctttgtcggcggcttgataaacagtttctttgttttcgattttgatttcgccaatcatcattattggcattttcctgcctggtttcttcttcaagactctgaacaattgctttaacagtcaaatgannnnnnnnnnncggtttgagctggatgggtacagcttaaatcatgggtccagcctaaaaaccaccatttaacttacactgatcaatttcaacatggactgnnnnnnnnnnnnnnnnnnnaaataaagcatcattaatgcacatctgcaggggtttgccaaacagcccaaactgtatacattacaatcattaaaagttcttattttttttaatattagtgccgttatcatggagaacagcatgacagctgtctttggcagtctgtcatttttctagcattttcagaaactcatcggaaatggcggtacctgtgtttcccttcgaaagcctctcagtacagcactcctgttcctctgttaaaactccttgttaatccagtgatcttttaggccaaggaaatattnttgtgatggntgttctggggtccatacaccagcaatgaaggagatagantttgtgtactttgtgttttttaatcagcattaacatgggcaggcacccctcatttatagatgtcaggaaaacattcagtggaaaacttgttagaatgggatgtgataacgaggttccagtaatctgagcggtctaacgaggcccacctcctccaccacagaacgtggctatgttccaagtgctactctcactcagcctgttgcggatcttcatggcctcaggagacttgtttctccatggctcttctgggactggtgt

SEQ ID NO: 244971 - DNA, 677 bp, Homo Sapiens
tttcgaattcgagctccggttaacccgggtcgacccacgcggtcccccgagattgacccacaaataaagcacaggccttaccccggcgtcaccctctcccactcctttgttctgggtcctttcgggagggctgatgggcagcacaggaggcccgtcctcggggggctgcgcacatcacgctccttgccgggcgtccggcacagctgcaggtcaccaaagcaggtgctggccctcggacctgagagcccagccagggcccatgtggtctgcaaatgggagcggctgtttttgaacacggggtcattctgcagtcaggacgaaccggtccccgtcgcagacggagtgcacgtgcccttgcgccacatcctcacgctcggtggagggacgcgtgcggcgggacggtgcctacgggtacttgcagctgtgtcccatgtggcatcccagagctgcgccctgctggtctctgtgagcgccacgctgctgtgctggaaatgccgctttaaaaagggataccgtgggactctgcccgtctctttcataacgcaatatttatttgtattgggtagatgattgattctttcgacctaacattttgggttttaaccaaataaccggtccaggagtgagcagctccgttctgtcagatgctactccaaatgttaccaaagacgagcact

SEQ ID NO: 244972 - DNA, 230 bp, Homo Sapiens
gcccccttccacatctcatttctgacgcttctgcttgccaaaagatggaatttaattagagtattagaatgacaaagtcatgatttttaactagatcactttttcagtagtggggaaggatttaaggggagcaaaattgggatagaggacatcagtttaggcaagagttaagcgtcagaaatgtagtggcagtgggtttggagaagacagagtgaacttaagagctattt

SEQ ID NO: 244973 - DNA, 396 bp, Homo Sapiens
ccttccgacatctcatttgttccacattagcgggccagaccctgatgtggaggaaatgagggagatacggagtgggagggattgggggaggaaaggggaggtttccctctgttagggagagacctgttttttggaatctggagcctcctctggggtggggagaggaaaccacccaagttatagggacagggtagggcagcatctgttatgggccctgagaagcccagagatggagctgaaactgtccagtatgcaaggatgccaggagaagggcaattcacacccagggtccatccatactacggagggtccaggaggtctctcagccacccatccttggcaacccagatgttactgtggccaagctaggatgggagctgagggggaaggaagtag

SEQ ID NO: 244974 - DNA, 152 bp, Homo Sapiens
agacgccaccaggatgaactggactccatggagaactactataaggaccagttttcattgctggcagaagccatatcacaggaacatcaagaacttaaagccagagagaaatctcaggcccagacattacataaggtgaagagggagctgag

SEQ ID NO: 244975 - DNA, 356 bp, Homo Sapiens
cccctttaacatctcatttcttcagaatgaagttccaggaatgtcattctgaagtaatgaggcatggacagaaaatatacccctcacatcatcggattgagatggcagtcgaaatagcttcattgaagtgtcagcactcatccatcaatcaatcacccacaaggaaaaatagcaacagtacaacggggtggcttttatgggatttactcatgggcatagggaatagcggctcaaatgtagttctgacatgaaaagcaaggtgctgatattattttttatgatgggaggatcataaagtgaattgagaacagtgaggtctgtctttgcttaacctattcaacccagaaatgagatgt

SEQ ID NO: 244976 - DNA, 310 bp, Homo Sapiens
ggcacccattcaacatctcatttcttagctccagaacccagtcatggagctaagaagtgagtcagagagtagaggggtagggacagtgaggtaagtcctctttctaaggaagtttggctgaaggatagactagctggacacatgctggctgtgctggggtagacgggaggaatgatggacgggtagagagagccttgagccctgcagagcagagtctcttagaatacgagaagctgaagttaaagttgtggaagagagtggggataactgagtgacagataatcaggagaagaaatgagatgttggaagg

SEQ ID NO: 244977 - DNA, 425 bp, Homo Sapiens
attcggaacaggtcattctgtgctgctgcgggctataccgggccctacaggatgctgagtggcatccctggccttcacctacccgatgccctggctctccacccacagccttccccactgtgaaggcccaccccccagggcttccaccatccacttcatttcttctcaatattgttctaatcttaggagagtagatatttttacaataaaaattaagatgtgttttaacaccattagaatctaattggcccccttaggatatcgggactatctccctgaacatcgtcaaggggctctgttgcttgaactacctcagaggtgataattggggaaccttaaggagcaggggttccccaacccctgggggccacataattggtacttggtccatgggtcccttagggacccggggtcacacagcagga

SEQ ID NO: 244978 - DNA, 450 bp, Homo Sapiens
ctcggcaccctttaacatctcatttctcaccacacctgtctcagcttgaggtgattaggactggcttcttggaggaggtgacattcaaggatgagtagatatattcagatgatggaagcagatgggttgcagtgtgttctgggagaactaggtggcccaagcaaagtgggaagcaggaaataccacgtgcggggagacaggtgtggtgggaaatgaggcgagtccattaaagcaccatgtgaaggtgcttaagctttatcttttatctcagtggctttcaaactttaaaaaaaattagcttcgtacccctactctcaaaaggaattatatatgaaagccagtatgtaaaacagataataggtaatagggaggagagtttaaattcagagctatttgtgagttagattcggtgagatcgtgattgcttagaaatgagatgttgaaggggtc

SEQ ID NO: 244979 - DNA, 266 bp, Homo Sapiens
gtatctccaacccaaatacccagtgcttatttggagtctcaaaatcacgtagtccacaaatgagcccaggtgccctcttgtatctctcctccctcccctgtatccagtcaccacttcccaacacagccctctaagcatctctccattctggccatccacttctcccctctccattctggccacccacctcccatcttagttcaggccttcctttctcacctggccacggtcacagcccccttcatggccactagtgagcagaatgg

SEQ ID NO: 244980 - DNA, 287 bp, Homo Sapiens
gttgtgataaaggggaaggaaggcagggaagtgctcctggagctgagaggtctggcaggttcaaggaagatgaaggagcactgtgcagaagtccagagatggaattgttcagtatcgctggagattagggtgttttggggatagaaaagttggaaaggtatagatgcctctggggcaactcagagagatgagaagaaggtgcagtttgggttccagatcctccccaacccagtgccaaagtaattcttctatttaatatactgtgatttcacataagacttaatttg

SEQ ID NO: 244981 - DNA, 937 bp, Homo Sapiens
gaaatgatgcctccatttactgaaaagaggaagaggtggtgggggtggagcagattttagaggctaatcaggcattggggtttgaacaggggatgtttgagatccctggtggacatccgagttcagcgagaacattgcagctgagggacgcagggagaaggggcatttcccgtggccttgaaggagactcatatttggagatcagagggagaacatgctccaggtagaaaaggtgtggcaggcaaaggtggtggggtgggaagcaggtcacagctctgctggggctcggggcagccctagcagctctgtcttccattggtctgctctggaaaaggcagtcaggccactaaagcctggctgaaatctggctgcttgggcgcctgctgtcttaggcctggcccctttccacactcccactgtctgtgtggaccttcgagacatttgcatttgggagctgtggttagagcacagcgtgtgatgaaggcaggcaaggacaggccatgcattcgggggtctggggtcaggcgagctcctcacaggtgctctggaccacgctagcagccgctaagcccgtgcaggtggacaaccactgtggctgtagagcgacaatcgcccagaattggtgtcatctcagcgccttcactgtgtcccaagtcatctcggatgccctacccttcgccctgctgctctttagacctgccgtctcctccctgcccgcacaggcctgtgattgagctctgcatcccttcctcgctggaccccaccctggctccccctggctgccatgtagtctccctcttcactcagtacacgccctatacgctggctggaggcaaggcctgggacgagcaggagagagacgcttatgcagacagaggtaaagacagctgcacgttctgcctccagagccacagccgggcatgcgaccccctggagg

SEQ ID NO: 244982 - DNA, 387 bp, Homo Sapiens
tagacaatcagagagccaaatcatgaatgaactcccaatcacatggccactcaataccggtattgagtggccatgtgagcgtgtgagcatccgtgtgaccgtccgtgtgagcatccctgtgaccgtccgtgtgggcttccgtgtgactgtccgtgtgagcttctgtgtgaccgttcgtgtgagcatctgtgtgtccgttcgtgtgagtgtgtgtccgcataaccgtatgagcatccgtgtgatcatccgtaaccgtgtaggcgtccttgtgagcctccgtgtgagcgtgcaaccgtctgtgtgaccgtccgtgtaagcgtgtgaccttccgtgtgagcgtgtgcacacgctgctgcccacacccgtctgacacctgtctccttatcg

SEQ ID NO: 244983 - DNA, 392 bp, Homo Sapiens
tgattctgatactatttcaagcaggagttatcgccacccctacttaaccgctagtaacacggtccctattggcatcaggctggagagaaacgcaactccaaaatcttatcctgaggcatctgctttcaaaggttttccctaattccagctgtcttggcctgagttctccagagtacagagcctaaggcaaacacatttatgtcttgctactttagctgagagttcaagcccaagaaagcaggagtgaaggaatgaggggaaagaggcgggaaaatagggggagccaacacaaggtatattactgagactgctacaacctgctaccaagcataattcatggcttgatctggcaggattctaagagcctatgaactattgcatttcaagatagg

SEQ ID NO: 244984 - DNA, 1610 bp, Homo Sapiens
  misc_feature (359)..(368): n is a, c, g, or t
caacgctgatgcggcctgagtaatagggcagacgtagcggttgatggcagcgtccgggacacccgtacgagagcggtgggtcgaaggggaggacgactaaggccctcgacaagcgggggcgaagatgcggagagatagtacaatcatcctatgggatgtagttgcgcacggtagtgtagatagcgaggggacatcgcgggtatgggtgagaggcggggaggcgagcaacaagcgagtctgcaccacggaggcagaggggtaggagaaagcgtcgtgagccgacgagcgaaagaatccgcggcgggtgtctgagcgcgcgacgagagacgagagacggagtgaaaaataggatttcgcannnnnnnnnntggaggggccgcggggcgcgcggtgttggcctgagcccgggcgccagccggcggcctgagggggactcccgaggggaggcacgaggccgttcggttactcgccgcaggagtccggagacaaggagaggagtggtggccgaagccagtacggggaacctggagaacacgggggtagcggggcagcagggtctgtggggcagagggggttgacagtggcatcgaagcaccgggggaggatttcctcaccacccccaggttccctgcagatgtcgtgtgtgtcctgagtgtttctttggttctttgcacgccaagtctcttggttgtaccatgtgacacaccctgtgcactggtcgctgtcttcgtggcttccacccttgttaatgatgctcctgcctctgcctcccagcccctcacccagcacagctctgcctggacttggagagatgggaggcagacccccaccaccatacatgctgtctgtggcccctcagacattctgtttcatctcccattcatctccctcctcccaccgtgtcagtttttctgcctttccctgctctgttcttccccctccttaggccccagcctgggcccagacccatcctcccagccaggtttccctccagcaggctccttccctccctgtcacctccctctcaccaacccggggtctgagcccctcattcctgaccgtccgtgttctcaggagtggttgaggacacagggccccagcccagccctctgcaccccccagcccggccatctgcgccccacagcccctttggagcttttctcttgtcctctcactccttcccagaagtttttgcacagaacttcattttgaaagtgtttttctcattctccatacctcccccaagctctcctccagcccttcccagggctcagccctgctgtcctgagcgtctcctgggccagagagaggagatgggggtgggagggactgagttgatgttgggtttttcattcaataaattggtgatttcttaccgactgccttgggcttctatgccccctcactgtgccacaggagctgcccaaccccttttccacagtgcagcccaactccagtgaaaatccaccaggaacgtaggtggaaagaagcgtactcccatgttctcaatcatggaaacaggcatgaaggtgtctcacctggcatgaggcaagcagaggtccggaaaacagaaaagatgtccttttccaacaccaaaaaccccgtttttt

SEQ ID NO: 244985 - DNA, 408 bp, Homo Sapiens
gccgaagctcatgtgctcttctccattctcatctctgagagccctggctgtgccctgctcacttgggaatttaatgtgtccaccctgttctctggttgttcttgtgtacaaactgaccttctccaaagacagtatgacctcctggagggcagagccccttttttcttctcttgtctccatcaaaattcctagcagagggtcagttttacaccaactctttggtaaatgcttctggcctaattaactaatgaactggcagcatcttccatactgaactacctccctccacctaagaggaagcagagaattttaaactaatgagctgaagcaaacagaaaaacttgaacattccagctcatcaagatcatctctgaattcccagcattttggatgagtaagttggtaggt

SEQ ID NO: 244986 - DNA, 505 bp, Homo Sapiens
cctgttggtgcggatgatgtagttggccgggaagccgccacccatgttgatcagcttcagctcgatgccgtcttcttctttcaggcgctcgaagatcaccttgaccttggcgatggcggcagtcccacacgctgatgtcacgctgctgcgagcccacatggaaggaaatgccgtaaggtaccaggcccaggtcgcgggcgaggatcagcaggtccattgccatgtcggtctggcagccgaacttgcgggacagcggccagtcggcagtggtggggccttcggtcaggatacgcacgtacactttcgagcccggtgcggccttggcaatgttgcgcaggtcggcttcggagtcggtggcgtacagacgcacgcccttctcgtagaagtagcggatgtccttggacttcttgatggtgttgccgtagctgatgctgtcggcgctgacgccacggtccatcaccttgtccagttcgtagatcgaggcgatgtcgaagctcgaaccttt

SEQ ID NO: 244987 - DNA, 488 bp, Homo Sapiens
gctagagagccccactgtgcccggtgcacttagttctgaggatcaatagcagtgaaatagcttagtaggaatgggaggttttgccaggtctgaactctgtgaccttcctctgtcatgacctaggattctttcccacttctttgcaaaaatattttcttctcatttgtattgctaatggaaggacacaaagcacccacagctgaaggagccttggaatgcttgtatgatccagttgggtgtgtaaattagatctttactccacctatagcgaggatctctctctcactttcctccaaaacccatccactgggtactctatctcaaaggctctgatcatcttgaaggatttgtttctatggtgacccccgcgtgttctgcaagcctgtttctcaatcagaggtgctcattggcttcttaagaagcagcatatttttgccaccctttgcttcatcagtaacgttcaacatacatagtgtcctgtgcaacat

SEQ ID NO: 244988 - DNA, 323 bp, Homo Sapiens
ttgagcgataccgccatgggcgtattgtgctgtccgacagcaagctggcggcgatggaggtgagcggggtatttgatctggacgagcctgaggccctgttgcggacgcttgagcagcgatatggcctgaaggttacctacctgccgtggttggccgtggtgtattgatcggcctgcagcgatctcgtcgcagtacagaaataaaaatattttccatttggcactgcaagttcgtgcaagccagaccgtcgtagtgggactgatcagcaacccattctcatttcgacttgtcagaagctatcggcttatgctcagccctgctcc

SEQ ID NO: 244989 - DNA, 399 bp, Homo Sapiens
gccacaagcactcaggcatctgagtttactggtgcactgctgggaggagagttatgagatgaacattggctgtcaatctctgtgggcaggcggtttggcctctagtgggaatggctgggatttgcgcgttgcctttaggagggatacctgcatgtctacgttccagtctgcactggaaagaattcaaatatgcacctggctcccttcactattttgccctatcctttgtgctcattcttactgaaatctgtcttgtcagctcaggaattggattcccccaggaaggaaagcacttttctgttctgggaagcccagactgttcactttggggcagggacgaacatgtgcctcgtgaatttgctttgaaaacagtcaccagcgggggcgccccagtcactg

SEQ ID NO: 244990 - DNA, 1559 bp, Homo Sapiens
  misc_feature (91)..(99): n is a, c, g, or t
  misc_feature (158)..(168): n is a, c, g, or t
  misc_feature (270)..(279): n is a, c, g, or t
  misc_feature (412)..(537): n is a, c, g, or t
  misc_feature (1207)..(1207): n is a, c, g, or t
  misc_feature (1211)..(1211): n is a, c, g, or t
  misc_feature (1218)..(1218): n is a, c, g, or t
  misc_feature (1247)..(1247): n is a, c, g, or t
  misc_feature (1259)..(1259): n is a, c, g, or t
  misc_feature (1285)..(1286): n is a, c, g, or t
  misc_feature (1315)..(1315): n is a, c, g, or t
  misc_feature (1319)..(1319): n is a, c, g, or t
  misc_feature (1322)..(1323): n is a, c, g, or t
  misc_feature (1339)..(1340): n is a, c, g, or t
  misc_feature (1352)..(1352): n is a, c, g, or t
  misc_feature (1356)..(1356): n is a, c, g, or t
  misc_feature (1362)..(1362): n is a, c, g, or t
  misc_feature (1395)..(1396): n is a, c, g, or t
  misc_feature (1405)..(1405): n is a, c, g, or t
  misc_feature (1407)..(1407): n is a, c, g, or t
  misc_feature (1412)..(1412): n is a, c, g, or t
  misc_feature (1415)..(1415): n is a, c, g, or t
  misc_feature (1420)..(1420): n is a, c, g, or t
  misc_feature (1427)..(1427): n is a, c, g, or t
  misc_feature (1436)..(1438): n is a, c, g, or t
  misc_feature (1440)..(1441): n is a, c, g, or t
  misc_feature (1444)..(1444): n is a, c, g, or t
  misc_feature (1449)..(1449): n is a, c, g, or t
  misc_feature (1454)..(1454): n is a, c, g, or t
  misc_feature (1473)..(1473): n is a, c, g, or t
  misc_feature (1479)..(1479): n is a, c, g, or t
  misc_feature (1495)..(1495): n is a, c, g, or t
  misc_feature (1498)..(1498): n is a, c, g, or t
  misc_feature (1512)..(1512): n is a, c, g, or t
  misc_feature (1514)..(1514): n is a, c, g, or t
  misc_feature (1517)..(1517): n is a, c, g, or t
  misc_feature (1525)..(1525): n is a, c, g, or t
  misc_feature (1535)..(1535): n is a, c, g, or t
ccccgggggggaaatatattttgcccaaaggcgccccagaggtttttaaatctccccccgggacattccggggttcgtcaatcccccgttnnnnnnnnnttccctattggggcaaaaatctttttgagaattctcccccctcctgggaaaaatgccannnnnnnnnnncaatttgaatttcaagctcgggtgaccccccgggggaagaacccccaatggccctcggacccccctggggattgttcccaaccctctttttcccccgggggnnnnnnnnnnggggggatcccagccctttttcgggcccgggttttcctgggaaacattatggcccggttcccgtccccaagggggcccggggccaaaaaaaagggtttgaaaacttttcggggggcgaagcggccccccaagnnnnnnnnnnnnnnnnnnnnnnnnnnnnnnnnnnnnnnnnnnnnnnnnnnnnnnnnnnnnnnnnnnnnnnnnnnnnnnnnnnnnnnnnnnnnnnnnnnnnnnnnnnnnnnnnnnnnnnnnnnnnnnaaccaaaacactgaaactttaattgaatgagaattacatctgtcaaagacctgggcagtacactcctctctcctctctatagcactcattccttctgaggtgtcatttcaccagccacctgagtaagtgctccagctatccccagaccagctagagacatcccaagcatggtcatgttagcatcaatgtccaggcatactcagggctcagaatcgtgggttagtaccacttttcccactacccccttatattccacaagggactcacagccagcaggttaactctcccctccctacccccaccaaaccctggaaaatcacagacagcctttttacagctcctctttctcggcccccttcttctggaaggcagtcaggatgtttaagctcttctggagctcctccttcttcccgtcactcatcttgttcttctcaatcagcctggcgatccgtgtcatctctgatgctgggaagtcctccccttggtctaagatcttccccatgatcttcaggtattgctcggcccacttcttctgagtctccttcacacttgagaggttatcttgcccctgcttcaagagggcctggcgggcctccacaccagaggccctgatgaactccccggccagggcgtcgtatacaggcaggcaaccaggcatacctaggtaganttgnttcagcnagcgctggatggctccgaccttaactgcncccagtgtatgnggactgggttcttaaagtcctcatcnncgatagaaagtgcgacaagcgggtcttgngcgngtnntacctgtagtcttctnnaattcgtaatcnattngttcantagcttgttttcctgtgttgaaatttgttcatnncgcttctancnatttntcnacaanatatcgnatgcctggnnntnnctnttccnctctnttgtactgtccctggcgtnttgccnttatttgtgcttgtangcnctcacttcctctancngtntcctctcntgccgtttgntccgcttttcattctggcctcctg

SEQ ID NO: 244991 - DNA, 322 bp, Homo Sapiens
ccggcccccaggcatctctggcaggacaaccagctccgccctgagggttccacacctaattttgacttgtgattgtcatgctcctgtgttccccaacctagattaggagatcaggttggtcaggctccggcccagccactggggctctgtaccttgctggcaggaggggctgccaccagcccgacataaccaggagccggcagcaggacaaccccaatgccagagttggaatcagttcaagtcactctggttgccggcaaatctgcggagtccagggggaacactgaaaacagacgcggctctattctgagtgctacctagg

SEQ ID NO: 244992 - DNA, 194 bp, Homo Sapiens
attctttggtttgactggatggatcctttgctccatggtgcggattgctgggttcatcatgcagatccactcaggagtgggtttggctttgactgggatgtccaagatgcttcattcatgtttctggtgcctcagttgggttgtgtagtcttagctgtatgctgagattggcgtgatctgatgttaactgggcg

SEQ ID NO: 244993 - DNA, 945 bp, Homo Sapiens
gcctgggtggcgaattcggcacgagggttcagcgctgtgtggagatcctgagccgggccaagaggcctctgatggtgctggggagtcaggccctgctcaccccaacgtctgccgacaagcttcgggctgccgtggagaccttgggtgttccctgcttccttggagggatggcacgggggctgttaggccgcaaccaccccctccacatccgggagaaccgcagtgcggccctgaagaaggcggacgtcattgtcctagcaggaactgtgtgtgacttccgcctatcctatggccgtgtcctcagccacagcagcaagatcatcatcgtcaatcgtaatcgggaagagatgttgctcaactcagacatcttctggaagccccaggaggctgtgcagggagatgtgggttccttcgtgctgaagttagtggagggccttcagggccagacctgggccccagactgggtggaggagctgcgggaagccgaccggcagaaggagcagacctttcgggagaaggcagcgatgcctgtggcccagcacctgaacccagtgcaggtgctgcagctggtggaggaaacgctacctgacaactcaattctggtggtggatggtggggacttcgtgggcactgctgcccatctggtacagccccgcggccccctgcgctggctcgatcctggtaaggaagggcccccgcctggggcagtgggcaccatccatcaggacgccttcacacccacctgctcttggtcctcttaggggcctttgggactctgggagttggtgcaggatttgcacttggggccaagctgtgccggccagatgctgaggtgaggcactggagttgggagacttgctgctctctaggtcctgatccaccctaaccatcctgggtcccctcccgactagatctggtgcctgtttgggtatagctttgtgtaca

SEQ ID NO: 244994 - DNA, 313 bp, Homo Sapiens
tcctgccaaagcgtagtacccaaatgcagcagcttttctcttggtttaatcccttaagactttcttacctctgtagttaccaaatgggaccatatatttaatttgctgtctgtgtacataattaatttcctgaaatagcattctaatctagtacatatttcatttgtttttccagaatatagagtgaaatttggccttaaaagtctcctcactgagaaggtttgggcttccttggggctatttgtgagcatgttcagtctgaccaatccatcccctgttctctcagcactacttgggtactacgctttggcat

SEQ ID NO: 244995 - DNA, 435 bp, Homo Sapiens
ggaaggaaggagatgagagtttacaatgtcatattaaatgaaaatagaggattttaagttatatatgttgtgtgaaagcaatttgattagaagatatgtatattctacctatctatgcatgaaatgtgtagttgcactttaattttcttcattgtaactagactcaagcttgtgaaagaagggacttgtctttttgtttagttgttccatcttcaccatttacaatggctagcacatagttggctctcagtaaatatttgattaatgaaagaatagtaagtagttaataaatgatagcagtgctacttagtttctttttggttgcacagaggaaacatgcccagattgccttaggtttctgttactctctgagattactctgtgttaactctacctctggggtagtgaagaggtatgccaaggggtgttataagc

SEQ ID NO: 244996 - DNA, 231 bp, Homo Sapiens
gggagattgttttttcatttaataaatacaaatgaataaaaatactttattttgtcaagagactgcctctcctccctctcccgatctcacagaagcctccaggcaattgtgtgcccctccagggcctgcacccacagaccccgtctacttgctctaatgactcttctttacagagagggctccatctcatttgcctgcaaatacatcataggtataataccgctcctttca

SEQ ID NO: 244997 - DNA, 671 bp, Homo Sapiens
cacgccgcaccgcgcggtcaaagagtttttttaaaaatatatttagcctgtccctcagcgattctgattcaggaagcgagagagcaaagtcttggaaaatctgcattttcacactgccctggttgctgctggtgaaccatcagcatcatggacgagtatcttcctctacagacagtcaggctgaagtcagggacataagataacctgtcaccaagtccctaatctcctgcccagtcgtcatcgtttaaatgtgtaacccaaaagagccattaaaaaaacaaggaacttttttccatactcttctcttagtctgtaagatgagatagtctttcacagtccttgctggagtttagcggttttattggtggtcattgttaatcaaggagtaaaaacacaggttttgattctttgcattctaagtgtttttttggttttgattgtagtggttgaaaaatacgattatgtgtttccagaaaatggcttggtagcatacaaagatgggaaactcttgtgtagaccggtaggttcttgagtatctgaattactatatactaattaaaagtgttttctaaaagggcatttcacaatgaatgcctctaggaagatgaggaacgggtagaaatgaatcttttctctgtattttttgttttgcattttgaccgcgtgcgcgt

SEQ ID NO: 244998 - DNA, 471 bp, Homo Sapiens
  misc_feature (290)..(372): n is a, c, g, or t
agctcggtaccccacgtcgcaccgccggttcaaatgtttgagggtttttctctccacgtttcatttgtaaaccaaaaataaaattctaaggccccccaaccatctgaatggactgccttcttggccaggacactctaaaatttaacctgaaagactggttcaggccttgaccctggacgggaagtagtggttgggcttttgcctcattacaccctccagcacaatcaatacagaccttaagtcagataaaaagcatttaggaggccgggcacggtggctcacccatgttnnnnnnnnnnnnnnnnnnnnnnnnnnnnnnnnnnnnnnnnnnnnnnnnnnnnnnnnnnnnnnnnnnnnnnnnnnnnnnnnnnnaccttctctacttaaaaaatacaaaaattaactgggcgtggtggtgtgcacctgtaatcccagctacttgggaagctgacggcaggagaactgtttgat

SEQ ID NO: 244999 - DNA, 423 bp, Homo Sapiens
  misc_feature (232)..(326): n is a, c, g, or t
cacgctgcacggcggtcaaggtgtacacaagtatgtggcagagttgtgattccacgattaacgtgccgtctccaccccacctcatgcactgagaagtcctagttccattatcctgaaattattaacagttgcataaactactcttaattatttattccttattcattcttttaaagcatgtacaattttaaatgattaaaaatttacacagccaggtgtggtggctcacacnnnnnnnnnnnnnnnnnnnnnnnnnnnnnnnnnnnnnnnnnnnnnnnnnnnnnnnnnnnnnnnnnnnnnnnnnnnnnnnnnnnnnnnnnnnnnnnctactaaaattacaaaattaccaggcgtgtgggacatgcctgtaatcccagctactcgggaggatgagcaggagaatcattgaccgctcgtgcgcgt

SEQ ID NO: 245000 - DNA, 295 bp, Homo Sapiens
acgctgcacgacggtcaaatatattcctgaggatctccctggcgcactcagattcttaacactaatatgagaatacagaatgtaaaccagaaagtaccttgagacgggtctcaatcaatttaggagttaattttgccacggttaagaatcatgaccagtgacgcagcctcaggaggtcctgagaacaggcccaaggcagttggattacagcttggttttatgttttagggagacatgagacatcaatcaatataagtggggtaatcactggtttgaaccggcggtccgggcgtga

SEQ ID NO: 245001 - DNA, 346 bp, Homo Sapiens
cacgccgcaccgccggttcaaatcttaagatgaagatgatacttttggtcaaattgtttacagtttggagccactataaccaaatcccaagttatagatccaaaaacactttaaaattgcacagacacaagcctctcaatgttttgaagaggaaatagagctcagagagaaacaacctttctgaggtcagacaaaatcagggtcactcttcaaagaggcaaatacctgatctcaaacctgcattagtttaattatctctttttattcagctccttttgaatgatcttgatttgttttgaccttggcacagtggtttgatttggttaaatcaaggtttctttgaacc

SEQ ID NO: 245002 - DNA, 418 bp, Homo Sapiens
aggtatctagaggcttggtgcaaatagtaacagatctgaaaaaaaagaacccaggctcctgggttcctggcctgtggttttgcccactaggctgactcgtgtttacagatgaatgtaagtttgattcttcctggccaactttggggttgatgacccctatttcaaggaagcccagatcctctgaggagcttcatttgtggcctctcaccagtgcctgagtctgcagggtcaggagatattggtgattattaactagtcttataggtctttaaaaaaagaaataaagatagggggaaggagtgggaaagtttagggggaaagtatatttttctcctaaggttcagaaaagtgggggaaaaatagatgagaataatcaggggaaaggaatatctctctagattgatccgtcgtgcggcgt

SEQ ID NO: 245003 - DNA, 365 bp, Homo Sapiens
aagcgcacgatggcgcgtccccttaatcgtggctgcattctgtcgcatttgtggaggcacgagggctggagtccacaggcatttaccgagtgcccggcaacaatgcagtggtgtccagcctacaggagcagctcaaccgcgggcctggtgacatcaacctgcaggatgagcgctggcaagacctcaatgtggtcagcagcctgctccagtccttcttccgaaagctggccgagcctcttttcactgatgacaaatacaacgacttcatcgaggccaaccgcattgaggacgcgcgggatcgaatgaggacgctgcggaaagttgatccgggatctccccaggacggcgccatcgttggctattcg

SEQ ID NO: 245004 - DNA, 662 bp, Homo Sapiens
ttggacccacttatactggagttcctgcacctaccccttgtggtagcttttggggtccaagcctgtgcagcagaagcaggcagggagtctatggtggagtaacttgctgaagagtcctggagaggtgtcattctagctggtcaacgggtgacacgcagtcatcccctcagtgaacgctggacgtgctctgtggctccctgcaggcctgcggatccaccagggggctccgttccttctgggcctaagctgaagaagcggctgctgcaccagagaagtgcatctggatgaaggtggaagcacacgcgggcccgcagaaccgcctaagatatcttcaggtgtgggcttggaactggcaggctttcatttctgcttccattccatggcctaagcaagccacatgtgcaagtctgaagccggggcaagcaagtatcctccacccacaactaaaccatggcaagcgggtagaatggaggttgcgctattcgggccggccactctcctactggctgacaggatgctgcccgagatgaaacagggtgtgtgtgcaccacggagtcagtccaagagtcctgtctctcactacaggcgattcttcatttcttcatcctattgcctccacttcatgttattttccgcccctcccagttacaactacaactgac

SEQ ID NO: 245005 - DNA, 454 bp, Homo Sapiens
  misc_feature (42)..(75): n is a, c, g, or t
  misc_feature (114)..(203): n is a, c, g, or t
  misc_feature (333)..(376): n is a, c, g, or t
gaggatccccgcccacaccctactctttgctttatcattccnnnnnnnnnnnnnnnnnnnnnnnnnnnnnnnnnnagttatctgaaatactggcaaaccaaattagaggtttannnnnnnnnnnnnnnnnnnnnnnnnnnnnnnnnnnnnnnnnnnnnnnnnnnnnnnnnnnnnnnnnnnnnnnnnnnnnnnnnnnnnnnnnnacactagcactctctagacatttaaataacatttaagttcttgatgtaataaattaataaatttcctgacactgagccttgcattgctaaaataaaccttatgtaatcgagagtgtgcattgcaacttgnnnnnnnnnnnnnnnnnnnnnnnnnnnnnnnnnnnnnnnnnnnngctatagcattctttctggcactttatcaggtttgagtacataatacgtaaactcatctattttggggttgagtgtgt

SEQ ID NO: 245006 - DNA, 152 bp, Homo Sapiens
tgctgggattacaggtgtgagccagcacgcccagcctcttccctgccttttagttagcatatgcccttcttctcccccttgtagaagcagtaggggacagcaatgataagtcatatatgggcggtgagttttcttccaaagactgctcaccc

SEQ ID NO: 245007 - DNA, 254 bp, Homo Sapiens
ggtttgtggctgtgatccaagccatttgggatgtctgcccagccctaacctcttcatatgagcacatccaaccctcaattgcagccctgcgcatagggttcagctaagccacacccagattcctgaccctaagaaacagtgagataataaatgttttaggcctctatactttggggtaatttgttacgcaacacagagataagtaatatatttcaagaccaggtagcttaattagtccttccagattcttttct

SEQ ID NO: 245008 - DNA, 648 bp, Homo Sapiens
aatctttatgacatctctattaaagatatcaacatgtacttacagaatggtgtgaattactatttttcactctctcaaatccataggatcatccaaactaaatataagcaagggataacagaaaaccgcaaatctaggagattcaatattaaaatcagaagtctaacacagtgctaatagtgaacactgaactcagatcttttgttttttcaataaacaactcctaatgcccatttacatgtaaacaattcatactaacatttcataattgatttatatgtatctatacacacagccacatacaaagtagagttaacatggtcatcgtgtgtttcaacttaagtgaattagtcactcagtcaaaaaaataagtaaacacagggaagcattttaaatactatgagaacttatgcccaccatttaactcaataaatgtatgtcccacagtgagcacaacacggcaaagacataaatctgcgattggtcttgcatgatttgtgtcgagaatgcctgacagcactgagtgtcattagtatgtcagtcagtacacatttactgagtgcctattatgtacaaggtactattccaggaactggaacaacaggaattaccaaaaatagacaagaattcctacccttatgaaacata

SEQ ID NO: 245009 - DNA, 554 bp, Homo Sapiens
acgactctgaatgaacaggtggaattgatggggattgaggaggcttggagagggagcccccggttgtgaacccatcctgttctaacaataatgagctttgggatgaagagcctccccgcaggcaggggactgctgggagtttctggtgtcccagaagaagccttcagggcagctctgatcagtaaataaaaggatacgaaataaaaatctcaaaggatccgtaatgaataagaaagcaggaatgtcttccccagggagaaatgagttgggggctttgttcagtcacgagagaacatagcacaggactctgggtcccatggagctgcacgtcagcgcctctgtccccacgaaaatagtaacttccttgacactatccaccttgatgccaagagctgtttatatcaacatttcttctcgggattctttcaaactttatacttacttctctgctcctctgattctattcaaggaatgtgaatggctgagttttgttttgttttgttttcctctctagattagcacagctatacagtggaattgtatgccatagtcgt

SEQ ID NO: 245010 - DNA, 760 bp, Homo Sapiens
  misc_feature (490)..(709): n is a, c, g, or t
tttgtatttgatccccaaatttattcaagatacaaaagttccaggtgacaacaacaacaaaaaacatgtctaaaagaataaccaacatatgtcggtatggtgtgagaagctaaaaataaaatagtaaccaacaaaaggaaagcagatccaaagaaagacaatgaagaaaagcaaattaatttccaagaaaaccaaggatgacagtgtagaaatgtcaagacggagtgagctagaaaactgagattgtttgggtgacttctcatgattccagaggaggcccacgaaatagctgctgtcactcacaggacagcctgggcaatttgagagggaacagaaactagaacgcaagttcatgaaatgcctgggaagattgaatttgaggagaaggccccatggattctaagcgaggtgatggtgatgtctgatgttcttttatttttatatatacatttttaagacagggtctcctgttggtgaaatcacaggtcannnnnnnnnnnnnnnnnnnnnnnnnnnnnnnnnnnnnnnnnnnnnnnnnnnnnnnnnnnnnnnnnnnnnnnnnnnnnnnnnnnnnnnnnnnnnnnnnnnnnnnnnnnnnnnnnnnnnnnnnnnnnnnnnnnnnnnnnnnnnnnnnnnnnnnnnnnnnnnnnnnnnnnnnnnnnnnnnnnnnnnnnnnnnnnnnnnnnnnnnnnnnnnnnnnnnnnnnnnnaatatttgatggcctagaggggtgagatgggtttggctttagttatgttga

SEQ ID NO: 245011 - DNA, 246 bp, Homo Sapiens
ttatctttagaatgcttatgcaattggggacctatgatgtaagtttgtgatttatgataggtaagggtagagtgaatgaaaaaaaactaaaataggttgcattccctctactaaaaacactgtaggttgcattccctctagtaaaaacactgatgaaattaacagaaagttaaatcagcataatgaaaactatagttcacaggccagagctaggatcagtcaacaggtacatggttacatatttct

SEQ ID NO: 245012 - DNA, 510 bp, Homo Sapiens
ccaatttagagaatcacaaagcagcttacctgaattaatttgagtactactccttggaaaatggctttaccaacttaacgttagtaaaataaacaacatatgcattgttttattcttctaaaatctgaaaaattctcatttctcattcacatctagtcccaacaattttagatgaaaggttgagggccaatagtggtctttatacaatggaaattgattgcactttctcaacccttcagtgcctccccatcacgtatgggatagaatctaagctctttaacatgatgcaaaggcccttagtctcttctccagtctcttctcttgacaattcccaccttgccctcctacatcaaactatttctaggaattgatcaaatatgactaaagactgagctgagttcatcaatcaactcacacctgcatctttggaaagaattagaacccaatcagcctcaagacgaatgcaggagcgccgtctattttccttgctctgtcacttatatgttcttc

SEQ ID NO: 245013 - DNA, 373 bp, Homo Sapiens
cagaatcaaatatcagtttctgtactgattggctatttcttccctgcttgaatgcagttaagctcttttggcccctaagatgcacaatttcattttccaatccatttaataattgattgtattattttcagcaaagggaagaagagaactaaccttgtgctatcatgaacatgacagacacttgtggaagatagattctcttaaatccgagggaaccagcttcatttaacagatgaagacattgaggcttgggagattaagccaccttgcccaaggctaaacaattagtaaatcatggagttgggattcagactgatctttctgacccataacaccatgtcctttgtaccttccttaaaatgtcacattctac

SEQ ID NO: 245014 - DNA, 322 bp, Homo Sapiens
cccgaaagttgcccaaatgctggaattacaggtatgagccacgacacctggttccaatgtttattctagtagtttcataatttcaggtcttagacttaagtctgtaatccatcttgatttgatttttttgtatatagtgagagatagaggtccagtttcattcttctgcgtatggttatccggttttcccagcaccatttattgaagagactgtcctttgcccattggatgttcttggtgcctttgttaaaaatgggttggccgtaaatgtgtggatttacacctgggttctgggttctgttccattggtctttgtgtctgg

SEQ ID NO: 245015 - DNA, 211 bp, Homo Sapiens
atccctatgatatgtaaatgttttaatattagcagctaatgaagcacaagtggtgacaacaaaagatggctcacctgctgtggtcgctaacattactgaaatgctactaattactaatcattataaaaagttactaattactaatcagaaacagtatatcctatttcctctataattatgatttcctcgattattaaataatacctgaaat

SEQ ID NO: 245016 - DNA, 296 bp, Homo Sapiens
atccatttgtcccctactcggctctgaccaccaagtaccatccatttacttctcgagtattgggaattgggggatggtgcccgaattggcccctctgtccccaccggcctctctggcaagtgcacaaaacggcacttcccctgaggtgggctggtgggcctcacggagaggcggctccttagggccaatgagatggtctctatatgccctggacctagtccggcaaatcactgcaggagacggtcctcccgtctcaggctgccgcccgcgccgccgcccgcactgtccatgcagcg

SEQ ID NO: 245017 - DNA, 257 bp, Homo Sapiens
cctcttatatcttctcccctctgctttggctttctatatgctactaaatcaatgcttgctcaataaaatatctgcttgcctaccagaatatgaattccacaggagcagaaactttgccttttttgttcactgctatatccgctagagcctagaatggtgtcttatatgtagcaggttgcggaatgaatggggttaaattcacaatataaacaggtttaaaaaaaattatctatagcaggctggaagcggtggctcat

SEQ ID NO: 245018 - DNA, 1415 bp, Homo Sapiens
gctctatctcaggtgaatactcggctgaaacactagtttgatataaattaaatgacctaaccctccgactttgaagctaaagaaggtaacctttccattagtgcattacatgttgtggaatctctcgagtgcaaagactgtctagttatttatcaggctatttctactgatgaactgcttcaggtgggggagggaaacttatttttatttgcctgatttaagtgtctgagaaacaaatctttgttctcttaggctgcaatggaacaactttaccagggttttggcatttcctttcctttcctttataaaacatgctcagcaaactgcaccagttaactacagtttggtaaattgttatgttaacaattatgacatctgcaatgttttataaagcaactaatttaataaaatcactgttgtgaggacttaaattttgtgttacctcccaagagatactttttgagagtatagaacacagctcttgggagtacagttctctacgttctctactaaatcttaataaatgcttgacatagttacagctttaaaacatgagtgatttgccaggtccttatgttgtcaccatagagcaacaaaggtatagggctgccttcctcttatttatttggggacattattttgttatttagataccaaggcctaattaattaagtacctataagaactatttatttggagtaactgagcctggtaactcaggtttatggctgttaagtatagattggggaatctttattatgtcttctcctaagcagtttaaccaaatgtgtggttagtgtttttttattcccctaagacagaaagaacaaaaaatgttttaaatttctcttatataggaaataataggaacgtcaaagctctgtatacctactaagtggaaaacaagaccatcatctaagtgatttgagaaattaacaaaagtagtgactacacagcaataattacagtaaattaaataaagattcctttaaggcagacaagggctaagatttccttagcagtaataatgacatacactgaattgaaaatctattttattacagaaagatcagtttctaacaaatgaaaatgtatcacctgttccttaactgtgtaaataataattaaatttctttgaaactggaatctgcaggtacaggtattctttaatcattattggatcatctaaagtagaagctgtcctgaggaagaggaagcttttgatcttaatactagtatctatataaaatggtgtggatgaacaatcatctaaaatcaatctattttaaataggaatttcctcctgaaaagtttcttacttgctacctactacccacaaaggactgatatggtacagtaccgggattgttcaactttagcaaagatctccaatgcattcttcttctcatcacacc

SEQ ID NO: 245019 - DNA, 291 bp, Homo Sapiens
ggggagcagcccaggcccatggcctcacgccacgaccccagccggccctatgctgagcagtaccgcatagacgcccggcagtttgcacacctgtttcagctagtctcgccctggacttgcggggcccacacggagatcctcgccgaaaggacgttcaggctcttggatgacaacatggaccagctcatggagttcaaagcgtttgtgagctgcctcgatattatgtataatggagaaatgaatgagaagattaaactattatacaggcttcatatccctccagcacgcact

SEQ ID NO: 245020 - DNA, 408 bp, Homo Sapiens
aagcgttacggttgggtgattttgagcatggctctctgagcctcagctgagtatctgtaaaatgggttgacaacaaatttcattgcagggctgtggtgaacataaaatgtactaatggctgtgagaggctttataaacagtcaggggtgggattgagcctaagttatatatatatccattatgtctgtttgcatgtgggtcgatatatacatgggtatacacagagttggggttgaggggctaatgtaggaccatttcctgcttgctataagctaaacagcgagtaatgctatctccttgttctctttccagctggttctgaggacatggggaccacagtcaatggagatgtgtttcaggtaagcaaggctctgtctcagcagtggtaaggaccaatagccctggtct

SEQ ID NO: 245021 - DNA, 298 bp, Homo Sapiens
atcttgtcaccatttccatttttgataatgcgttcattctgacactgctgactttaattttgattttttacaatattgcattgagtattaacttaccttgatgactgggtgttagtatccccttaagttttgccctggagattagtgccttacttgcattgctcaagtttgggccctgcctcatgctcccaaacttccaccctgtctctgttcttccttgggccagtctttttgtccattcctccaatgactccattccttgtcaaattgatcccagtaacagcttacttcccggaaa

SEQ ID NO: 245022 - DNA, 681 bp, Homo Sapiens
tctgttactggcgtgtagggcgcgggtaggagaggaatgggaggcagatggacactgcagcccggaagatagggggtaggaaggtagtggtatcagagctgttggagactttggacctgaggccaggaggtgccggaaagtgcaaggtctacaagaaggccatggagcagcagtcgcatagcagatctgatcctggacaggaggctgcaggcagccaggcagctctagactcaggagagaaccagtccacagccaggcctggcgattatggggatggcagtggggaagaggtgccttgtgagctgtgaagattatggtggcaggacaggggtggtgagggaagggctggcacagcctcattttctgaaggccccagggttgggatgagaggggtgcctttggcagaaggttaataacttaacctgtgtccacaggagacttagatatttagaattttagagccagaagagatctagatcatgtagttcaaccttgagcagagtgacaggctcaaggtcccccagggattttttggcagatccaggcctagataccaaatctcctgaaacttctggccagcgccatcccttgtgctgctgctgtgaccgtctgctgtgctgcctgctgacatgacagtgaggaacaagcttttgctcagacttgtccagggactttccagca

SEQ ID NO: 245023 - DNA, 393 bp, Homo Sapiens
gagtttatggggaggtagtgtacataaatataatcatatcctatatatggtcctgctgctgacccaaacttccttatatagcatatgattatatttatgtacactacctccccataaactcctgtatctttgcctccaaacttccccaactgactaacacagtgaatctagggaaaatttccatctattactagattcattaccaaagggagtaaaatggagaaatgtttgcatgcccgacctatgaccagtctgaggtgatttactatagcctattcaggacatgctgtaccctatcggagaaagtgttatgtgacttattgtctctggaacctaatttccagaattcaaatccaccctccgcaactacaagcacaagattacaattctcat

SEQ ID NO: 245024 - DNA, 327 bp, Homo Sapiens
aaagatgaaagactgaaattaacattatgcagttattggtaatgataaggtcaagaatgtgattgtaggcatgagtggctgaaggacagtagagaacaagatcaccggagatgttaaagaaactaaaaggtcaacatgctggaacaatcatctatttaagtgttgaaatcaccaaaaattaaaatggggaatgctaaagagagtgaaagtgagccataagaaatgtgatggaatcacccagatgtaaatgacaatcatgagggaatgtgggaagtgtgtctgctaatatgaactcaaaactgggggactgtctcaaggaagatacct

SEQ ID NO: 245025 - DNA, 245 bp, Homo Sapiens
tacaaaaattttcaggtcaaaaatatgatggagatcactggtttagagatgggggttaacaaggtgcagcagatgagatgtcaacaatctctagggtaatagaaaatatatggacaaatactggctgtaaggcacagcaggcaaaaccacaaatgagcaccctgtgaaaactgcaggttagatgcaaggcaggagtgacatttactcagacaccaaacactgactgagctcctgttactatatgc

SEQ ID NO: 245026 - DNA, 402 bp, Homo Sapiens
ctgagaaaataaattttctgttcctactttctcatctgcaaaatattggcattggaggaggtaatctagaaggccctttccagctctaatgttctgtggatttatgatttagtaattaaatggcacaaataactcatttctgatttttctttgtagttagaattttagtattcatgaaagaaattataagaccaaatctctctccataaatttttaaatggcatctctgaaatagctctatatttcactttttaggatcactgagacctgtatccagttcgaagatgtgtttatgtatttccacctgacattttacacacttaggagccaatcataatgccagttttaagtagatgccattagagatgattgatggccagtttatgttttaaggtgaagagg

SEQ ID NO: 245027 - DNA, 357 bp, Homo Sapiens
gagcggtttcttgtacacttttgaaactaaggtgctttcaattaagacatgactattataaatatgttaattgtaatctgcagggtaatgactaagaaaataatttgaaatctcctattaagacagagattagtagaatggataaaagagaaaaacagcatccaactatacacagtctataagacaatcactacagtaccaaagacacaatatgttgaacgtataaggatagaaaagtacattccatataaatagtaattaataagacagtgggagtagctatcctagtatcagaaaaaatagactttaagacaaaactgttacagagcatagaaggacattatacatcagtacaac

SEQ ID NO: 245028 - DNA, 266 bp, Homo Sapiens
gaaggctctgtaggcagtgatcgtggcagtattgtggacactgaggaagagaaagaagaggaggagtcagatgaagattttgcccatcatagtgacaatgaacagaaccggcacaccacacaaatgagtgatgaggaagaggatgatgatggctgtgaccttttcgctgactctgagaaggaggaggatgatattgaggacattgaagaaaatactagacctaaaagaagcacctacatcgtttgcagatgcactgcaccttcacg

SEQ ID NO: 245029 - DNA, 691 bp, Homo Sapiens
gggagttactgagaactcataagacgaagctaaaatccctcttcggatccacagtcaaccgccctgaacacatcctgcaaaaagcccagagaaaggagcgccatggattactacagaaaatatgcagctatctttctggtcacattgtcggtgtttctgcatgttctccattccgctcctgatgtgcaggattgcccagaatgcacgctacaggaaaacccattcttctcccagccgggtgccccaatacttcagtgcatgggctgctgcttctctagagcatatcccactccactaaggtccaagaagacgatgttggtccaaaagaacgtcacctcagagtccacttgctgtgtagctaaatcatataacagggtcacagtaatggggggtttcacagtggagaaccacacggcgtgccactgcagtacttgttattatcacaaatcttacatgttttacccagtgctgtcttgatgactgctgattttctggaatggaaaattaagttgtttagtggtttatggctttgtgagataaaactctccttttccttaccataccatttttgacccgcttcagggatttactgcagctttactgccttcctccttatcctacggtacaatccgcagtctagttctttttcatttgggaatgaatacccccattttaccttgtttcccctgcc

SEQ ID NO: 245030 - DNA, 683 bp, Homo Sapiens
  misc_feature (53)..(53): n is a, c, g, or t
  misc_feature (122)..(122): n is a, c, g, or t
cttgctgctgcaaagaacagattttatatttcttcctctaatcttggcaaatnacctttaccttttggaaagatttcatattgcttcctcctccctggataggacctaatgtagcacagcgngactcaaagaggaggacattttctcttgccagtgcactgggcagtggggctgtccttcaactgctgctgccaaaattggttttctaaaattcttccagtagagactaaaagaagattcaattcctgtaacccaagactgagtcttagggctccagtctccacctgcttggtttcctatcctttgctgcctgcctggggtggcctggaagcctgttcagaaaggcacaatgtggagcctggggtgtctcccccaccccaggaccgtcaggtttaccagtgtgtgcaatcgccatgtattcagagggaagtacctttgttacctacaacttaggagctaggcctctgctacaagcacttgaaaatgatatttttatttttaacgtctcaacaatctgatatcggatgtcgtttaacctgggctcgtggtagggctccagcatttctccctccttcctggtttgcctgtaggggtagactcggaaggtgggtggggtgtgcatttcctgttaggagtgtatcagtgcttgtcttattataagcccctttcttttgtgaatttga

SEQ ID NO: 245031 - DNA, 304 bp, Homo Sapiens
ctgggaggtgccagtgcagatcttatcattttagttggtaggctaaagaaatgggcttaatcttagaggaaaagtaaacagatgaagaggagtgtgtatcatgtgatcaactgatcagagccctacttcaatctgacttcagagaacttgctcagcaatctttcttgaccaattgacagagaaagagaggaactaatgaaaaaatacacaagcttagaaagtaagtactaccctccactctgactttgggactagagaacctaccatattctttttctgtgtgtgtgtgagacaggtttcctca

SEQ ID NO: 245032 - DNA, 228 bp, Homo Sapiens
  misc_feature (63)..(115): n is a, c, g, or t
gggctccacagtgttgcaccaggcgtggtctcaagctcactgaccctaggcgatcctcctgtnnnnnnnnnnnnnnnnnnnnnnnnnnnnnnnnnnnnnnnnnnnnnnnnnnnnntcaaggctcctttttgactgctgtttgtcacaagtcacatccaagttatcaaaacttgttggatccaactttagattgattgagaatccaaccacttgcactgcactccataa

SEQ ID NO: 245033 - DNA, 572 bp, Homo Sapiens
gggagtggcaccatggacctgcccttgcagacccccttccaatcctcgggcctgggacaccagccggaccacccggcaccatgggctggtggacagggtgtaccgggagcgtggccggctcggctccccacaccgccggcccctgtcagtggacaaacacggacggcaggccgacagctgcccctatggcaccatgtacctctcaccacccgcggacaccagctggagaaggaccaattctgactccgccctgcaccagagcacaatgacgcccacgcagccagaatcctttagcagtgggtcccaggacgtgcaccagaaaagagtcttactgttaacagtcccaggaatggaagagaccacatcagaggcagacaaaaacctttccaagcaagcatgggacaccaagaagacggggtccaggcccaagtcctgtgaggtccccggaatcaacatcttcccgtctgccgaccaggaaaacactacagccctgatccccgccacccacaacacaggggggtccctgcccgacctgaccaacatccacttcccctccccactcgccgtaccaa

SEQ ID NO: 245034 - DNA, 624 bp, Homo Sapiens
ggagtccactccccagtagaaattccatggagtccagaagtagaagtcctgcatattcaagacattcatcttctcatagtaaaaagaagagatccagttcacgcagtcgtcattccagtatctcacctgtcaggcttccacttaattccagtctgggagctgaactcagtaggaaaaagaaggaaagagcagctgctgctgctgcagcaaagatggatggaaaggagtccaagggttcacctgtatttttgcctagaaaagagaacagttcagtagaggctaaggattcaggtttggagtctaaaaagttacccagaagtgtaaaattggaaaaatctgccccagatactgaactggtgaatgtaacacatctaaacacagaggtaaaaaattcttcagatacagggaaagtaaagttggatgagaactccgagaagcatcttgttaaagatttgaaagcacagggaacaagagactctaaacccatagcactgaaagaggagattgttactccaaaggagacagaaacatcagaaaaggagacccctccacctcttcccacaattgcttctcccccaccccttaccaactgactaccactcccgtaccggggatcctctgaat

SEQ ID NO: 245035 - DNA, 667 bp, Homo Sapiens
  misc_feature (225)..(234): n is a, c, g, or t
accacgcggagtggtacttttctgaaaacacaattaactttttcaatcctgcgtggggtgggggagagacatatttatttaatcacccgggagtggggtggtctcaatctaaacgttccctcctccctcaaaggcactgagcctgtttcacagatcctacgtaggtggaacaggacgcgttgtgttgttggggagagagaggagaaaggcgaaggagaaggaggnnnnnnnnnngcttgataggtttgtgcgcgggtccctcgtgcgggctgcgctcctcctgggtgctatttgacaattcctgcctctgccattggtcagtgttggatcagatgcttgtatttccttctggccctcactggcacctcgccatcccccctcagctaaaacccaatctcggatatactactaataggcgcggcgctcggactataaaacacaacaaatcataaacccggcggagcagcagcggccgcgcgcgcctcccctcccaatgagttcctatttcgtgaactcacaccttccccgtcactctggccagcagggcaggagtccttcctgggccagctaccgctctattcgtcgggctatgcggacccagctgagacattacccgcgcccatacgggccaggccaggccaggataaggcttgccactccctccaga

SEQ ID NO: 245036 - DNA, 639 bp, Homo Sapiens
tgaaattgcagaggtgatgacagagatcgacaatctaacttccgtagaggagagcaaaacgactcagaggatcaaacagatagccatgggaagaaagaaattcaacatggatcccaaaaagggaattcagtttctaatagaaaatgacctgctacagagttccccagaagacgtcgcccagttcctttataaaggagaaggcctaaataagaccgtcattggggactacctgggtgaaagggatgaatttaatattaaagttcttcaagcctttgttgaactccgtgagtttgctgatctcaaccttgtacaagccttaaggcagttcttatggagcttcaggctgcccggggaggcgcagaagattggtcgcatgatggaggctttcgctgctcgctactgcctgtgcaaccccggggtcttccagtccacagacacgtgctacgtgctgtcattcgccatcatcatgctcaacaccagcctccacaaccacaacgtgcgtgacaagcccacggcagaacggttcatcgccatgaaccgcggcatcaacgagggcggggacctccctgaggagctgctgaggaatttgtatgagagcataaacgagccatttaagatcccggagacgacggatgacct

SEQ ID NO: 245037 - DNA, 725 bp, Homo Sapiens
ccggggcaggtcaatgaccgagttgccccggcatccagctgggcgacagaggagactcactctcagagatcaagaattctttctttccaattacatcttacattgttgtaagaaatagagtagtattataggacagaaagcatgtaggtatgccagatgccgaataatggatgtcacgagaaacacagatagatgtatccattaaatatatccccagaaagggagaaattgaaaacgaaataatagggtatttgggagaagggatggtggtgctgtgtaaagtctgaaagatgaggaaactaagaagttaaattacttgaagccacatgaccagtgggtggcacagaccccagatgtgaatcccgacacgcctcatccaagccgtttccaaaactgactctgcacctaatggggatttttctgaaggtgcacttgctgacataatggataataatgcacacaatacacaggaaggaaattagaatgtttaggtatcaaatgtaggctagtctccctgggttcttcctccagggctctcaacagccgtcagatctgcatgtgtctatctacagaactttcatatttatactgacctgttgtcaagtgtttgtttacatccagaaggtctctcatcttccttgcctcactgtgggtgtctgttcatggtactactgttagttcaccaacccagcttggaactttagctttacttttttcactctctc

SEQ ID NO: 245038 - DNA, 413 bp, Homo Sapiens
  misc_feature (62)..(62): n is a, c, g, or t
  misc_feature (374)..(374): n is a, c, g, or t
ctggtacgggagtggcaggagagagacgttagtcactacgacacacacatcccaggcaggancacggtgacgcacgcagagggaggcagggaggtgtggttggcaccacgcacaggccgagggccgtccgcctgaccctcctgcagagccagcagcgtgcattgctggtgactttccagaagagtggcagaagagattaaatgcctccggcagagatgagggagaagaccagccccatggactggaggacagacgcagcggtgtggattaaaccgggtgtgaaagtcgtgagaagcacctcggggaggcctgaacacaccatgagagaggacagtgggcagcttaggatcagtgacacacgcaagcagtacctncacagtttcccactcccgtaccagggggatccttagatc

SEQ ID NO: 245039 - DNA, 235 bp, Homo Sapiens
ccaagatctctattggctttgctttggttcctgtttcccccctgaaaaaaatctaacttctaaaaacattctgctcagacaaccatttcaagttataggacacatgctctaaaggaaaccatccaggagaaacatttgcacaagttctccctatgacttgagattgcatctgagaagggtgcagggggagaactagacagaaacagcccactctgtgtgcagtacaccgtcgaag

SEQ ID NO: 245040 - DNA, 919 bp, Homo Sapiens
tactcaattcaagacttcattgaagcagaagatgacctttcatcttttagagcagctgccatcacatcggacatattggaggcccttggaagagacggtcacttcacactctttgcttccaccaatgaggcttttgagtaacttccacgaggtgtcctagaaaggatcatgggagacaaagtggcttccgaagctcttatgaagtaccacatcttaaatactctccagtgttctgagtctattatgggaggagcagtctttgagacgctggaaggaaatacaattgagataggatgtgacggtgacagtataacagtaaatggaatcaaaatggtgaacaaaaaggatattgtgacaaataatggtgtgatccatttgattgatcaggtcctaattcctgattctgccaaacaagttattgagctggctggaaaacagcaaaccaccttcacggatcttgtggctccaattaggcttggcatctgctctgaggccagatggagaatacactttgctggcacctgtgaataatgcattttctgatgatactctcagcatggatcagcgcctccttatattaattctgcagaatcacatattgaaagtaaaagttggccttaatgagctttaaaatgggcaaatactggaaaccatcggaggcaaacagctcagagtcttcgtatatcgtacagctgtctgcattgacaattcatgcctggcgaaagggagtaagccagggagaaacggtgcgattcacatataccgcgagatcatcaagccagcagagaattcctccatgaaaagttaaacaagatagcgcttaagaacttcctcagctaattgagctgagacttgaagaccctgaccaactggaatggcctcattggccaccctgtgcttccggatgccttgaacacca

SEQ ID NO: 245041 - DNA, 681 bp, Homo Sapiens
agtgtttccctttgtctcctcttctggagaggcaactgctcatggctcatgtccatttttctattgggttgttcgtttatattctttaactttttgtattagggttctctagagggacagaactaataggatacatgtgtatatgaaggggaatttcacgatcacagggtcccacaataggtggtctgcaagctgaggagcaaggaagccagtcccagtcccacagctgaagcacctggagtctgatgttggagggcaggaagcatccagcacgggagaaagatgcaggctgggaggctaagccagtctagtctttccacattcttcttcccgcatttattctggccatgctggcatctgattagatggtgcccaccaagattgaggatgggtctgcctttcccagtccactgactcaaatgttaatctcctttggtgacaccctcacagacacatccaggaacaatactttgcattccttcactctaattaagttgacactcaactatcaaccgtcaaactttttaatcttttatcgggaaatacaaataccggttgattgtctgtaatctacaaattagaatcacaaatgttccaagttcgaacttttgacactgactcatgatgagagacttacactaaggaatgtcgcaacacgggggaggtggagggctacgagag

SEQ ID NO: 245042 - DNA, 379 bp, Homo Sapiens
ggatgtggggcctcataggagctgtgtggtcttggaggtggagtcctcatggatagattaatgcctgccttaaggggtgagtgagtgctcacccttgggaatttgggaatttggttttctctcccttgcttccttcagcaccatgtgatctctgtgcacacagctgcatccttctgccctcccccagaagcagcagcagcctcagggatgaggtgaggtcctcaggtgagtgcacctgcccagtcttgaaccttccagccatcagaatctgagccaaatcaacctcttcctttataaagacccagcctcaggtcttctgtcagagcaacacaaaatggactcagcacggatcagaattgtgtcaacccgagctgtgtgt

SEQ ID NO: 245043 - DNA, 412 bp, Homo Sapiens
acccggtgtttccctttgtctattttgtttttagtgtttacattgaaaaaaaatccaaccatccccttagtttacacatttacaggaatcgtgccttcgtcacgttaaccacggtgagaggggaggggccgcaccattcgcacgcacacagaaaaagaaaggaaaaaaccagggacaaagcggaacccagcagaagcgggacgaggacgaggcggcggagcagaggatccaacctccgtggctgcaccctcctcggccctctctggaactccagtggctcagcatgcccccgtgcatttttcttcacttgacatcgttctgatccccgagcctcaagcaggacctcgtccaaccacctccccagacaaccaccgggaatgaaatattgcactcatgcgagacaaagaacaca

SEQ ID NO: 245044 - DNA, 702 bp, Homo Sapiens
taatcagctcggtaccggcatgtgctgtaggccagcgacggacgggtggtacctgagtccagtgccagatggagaccaagcctctggccatccacccctgttggggacaaaaactgtcccgcccactggctggcccaggactgggagcggtgcaacaccacctgcgggcgcggggtcaagaagcggctggtgctctgcatggagctggccaacgggaagccgcagacgcgcagtggccccgagtgcgggctcgccaagaagcctcccgaggagagcacgtgtttcgagaggccctgcttcaagtggtacaccagcccctggtcagagtgcaccaagacctgcggggtgggcgtgaggatgcgagacgtcaagtgctaccaggggaccgacatcgtccgtggttgcgatccgttggtgaagcccgttggcagacaggcctgtgatctgcagccctgccccacggagcccccagatgacagctgccaggaccagccaggcaccaactgtgccctggccatcaaagtgaacctctgcgggcactggtactacagcaaggcgtgctgccgctcctgcaggcccccccactcctaggcccggcagctgcagccccttccagatgaagaccaagcgcccctcctggggctgctgcagcttctgggggctcacagacccccctcctgcgggggacgctgggctacagca

SEQ ID NO: 245045 - DNA, 438 bp, Homo Sapiens
aaatcgagctcggtcccgcatgtgctgtaggccagcgaatcctctggaccctggggagagggtcatacactccctagtgacttctactctatgctccagctttccaccaggacctcctgccctgtccccaactgtaacgaccacaaccaccccatccccttggttacacacaaatatcaccagtctttacatgtactttactgacttctcagataataccctccaacaagataactgcaggacttgccaccatgacctgagaaatacaccaagatattattgtccaatttttttgagatatatatatatttctcatacttttaacatactctgcaatccaccaagatattggtagaaaccctggaaatttcaaatctatttcgtctgctaatgccatgtgaatgggaaacttagatacacgctggcctacagcacatg

SEQ ID NO: 245046 - DNA, 333 bp, Homo Sapiens
agtaatcagctcggtaccggcatgtgctgtaggcagcgcaggttatccacctctgcctggaagtctatactctacccagggcatccctctggtcagaggcagtgagtactgggaactggaggctgacctgtgcttagaagtcctttaatctgggctggtacaggcctcagccttgcccctcaatgcacgaaaggtggcccaggagagaggatcaatgccataggaggcagaagtctggcctctgtgcctctatggagactatcttccagttgctgctcaacagagttgttggctgagacctgcttgggagtctccgctggcctacagcacatg

SEQ ID NO: 245047 - DNA, 420 bp, Homo Sapiens
catgtgctgtaggccagcgttgcggctcccgggtgctgcagccagggaccgctctcttctctcgccgacagcttttccttccctccatgagaaagaagccagctctgtctgacggcagcaatcctgacggcgatctcctccaggaacactggctggttgaggacatgttcatttttgagaatgtgggcttcaccaaggacgtgggcaacatcaagtttctggtctgcgcagactgtgaaattggaccaattggctggcattgcctagatgacaagaacagtttctatgtggccttggaacgagtttcccatgagtaactgaggggaggggtactcagctccatctccaaagataaacctactccccacaagaactggcctttaatgtggtataactgttccgctgggtaccgctcatctc

SEQ ID NO: 245048 - DNA, 531 bp, Homo Sapiens
ggcatgtgctgtaggccagcgggagcctgtttttgcataaagctaaacatgaccaagcgcctcgggaggacactccaagcgaggccctggaaggagcctgtcagggggaggagctgaagcctgctgagtggacctgagcctggggctatcgaggtcctctccctaagacctggagcagtcggaggcaatggtgattccagaaccactgcatataaggaagtggacaaactggtgccgggaaccagacagcatctttgtctctgaagaaaccactgtctccagggagaatacgaaacatacaaggaaccaacagtgggagagagtctgagcagcaaaacgtggggtccccatctgccttgcctgcaggcgggggacgatcaaatgaacgtgtgcgcttcctgcactctgtggtgcacagtatcattattaactctgggatctgaaaaactcgttcaggccaatacaacttagacccgagaagacagacgaggtggatacgctgcctacagcataaccggggcgagctcgatg

SEQ ID NO: 245049 - DNA, 404 bp, Homo Sapiens
aggctcggaccggcatgtgctgtaggccagcggttatacattttattgggagaggtcagcatctgatcgttaaaaagttaacattgagccacacacggggacaagagtcaccaatctctgcccgagatcagctacctaaggccacactgaatttcaggaggtaatatatccctagctgagttcctgatgtgttctttctgcaatgtgtgcccctgccccatctctgttactggtagctccgtccttccatttctttaggccaaaaaccttggtgccatccttagcgattctctcacactctacatcaaatccacaagcaattccaatggtctctactttccaagcatggcccgcactgaccgttcttaccacaccaattggcacacgctggcctacagcacatg

SEQ ID NO: 245050 - DNA, 564 bp, Homo Sapiens
catgtgctgtaggccagcgcactccacagaatctgtgaagtcaactggacagcagggaagaacagaagagaaggatggtgggctcgggaacgaggagaccctctgcgacctgcaagcccaggagtgccccgatcaggccgggcacaggaagaacatgtgtgccctccggattctgaagactgtcagctggctcaccatgagagtcaggaagggcttcgaggactggtattcgggctactttgggacagcctctctatttacaaatcgaatgtttgtagcctttattttctgggctttgtttgcatacagcagctttgtcatccccttcattcacctcccagaaatcgtcaatttgtataacttatcggagcaaaacgacgttttccctctgacgtcaattatagcaatagttcacatctttggaaaagtgatcctgggcgtcatagccgacttgccttgcattagtgtttggaatgtcttcctgttggccaacttcacccttgtcctcagtatttattctgccgttgatgcacacgtacgctggcctacagcaatgccgtgtgt

SEQ ID NO: 245051 - DNA, 496 bp, Homo Sapiens
catgtgctgtaggccagcgtgatgggaagtagaagagatgtagaagatagggtaattaattcaacaggctatattcatttgcatgactgtggtggtagttcaaaaaaccacgacgaccgactacagaggatactggcctgtacccagtacttcagataaatacctgttgaaaatattgttctccaataaaaaaggacaaaaggtctgcaaacctcattttctaaaaaacaaacacaaaagcaaccttgtatgcatccttgcatgttcattgtactctcaccaatgatcttggggtgtcatgacccagaatcactaacgtaaggatacctggtctaccactctgtttttaaaagacaggtcagagtaatggatatattacctcccacatgcgctaccatgcctgactaattttgtatttttagtagagactggggtttttccttgttggtcaggccggtctcgaactcccgacctcaggtgatccgctggcctacag

SEQ ID NO: 245052 - DNA, 426 bp, Homo Sapiens
tgagactttgtattgatgttgtcacataatgtttactgtagacagttttttatttcagaactgtagataacattgagagttatagactgtctcaagcttttctgaccatatcgaatgaatcaaagagtgtctttccttgttagatttaagttggattttctgtccttcccttggaaaatggttgtatttgctggtaatttgtcttcatatttagtgtaaacttcccttacttcattgccatctagctatttgtaatttacagtatgtgccactataacatgatgtaaaattcatctattcgtgtaaacttcttttgggctcttaccccatttcattattagctgaccaatagcacacacaagaaggacattactatggtatcattcagtatactgagatcctgaaggaccgatgctcgacttgtac

SEQ ID NO: 245053 - DNA, 346 bp, Homo Sapiens
atcaatcgagctcgtaccggcatgtgctgtaggccagcgttttccgtagatggcagcatgaggagtctgggcggtgctggccgcacggtgctgcagccgcaggtgtgtcggtctgtgtgttgcctggtgaacgtggctgtgtccaatgagctgtacttgcaggaagaagtggcacctgggtttggccccggggctgtagtttgcaggcccctgccgcacagcattggcagttagaatctgctttttcataggttgctgtctcggcttaaaatctgacctccccacccccgtgcatctggatagtgcagcacagatccggctgccggccgctggcctacagcacatg

SEQ ID NO: 245054 - DNA, 581 bp, Homo Sapiens
gtacccggcatgtgctgtaggccagcgtgtaggtcttgccggtgccaaaggggccatagatgagtagcggggggacacgcctcccatccccagggccccagcccgcgatgagcgccacggccagctcctgcttgcggttgccacgccgcaagggtgggacagaccaaggtctgggcagggcgcaggtgggcaagtcgggcaccaccagctgctcctcaggcagtgtgtccactgcctggtgccagaggcggaaggtcatcgggtcaatctggaactgcacctccaggaccaggcgggcctcaggctgcagccccagggccaagcagcagcgggccggaagcagcagccacagcgcctgctctgagctggcccgcctctccagccgcacctcgaacaccgtattgtcgggtgcaggtacaggggccaccagggctgtgctgaccgcccggcccagcaggaagcactggtctgtgtctggcatcagggaggaggggacggggacctctgcgtacagtgctcccggaggcgcgaagagcatgttcggcgctggcctacagcacatccgtaccactattttcttc

SEQ ID NO: 245055 - DNA, 299 bp, Homo Sapiens
ccggcatgtgctgtaggccagcgaaatatagacatcagtttctaaggggccaccatctatgagaacaaaaatgcaaaaccttgtaaaaagacatttccttttatccttcccttttcttccttactaaaattctgatgcagtgttcagagatacaacagccatcttctgaccatgaagacaaaaaccttaagctaggaagaaaggaggatactggttcctggatgaaatccttgagcagctgcatcagctttggattgtctccgctggcctacagcactgccggtaccggctcgttttac

SEQ ID NO: 245056 - DNA, 431 bp, Homo Sapiens
catgtgctgtaggccagcggctgaggcttggcttctgcggggctgatatgggggattggttcaaacccgtgtgctccgcagggcttgaagagaacataaagcttttcaaggttttggtatgagaattattatttttttagtttctgtgcctaggtatagagggagtactgttttctaagaaaccgttcttggaagcaatgtttctgcgtatcttagagctctggctggcttacagtgcatataagttggggcagccccagcccccagtgaggcccctgtagcagaggtagagaccgctggcagatgctgttttacacacgccaatgaaaatctttaagctgtcaaacccagagctcctcaaactggctctgaaattatgagattagcatttactacgctggcctacagcacatgggtaccggctcgatcta

SEQ ID NO: 245057 - DNA, 438 bp, Homo Sapiens
taatcgagctcggtaccggcatgtgctgtaggccagcgaaggcagatagcacggtttatccagagtagtataatgagaaaaacactggaagagaagggaagtatttacatcagagagttaataatgaataagagaagtctcaattggataaaaagagcaggaaagctaggaaacaggctgatggttaacgagaaagtggcggggtcagtggacagaagaatttcggtaagttcagagatgtatggtagcggacatcttgggggcaatgaattagaaataagagagatgttggtgaaaaaaatgggatatgtgaacctggcatgccagatatggttcaccctctgatggtgacacagtcccgggggtgaccatgagattgaacagctaaggtagactgcacagcgctggcctacagcacatcgccgggtatactctagg

SEQ ID NO: 245058 - DNA, 593 bp, Homo Sapiens
  misc_feature (138)..(151): n is a, c, g, or t
ctagaagatcccgggatgtgctgataggccatcgcggggcttctgaacctgagcggggtgtttcatttttttgcttttccctgtcttaggctcccattctttgattgccttcccatggcgatctataagttgaaagannnnnnnnnnnnnnaatcacctcatgatgatggagttaaaagtaaaccgtgcagaccctggggtccctgttgtacgctgcatcatcccgctggccctgtgccctggagggtggtcggctcatggtgccacagcccctggcagggacggccggcccgcccccgtgactgactgacagatgcagggatggccgaggcagccctcgctccagctgaacgcctccattgctgcttgttctggagacccccgcccccgcaccttccagacttagcagaagaacaaactgaagaacagacccagccagagaagcagggattccagaagctgcccattaagggagaaggagaggatccggtcggcagcagccctgagcagaaagctggaggggggactgtcgcggggtttttctgttgtggtctattttattaaattttttccttttttctattcatttcgat

SEQ ID NO: 245059 - DNA, 535 bp, Homo Sapiens
  misc_feature (399)..(399): n is a, c, g, or t
tgacagccgtggcggaggaagtgaatgccatcctcaaggccctgccccagtgagaccctggggccccttggcgggcagcccagcctctgtccctccttgcctgtgtgagcatctctgtgtacccactcctcactgccccaccagccacctcttgggcatgctcagcccttcctagaagagccagggagggaaagccagaaggggcacgcctgcccagcctcgcatgccagagcctggggcatcccagagcccaggtcatcccatgggggtgctgcagccaggaggagaggaaaggacatgggtagcaattctacccagagtcttctcctgcctacattccctggcctggctctcctgtagctctcctggggttctgggagttccctgaacatctgtgtngtgtccccctatgctccagtatggaagaatggggtggagggtcgccacacccggctccccctgcttctcagccccgggcctgcctctgactcacacttgggcgctctgccctcgctgggctacagcacatgccggt

SEQ ID NO: 245060 - DNA, 496 bp, Homo Sapiens
tcgcgccatgcacgttcgtgacggtttcgaggaacgggcgcacataggtgaacaggccgaactgccccatggacagcaggctgctggcgagcatgccgacgaccacgcccgggtgcttgaacagggtgaacaccttgaacacctggccgatgcccggcgcacgcgcggcggcgggcatggacggcagcgtcttccactgccaggccagcgcgatcagcgataccggcaccaggcacaggaaggcgccgcgccagccgatcacggtgctcaggtacgcgcccatcggcgcggccaccaccgtggcgagcgcattgccgccgttgacgatggcgagcgctcgcggcacttcgcgcttgggcaccatgcggatcgccgtggcggctgacatggaccagaagccgccgtacgaccacgcctgatcagggcgcggcccagcatgtagatggcgtagttcggtgccagcgcgacgatggcacccgaacgcccctccagggtt

SEQ ID NO: 245061 - DNA, 239 bp, Homo Sapiens
cttagaggaccccggttgtagttgtcttatgttaggttaattcccagatcctagagacatgattgtttttgctattgtgaatgacatcttgtatcatcatctcttctagttaattattttgaatacagaggaattctactgatttttgtaagatgatcccttaactgaaaatactcagttatcttattaacaaaatttttatctattgcatctatacatttttatgtgtaggtgcaata

SEQ ID NO: 245062 - DNA, 521 bp, Homo Sapiens
acgtaggtgaaagcacaggcaccatgcggaggccccgagcaccccttagtggggcggggtggggggaggaagtcagtccataatgttgtagttacggatcttggggggcctctggcagcctttagcttttgcaggatgagaccgggaggctcctgtggtcttggccttgccatatgcaattgcatatggcaaggccaaggacatcgggacctggctgcaggtgctggaggctatcggtgtgctggcggtcattgccaatgggatggtcattgccttcacatctgagttcatcccccgagtggtctacaagtaccgctatagcccatgcctgaaagaaggcaactctactgtcgactgcctcaagggctacgtcaaccacagcctgtccgtcttccacaccaaggacttccaggaccctgatgggattgagggctcagacgacgtgactctgtgcagatagcagggactaccgctatccgccccgattacaacttataccgagcagttctggaaggttcttg

SEQ ID NO: 245063 - DNA, 524 bp, Homo Sapiens; identical to SEQ ID NO: 130638

SEQ ID NO: 245064 - DNA, 266 bp, Homo Sapiens
ttgcatatggcaaggccaagggtcagggtgcccagagcctccaaagcagagctgagcgggatgtggggccccataactcagttaattcaactgaagacacaggtcccacagggagcggatgatgaagcagaccccctcctgtcgtcaccctctcgctggtgtagtgtggatgcgaggccagcggctcagtgatgggctcaccacccagaagtggggagagactttgggcctcccacccagtggggcttggccttgccatatgcaac

SEQ ID NO: 245065 - DNA, 738 bp, Homo Sapiens
ccgcgtacactcttgagtggaacacctggtcgatcaaagaccatctgcagagtggccgattggatctttctaaactgcgacatgttgtgcttgatgaagtggatcagatgttagatttaggtttcgctgaacaagttgaagatattattcatgaatcctacaaaactgattctgaagacaatcctcagactttacttttttctgcaacttgcccacagtgggtatacaaagttgcaaaaaaatacatgaaatccagatatgaacaggttgaccttgttggaaaaatgactcaaaaggctgcaactactgtggaacatttggccatccagtgtcattggtctcagaggccagcagttattggagatgtccttcaagtctacagtgggtctgaagggagggctattattttctgtgagaccaagaagaatgtaactgaaatggccatgaatccacacataaaacagaatgcccagtgtttacatggggacattgcacagtcacaaagagaaattacactaaaaggcttcagagaaggtagttttaaagttttggtggcaaccaatgtggctgcccgtggtttggacattcctgaagttgacctggtgattcaaagttctcctcctcaggatgttgagtcctatatccatcgctctggacgcacaggtagagctggacggacagggatttgtatatgtttttactcactcagaggtgtcgcgggtcctctagaaccgcacg

SEQ ID NO: 245066 - DNA, 171 bp, Homo Sapiens
cataatgatagttattttaaatgacaatgtctcagcattctgaactgtataattttgttttttaacatgatacatataattttgattttctaatcaagtagttaagatacacttctgtatccaatgtggcgttagagacccagagtagagcatgccattattcaattcttt

SEQ ID NO: 245067 - DNA, 445 bp, Homo Sapiens
ccaccccagtcccattcttaacagaatgggggcgaaccattaatcaattctcttgcttcagtgccctaaaatgctcccattttaagtgccaggtttgccaccgaacacttgtaaattcgagaataccctcccatctccctcaggtttaataattcgttagaataattcacagaatataggaaaacactttacttacatttagcaatgcatcgtaaaggatacaactcaggaacagctaagtggaagagatgcaccgagcaaagtatgccctgggtgggggtagaagttggaggaagatatagagtttccatgccttctcctgggtggcaccctcctaacacccattttttcaccaactatgaagctttccataccctattatttagggggtttcatggagttttcttgtctctttttcttttgagcgaagtctcactcttgtccc

SEQ ID NO: 245068 - DNA, 856 bp, Homo Sapiens
agacacgcttgagtaagtcggagtttgagctagagtcttaaggacagaagtgtacacaggtacccccacattgtagaaaaatacttttccagccacgcaaaagacagcacaattcctccagctcccatggcccccactgccacctgcagcctctatgagatgacacatttgacacaggaaagagagcacgctcatggagatagatctgttgttgattgctgatctgtctggagtcctttggtattccctgtttcttgttctttaggggcgaggggaggacgcagaccaaggtaggacagtaccaagagactgggagtgcctgtaagaaacagatgggcatctgagtccttggctggatgtttcctgggtggcagaactcctgacccagtgttgtcaaagaccacaagcaagtcactgagagagggttctggaagagcctgacatgaatttactggtatttgggagatataaatgaacatagagaccaatgtctgctgaatgggacatgtgggaggttggctggagcccagacctggaatggtggcactagtgggtagactttatttcagcacctggcatgctaagaatgtgggagtttcccacggaccaagaggaaagcatggaaagttacccaagcttgagccatccagatagagcctgctcaaaaggagttcctgaagcgcatagaagagcccaatggtaagatggcatggggcaaaatggcagggcactgtgcaagaggtcacctggagagtgcactgcagatgccagagaaaagggcagtggagaggtcctgtaagtctcccagggaccttcaaattgcacttactaagagttcgcgggatcctctagataa

SEQ ID NO: 245069 - DNA, 601 bp, Homo Sapiens
  misc_feature (68)..(111): n is a, c, g, or t
  misc_feature (157)..(310): n is a, c, g, or t
  misc_feature (333)..(346): n is a, c, g, or t
aaaatcagcccggttaggtaagattacaaggtataaaaaaatgaattgcctgttcccggtgggtcatnnnnnnnnnnnnnnnnnnnnnnnnnnnnnnnnnnnnnnnnnnnnaaggtccagagatcgagaccatcctggcccacatggtgaaaccctnnnnnnnnnnnnnnnnnnnnnnnnnnnnnnnnnnnnnnnnnnnnnnnnnnnnnnnnnnnnnnnnnnnnnnnnnnnnnnnnnnnnnnnnnnnnnnnnnnnnnnnnnnnnnnnnnnnnnnnnnnnnnnnnnnnnnnnnnnnnnnnnnnnnnnnnnncacagagtgagactccctttccnnnnnnnnnnnnnntttaaattaattttgaacccaaatatccatcatttttaaaaaaataatttttgttgttaatatatttctcagattgtaaagtgggcaacttttttactgaaaatcaactacttccttttttatacatttgagaaatagaaaaaaaagaaacactttttcctttatcatcagtctctgttattctgacaccctttcctaagcacagaaatgagacactagccactacaaaccaagacgtgtcgcggggtcctctag

SEQ ID NO: 245070 - DNA, 940 bp, Homo Sapiens
gaacaagagaaagacatgtcctgccttccagaagcttacggtcaagtgaagaggatgagcgttaaataatcacccccctcgccaaaaaaccacaaacacaattacatctgtgaccagtggtatcgagaaagtccagggcacagtagaaggacagcaagatcgccgttctggagctctaacaccatctcttcaagcaaacctgggaggaggtggcggaagagttaatgagaccagcaggcaaagggagggatggggacagcagagggaacagtgagtacacaaggcctaaggaaggagggatgtgcccctgagggtggccagatggcagcctggggccctcacagcgacccagccacagggtttgttccagagctcaaatacctcagatctccaggacaaggatgacaaggccagctgggcagtgtcccaggcccttctcctcaggctttaggcttccccaggagacctccggcaccattcagccttgttgcattgtggcacttggaaacaaagacagcggtcttctttgcttgactgtcaatagaatattgggagagcacaggtctccctgggaccctgcctcgccgctgatggcctgcagccctagacaaattcctcaacctctctgagcctcagtttccccacgtgcaaaatgaggttcttggaaggctgaactaaatcccacatgtagatgtccaggctgtattgctggagacgccttccatgaattactacgcagataccaccacccatacagagctgtgctgtgctcctccacatcacactgcaaaggaagaaggcagaataacaagatctcaaacagcaatgttccgcctaatgaagtacagactggagattgccagctgcacccaaatccactctctcccccattcttgaatacagtctccactttcactcaggcaagtccattacgatgact

SEQ ID NO: 245071 - DNA, 520 bp, Homo Sapiens
ccctggcattttgatggcccacgtggtcccacttggccccaggaccccatatgaagaaactgactcaactggttctgtgaccactacttaggagctgagtcagggcaagaagaacagtttcaactcctctacgattttatccagagacccaacctatcagcattccccattccttagcccactgcctacccaactatccttgaaaaaccctagcccccgaattctcagggaggcagatttgagaattatctactgtcttcctcacttggtttggccctgtgacaattaaactctttctttgttgccaacaaaataaataagtggtgctgggaaaattggatatccatatgcagaagaatgaaactagacccatatctctcatgatatacccaaatcaaatcaaaatggattaaagacttaagttgaagacttccaactatgaaactactgaaagcaaacagtggcaaagcctctccagtacattggactgggtagagcttctagagtatatcttccactc

SEQ ID NO: 245072 - DNA, 507 bp, Homo Sapiens
tcagatgactggcatgtgaagctcagatccggggttctctgtcgcattctgcatctataacgtcatctggtatcggagttagacagagttgatcggttttgcctcctccttgatacatttgctcctcttagcttccaggataccacatcatcttggtgtcttactacctaagtggtcattcctttttagcatcctttcctgggtcctcctcttcagcctgagagtgccccaggtggaattcagtgatctctcatcactgtctgtaaatagcatctctgtgctgatacttacatctccaggcagacctctctctggagcttcaagctcctgtaatgcagctggtcactcagtagctccgctggcgtatcttaaaagacatttcaaacataacgtgtccagaagcgaacaggtgatcttcctggacaaccccgtgccatccatcgttttcctcacctcagctgatggcagctccatactcagtctgaaacccacattgagtccatcctg

SEQ ID NO: 245073 - DNA, 542 bp, Homo Sapiens
aaggtcccccctgaaaggtttcgagattttccaagcccaaggctggaaaaatttgggccataaaaaaatgacaataaagatagaccagacataacaataatgaataggtatacagctaacaggagagccccccaaatatatgaagtaacagcgggcagaattgaagaaaataatagagaatttagaaacaatagttggagtcttcaatacccactttcaatgatgaatagacaactagacaggagagcaacaagaaaattaaacaaccgtataaaccaactagacataacagatatttgtagaatattccacccattaacaacagaatacacatttttcttaagtgcatatacaatattctttttttagaacattcttgatgctagaccatatgttaagccatacacacagtctcaatgaatttaaaggattgttaacatacaaagtatgttctcgcaaccacaaggagaataagattagaaataagtaacaataaaaggttggtatattaactaatatttgcacagtttactaacacgtca

SEQ ID NO: 245074 - DNA, 641 bp, Homo Sapiens
agtggaaatcagggacaatttgtgattgagacagaatcgtcagcctgagaagtggattgagagaatggtgggaggggaagaagaggcaggtctgagttctgctatgaagggaagcaacaacggggtggttagttgttgttatggggttaaggaaggaacttttctagaaaaggagaaattgtgcagcatgtctgtgtgccgacagcagtgacccaggagagtcaagatgaggatgcaggaaggaagggagagccacagcacccaagggagagggtcccagatgcaggtggagggcagcatcagaaaagaaggagacagcctgccaggcgtggcaaggggaaggggcatgtgtgggctcacaaagggagtccaggctgcatggctgcacccagacatccaggaccccaaacccctagccccaaacaggcacagtccaaatgggacctgatgtttctaccgtcaccttggtgtccctgctgcatgtgacctgagaggcttgggtgagggcagagagaaagtccatgtctaacaaatgtggcagcccccgctgcagccggggcaggcttcagcagttgctttacctctcacttggtgtacacagacttcctgggttcaacttcatcgctgattccacgtgccag

SEQ ID NO: 245075 - DNA, 503 bp, Homo Sapiens
  misc_feature (20)..(20): n is a, c, g, or t
  misc_feature (397)..(397): n is a, c, g, or t
ctagaggatccccatggcgnctgatgacagccaacggtgttgtccgctcgcattatcatcaacgacctgggacgtgggccgtaacatggacgagctgctgcgtctggtcgacgctctgcaattccacgaagagcacggcgaagtttgccctgccaactggaaaaaaggcgacaaaggcatgaacgcttcgccagaaggcgttgctgcctacctgagcgagaacgctggcaagctgtaattgccactcgcataaaaaaaccggccttcgtggccggtttttttatgcctggacttcaaggcttccagtgcctgtcctggctctttgctgctcctacaggagtgtgcattcccctgtaggagcggcttgtgtcgcgaaagggccgcaaagcgagccccntggatttcagatcaatcgttgaaatcacgccagccgcccatttccttccagcggttgacgatgccgcagaacagctcggccgtcttctcggtgtcatcagcgccat

SEQ ID NO: 245076 - DNA, 199 bp, Homo Sapiens
cgtataatgttgtgtttacagctgctgtccaactgtctgaatttagatcctagctctaccacttgaaaataataggcaaggtatttaacatctcaaggtctcagggactccatctggaaaaagcttaataagagcacctaccctcacaggattatggtgaagactaaatccatgtaatgcacatagttcagcgtctgac

SEQ ID NO: 245077 - DNA, 308 bp, Homo Sapiens
gaactttataaagaaagaaagaaagaaatgcaggtctttgaagtctttgaaagggttccattctcagaaaatgtaagtacctaagtttccatctagcctccttcctaagtccaggtcagctcaaatttgaagctcctggtgaacctcaacatctccagggtttgtctcttgctaaagactttctcctgctggttgcctcttaggttgcagacacacagggcttctccctgtgccactgctgctgttgtgaacgttgtgaacactgctgtatagtcctcctactggttccagttgggctggagatgtta

SEQ ID NO: 245078 - DNA, 481 bp, Homo Sapiens
ctggtcttcgaagcagagtggcacccgctccgggaggccagtgtgagaacagcctcctccccggtcctccggggttacagtttgatcctgctgtaacccctcccccatgtctggagtctgattctggcccttgcaggtctgagagcacacaggcctcagcaggctgtagctcccagcagtggccagcacattccttccccaaagaaggaaaagccaccaaaagtgaggtcatttggtttttttggcacagatgctgagagctctgggtcactcaattccatagagaactcccccagctgacagggatttggcccagcctgctactcatacaatatgggaacccggggtctggcagactctggcccctaacttgacccctccatgtagttgaggtatgaccctcagtcttccagcttgaaacctccatggtcttatctgtggaatgggatgatgaaatccacccctcctgttgggctatcaa

SEQ ID NO: 245079 - DNA, 673 bp, Homo Sapiens
gtaccctagaaatataggaatggggaaaaatatatgggatgctggtaatgtgtgtgtgtctgttggatgagggggggaggtcacctctagagtttagtaggcagtgtcacatgacttggcacttctaagcagacagtacgatgagaccagatgacctctctaatagtcctctctttccttacagaccagatgatttctctaatagtcctctctttccttacagaccagatgacctctctaatagtcctctctttcacttacaggccagatggcctctctaatagtcctgtctttcactacaggccatctagatatactgtctctattatattatgacagaccagctagatctactgtctattttatattatgacagaccagctcgatctaatgtctctattatataatgacagaccatctagagctaatgtctcaattatattatgacagaccagctagatctactgtctcaattatattatgacagaccagctagatatactgtctctattatatgttgacagaccagctagatctaatgtctctattatattatgacagaccagctagatctactgtctctattatattatgacagaccagctagatctactgtctctattatattatgacagaccagccagatctaatgtctctattatattatgacaac

SEQ ID NO: 245080 - DNA, 376 bp, Homo Sapiens
acttttgtcacttgaggcttaaaatttttcaacggcttcccactgcatcaaggattacatttaagctctctgccagtttgggaactagagaatgcaccattctgcacgaggaccctcaacctggtataaatcaagactgtcctgggcaaactggggctctgggacctgcctgaggccgtgtggccaaggcctgggttccacccctacctctgccctacagctttgctcctgtgtgctgagcttcacccgctgtcccttccgcagggcctctgctgagcttcgcctgctgtcccttccgcaggcctctgcaatcactgccctctccacctgaagcataggggctgtggtacgtgtatgtgagctggtaggtatgatt

SEQ ID NO: 245081 - DNA, 762 bp, Homo Sapiens
  misc_feature (159)..(187): n is a, c, g, or t
  misc_feature (408)..(416): n is a, c, g, or t
ggtgagcaagaggaagtcaaaatttatttaacacctaagcctttttgtagactcttttctatatattgcttaggctcaccatagcgaattctccagtgttaaaacttttctgttttcacatttgaactttatgggttttggggattttcttgtagttcnnnnnnnnnnnnnnnnnnnnnnnnnnnnntgcaaaattttgactgtcagctacatgttggtaagacacaggcaaagtattactgtaactaagttatttttaaagttaaaatatatttttacgtgcctttggctttttattgcagagtctacattttatagattctacatcagatgttgtcacttatttccattgggattccattgtaagctgtgtatgtgcgtgtttggaaaagtgtattcatacttagnnnnnnnnncttcatctgttatcatacttttaacagcaaccaataacggattgtaaagtgtaaaggcacaggttactcatgatgcttctgcagagactgtgggctacaccacatatgttatttggaaatataggtattttagtacagtacatacttgcattacataggtacttcaagccacacaataaaaagtaaatgataaagtgaacttgcttgtttatagtaataaacaaggaccataagagaataagtatagctaagagaaattgctttctctgaaatgtacatgagccctttaggtaaggagatgaatttccatctactctcatttttgattactttccttatggggttg

SEQ ID NO: 245082 - DNA, 571 bp, Homo Sapiens
  misc_feature (69)..(69): n is a, c, g, or t
  misc_feature (120)..(120): n is a, c, g, or t
tttcggtaattgtttggtggtggaaatttggtaaagcgggaataacccaattttccaccccaaggaaanccagcttaatgacccattgaatttacggaatttcgaagcttcgggtacccngtaagaataatgtgaaggccctggttctgttgtgcttcttggacactcggtgggtttacgcaacctcaatcaggagctctgaacaccgtcaggccttagccaaaatctctataaagtaatttctatgtatgagtgccaactgctaggggcagttctgctgagcaaactctaaagttgtatgcacgggcttacagttataactcatttggggctgagaggagaacctgttatttggtttcctgtctcctgatccagatgttacattttgtcgtgggcatggaaagcccccaaactcccccaagacagtacctagttcattctgggaggttccaggtgtcctgtcttttgtattttcagaggagttaatggaagagtatagatactctgctctgctatgcctgtagcttccttgctacacaagtttatttgggattagatattttaactcttg

SEQ ID NO: 245083 - DNA, 316 bp, Homo Sapiens
  misc_feature (75)..(126): n is a, c, g, or t
acggcttcaacggaactttttcaataggatattcttcaactcttcaacatgcttagaaataatattaaagtatgnnnnnnnnnnnnnnnnnnnnnnnnnnnnnnnnnnnnnnnnnnnnnnnnnnnnaattgaataatacttcttaaaacttttaagtgagcctccttgcttattctccgtgaccacctcactctcacaaaaagtgagacataatataccaaattgaacattggatgagggtcagaaagcctaggtttaagaattggttccatcacttcctaggtacatgacctcggtaaagttccgttgaagccgg

SEQ ID NO: 245084 - DNA, 378 bp, Homo Sapiens
ggcggtcaagggtgagaagtaccgacactcaagtgcaaactgccacgtcgttggcccatcccatcagtgggcagctggctgacgccattcactggacggtccctgaacacctaggaatgcacacaccgtgcttctcagacactggagacgcaaaggcaggaggatgcagtccggtgagaggacacgatctttacctgcacaatcagactgtaagcccagcagagaaccccaggggcgcctgggtacttctcggaggtcatcttagttgtggtggggaagacaaagaaataagcattcaagaaactagagttactatacaagaaactctcctgagtttgtataccttaagcataaggattcagttgaccttttttcttt

SEQ ID NO: 245085 - DNA, 608 bp, Homo Sapiens
gagctcggtactcttgcatgctgtcgctagactatgatctgtgtatatgaggccgagaggtgaagggctttcttctgttctatgagtgggttctgagagaaaaaaagagagtccctcacttattggatgagaaatgttgacatactgcccctcttgagaagacagccttataactagaagctgtggagagagggagtttttatttctgctattagtttgcagtggaatgtccacctctcttagcttatgcaggtgatagagaacatggatgttggtacaaaaattaaactttcatgattcttactgcaaatagtgaagtagaggctcctcttcaaagagattttcctccccatctaattaggaataaatagtaacttctcttagcagcaaaatttattcaaagacctgtgctaatattcttagatgtctgctagctgtaataaagaaatcaatgtactttatgttcttagctcccacactatagcctaaatatctgccctggcatgctattactagtccaagcaagcattaggtcatagcccgttcctcttccttatttgaaggtctgacctttctcagcattccacaagttacttcctctttccttg

SEQ ID NO: 245086 - DNA, 230 bp, Homo Sapiens
cacagtatcaacagtggtgatgagagctaccgttgactttgccatattttgcagagcggtgaagacactagctttggagaagtacaatggcaaggtcgcacagctggaaagaaacagaattgggatttgaaccaggtcccgtctccgctgcgtgtagcaccctgctttgtaggcacttagtaaacgtctgtttgatggatttctgaccatcagagtgactcgtggaaatg

SEQ ID NO: 245087 - DNA, 272 bp, Homo Sapiens
acatttccacgagtcacggtgtaatcaaggtcatgtctgaagcatttatctcctttgtaaagttcaagtagaggaaaacagtgaagccaaagagaagcctttcaacagccctattatatgagaatgggatattaggtaaattagaaaacatttgaaacaaaaagaaaaattggggtagctcttttcctcctcgcttattattcaggccatgagttgatgccatggctttatactggaaacagtgagtgactcgtggaatgtccacggatcct

SEQ ID NO: 245088 - DNA, 397 bp, Homo Sapiens
gaatcctagttacgcccctgatacctcccatcccttaagtgggatggcagtgataaacctaaaaacgtgagatgcgatgctctcctctgacctaaggaaatcccgtgagggctgcgttctgagagcttcctctaggaagagcacaactgtgggagctgtatttctcaccttcctccacattccccctcacaagctgacaggcacatggaagtaacactcactcctaagtcatgagtacagtttgccatgaagaacctggaaacatgctccattaaattcagcagcccatgactggctctgaaccgcccaggtgatgggaaacacgattgccatgacagctggcagaagcaatagggatgctgttaccatgatcagagtgaaactgtacaggtatata

SEQ ID NO: 245089 - DNA, 547 bp, Homo Sapiens
ccatagtacgcccctgatataggaacactatcaggaagggattcagaccctgcgacctttgctgtcatataattgtctctcccctagatattaggaaaaaatgtcactggggatgtgaacagccctgcgatattgagagtagtatcatcctctcccccttgcatattgggaacaacatcacaagtggggtgtactcccccttgcatattgggaacaacatcacaagtggggtgtactgcctctgtgatattgggagtgaaattttcctctcttcccctgcacattaggaagggtatcagaggggttggtgtacattccctgcgatattcaacgtaaccttatcctctctctcccagggtattcagaacaatattataggaggggtgtacaccctctgcgatattgagagtcatatcatcctctttcgctctggatattaggaacaatatcacagggttttgtaccccacctgcgatatttgggagtccatatcatcctctctcgctgtggataattaggaagagtatcatgggctaaacctaagggt

SEQ ID NO: 245090 - DNA, 327 bp, Homo Sapiens
tgaatagctgcattatttacttcaacaaactactcaaacaccatacgtcacagttgctcatctgtaaaacagggataaataataaagggttaagtggggtaatccagatgaagcacttccatgtaaggtgttaatagttgctacttgctgcccctgttgctgaccagaaggatgacggtcgcaggttattttgaagtgtctggctagaggccgtgcaggtactgaccaggactggggacctgggacgctgctaggggaaggaccaccacgtagtaaagacactacagcaaatagcatctagtgaggtttaaagtaaggtagggtaat

SEQ ID NO: 245091 - DNA, 465 bp, Homo Sapiens
cagagtagcatagaagagaccttcccctccctgagtctggactttatacctttgttaataggatgctgtcacacacacgcacactgaaccgcctggagctcagctcagctttccctccctaccccctcctggactcccagagacagattttaatccagggtcccatgacactgtgtctgaagagtgatcattacctatcagctatgccctggggaccccttctgccctgtgcctggccccactttcctcccacccctgtctgtctgtctgtctgtcatttgttcattcagcacagacttaggaagtgtcttcagtgggaggcactggggacagacatccacaggaagccttacggagctgttgtccccgcatggagaaggtgatggggacaaggatgaggcttgaaggagtagctagacatctggaggaagagtgctccgggcagaaggccagcaggtgcaaggc

SEQ ID NO: 245092 - DNA, 322 bp, Homo Sapiens
cactgtgtcgtggtgaatgtgagggcgatctggctgcgacatctgtcaccccattgatccccagggttgattcggctgatctggctggctaggcgggtgtccccttcctccctcaccgctccatgtgcgtccctcccgaagctgcgcgctcggtcgaagaggacgaccatccccgatagaggaggaccggtcttcggtcaagggtatacgagtagctgcgctcccctgctagaacctccaaacaagctctcaaggtccatttgtaggagaacgtagggtagtcaagcttccaagactccagacacatccaaatgaggcgctg

SEQ ID NO: 245093 - DNA, 137 bp, Homo Sapiens
caccggctgcactgaaggctgggtaggatatggatattgggaaggcaggtgggagcggactgccttaagttctcaacctggcttgtaggccagaatacccgtggatgcatgatcaacctacagattcctggacccca

SEQ ID NO: 245094 - DNA, 657 bp, Homo Sapiens
agcctccgtggcctccagcagagaagcaattctggcctggcaacctatagcccacccatgggtccagtcagtgaacgtaagggttctatgatttcagtgatgtcttcagagggaaacgcagatacacctgtcagcaaatttatggatcggctgttgtccttaatggtgtgtaaccatgagaaagtgggacttcaaatacggaccaatgttaaggatctggtgggtctagaattgagtcctgctctgtatccaatgctatttaacaaattgaagaataccatcagcaagttttttgactcccaaggacaggttttattgactgataccaatactcaatttgtagaacaaaccatagctataatgaagaacttgctagataatcatactgaaggcagctctgaacatctagggcaagctagcattgaaacaatgatgttaaatctggtcaggtatgttcgtgtgcttgggaatatggtccatgcaattcaaataaaaaacgaaactgtgtcaattagttgaagtaatgatggcaaggagagatgacctctcattttgccaagagatgaaatttaggaataagatggtagaatacctgacagactgggttatgggaacgatcacagccaagcgagcagatgatgatgtcaaatacttacc

SEQ ID NO: 245095 - DNA, 352 bp, Homo Sapiens
agcctccgtggctccagcaaaactgtccttcaaaaggaaggagaaattaagactgtcccaggatatttgagggagttcactactaggagatctactctacacaaaatgctaaagtgaatctttttatgttgaaataaaaggatggtagagagcaacacaaagccttatgaaaatatcaagttctccagtaaaagtaaatatgtagacaaatgaagtgacctgtactattgcagatgtggttcttagaatttaaatgtgaaaaatataaaaagtaactttaaatctgtgttcattgctatacaatacataaatacgtaatttggagcaacaattatgtaaagtgaggaataga

SEQ ID NO: 245096 - DNA, 637 bp, Homo Sapiens
  misc_feature (322)..(334): n is a, c, g, or t
  misc_feature (441)..(441): n is a, c, g, or t
  misc_feature (522)..(522): n is a, c, g, or t
  misc_feature (539)..(539): n is a, c, g, or t
  misc_feature (574)..(574): n is a, c, g, or t
  misc_feature (597)..(597): n is a, c, g, or t
  misc_feature (613)..(613): n is a, c, g, or t
tgggtacgcccccttgatagttgagctttggattatcttcctcttcaattttccctctattgacccgagtgtctccctctgcttctacagatttatagtactccttggctcttttgagtctccacttttactcactgtctctgggatttttaagatccttttcttctcttataaatcatcctcttaatgaaaattagcctaacaaaagtttggagactggaatcctactttgagccactgacttgaaataattcttttggcaagttgcctgacatcctgtcttaccaaggtggcatatttgcatttttactgcttaaaacannnnnnnnnnnnnaccatctttatccaaatttatcatattgatggtaggactaacaggctttttagaagctggctttaactttgagtctcaagctacaatgctgttggggcagcctgggncttcccacgttgagggtttaactttgtttatttgcctcccgttattccaaaatgcttattaaatgaaagggccggggacangtttattttagtcaccnttgctttttaacaatttggtttgtaatcaatgggnaatcctggtggattatttttggnccatgggtagccccgnaaggcttttaattctaaaggggaa

SEQ ID NO: 245097 - DNA, 408 bp, Homo Sapiens
  misc_feature (21)..(21): n is a, c, g, or t
  misc_feature (40)..(40): n is a, c, g, or t
  misc_feature (52)..(52): n is a, c, g, or t
aaaaaaggggccccccagatncaaaagcccccacccaagnggatcacccccnggaacgcttggaggctgaggagttcactgaggctactgcatcttgagactcaggatgaagacccagcttggggctgtcaaaggttttttgcatgtctgacacccatgactccacctggaccttatggctccacccagaagcaattcagcccaacaggaggacagcttcaacccattacgatttcatctctgccccaaccactcagcagcaagcacctgttacctgtccatccccaccccttcccccaaactgcctttgaaaaatccctaacctatgagctttgaataagatgagtacgaacttcatcgcccatgtggcgtggccggcctcgtgtctattaaattctttttctacta

SEQ ID NO: 245098 - DNA, 407 bp, Homo Sapiens
acccatgggttaccgccccttgatacctggaagccttagaccctttctttagctggcagacccctgcctttactttaaggcccatcttctccttgaaagcttcctggatggatgtgctccttgctttctaaatttactgagtgctttgctagtcctctcttgtgacatttatcaccattatctggaattacgtactacaggctctaagaaagtaaaactcttgtttgttcaaggttatatggccagtaccttcgaagagtggaatatagcaagtgctaacgaatacttgttgatcaaatgaggatttatctgtgatgtaaactcacaactctcctatcaaagttccctggaactggaaacatctttagctcttctctgaatcatgtatcaaggggcgtaacacccat

SEQ ID NO: 245099 - DNA, 468 bp, Homo Sapiens
  misc_feature (156)..(156): n is a, c, g, or t
atagacttctgagaggaatctgactgccgttttccccaaaacaacatccgctgtcagcaggaagcagctaaaccatattctagcggtagttagatgttcctcttcagaggggggaaatgatacacaagtgctggaaagggaacggcatggtccatntaaatgatacggaagtggggaagggaagggcgtggtccctggctagggctccatccctgggcttgtgcccatggacctaggtgagaacaggcatttttgttttcctgtccaaatggtgcatttcccaagaacaccctggcctgccacacccccatcctgtgcctataaaaatccccaacaccctagcaggcagacacacaggtggctggatgtgaagaggagcacatcagtgcaggaacacacaagtggctggacatcaagaggaacacaccggcagaagaagacacaagcggctggacgttgagaggatat

SEQ ID NO: 245100 - DNA, 294 bp, Homo Sapiens
  misc_feature (277)..(277): n is a, c, g, or t
agaagcaagcagagagcttttaaagttaagtgctatacagtacttcaaagaacattttagctacactgtaattgttcagcttttctggatacaaagcatctctttgctgttaaaaaaacattcctgtctcacttttttatgttatggctttcagtgctagagaaaagtaagctgaatgtatttaaaagctctttttaaaaacatattttagtttcagaagctgacgcataatgctagtagtttaagattgtgtctgcaccaccaaggggagaactgnggatcctgtagagcgac

SEQ ID NO: 245101 - DNA, 340 bp, Homo Sapiens
aaacatttatatatttaatgcagatgcatagtgtttttcaaatctttaacatcattttttcaacttttaagatataatatcaactattctaaatacaggtaatggtatatttaaggctaccataacatcctatttagagggtggttttttttaatttatctaatggctacgatatagccagattcaaataacatatgtactcaataggtttcaatcatatatataatatattttttgtaactatgaacatacacagttttccagaaatagattttacactgtttagaattccaacacctacagtggaaagactgtttattgtagtaatgcatggctgaag

SEQ ID NO: 245102 - DNA, 383 bp, Homo Sapiens
aaaactaggttctcccccttgggggttggtggcaagctctcagaattctggctagaaacctaggcatgatccctaactttcctgtttccctctcagcttcctgggagtcctgagtcttgttattcttggtcccgctagctcttccttcactgtacagcctggcatagtcatctgtacctccagccctttctcacctgaagagctgcagtagcttcttcagtagcctctcccctccctgcttccactggtgccccagcgtagtcggtccacgcagcagccaactcaaatgaacacataattccccagtggcttcccgtaggcttaaattccagtccttaggatgacctgggccttagaggatttgtcccccaccaaggggggga

SEQ ID NO: 245103 - DNA, 266 bp, Homo Sapiens
ttggtgggtgggtggatggatggatgaatgaatgggtgggtggatggatgagcagttttagaggacaaggattgggtattccaagccatgcagaaggtgagaggaaagatacagagataggaaatctttgttgaagagcatgagtacaaccagaaagttcaaggaagccaagaagagggttggggaataggagaaaagatctgtattagttcactttcatgctgctgataaagacatacccaagactgggaagaaaaggaggctta

SEQ ID NO: 245104 - DNA, 544 bp, Homo Sapiens
ggagggccagaaaatgacagcagaaagtgggatgcttccagatgtggcagggtgtggagttctcggtgtcacagcttgaacttagaaagcacagactcaataacaatggaggatcaactgtggtttcaacacaaaactcagaatctaagtgcttagaattactatggtcttagagatagcctgttagttcttgttgcatacaagggttgtttagggcaaaatgcggggtacatatccaaagtaaaagacagcatcctttcccttgaaaaacatacttgacgatcagggtatacagaacacataaacacgaaacaattggagaatgatagacaaatgtcccaatgcggaataaatcagacagaaggagcagaggcaatatgaccgtggaaggggatcaggtccccaggctgcatgtaccgttttctccctactctgtccccattgttctttgaggacatctgccccatcctaaagcatcctaaacctaaagtcttcacttattctttctcattttctttttcctaacgaatattttcacaggttt

SEQ ID NO: 245105 - DNA, 527 bp, Homo Sapiens
tgagcgccggtgagtaagagaagagcggttgtgccggggccaaaattttcactaggaagttgtttttctccctaagtttgtgtcaatcagtcatagtctgtttctcttcctttcaagattcctcccaagtcccagtgctgacctgccctcatgagcaacctgaacactccagacaacactgcttcttcgctctgagcccctggggcactttgaagttcacagtgcgcacatttttcacatagttttgtagtttcctctttgcttttgaactctttgcaggtgtacatcttgtctcaactaaattcttaactcttaaagagcccaacttatgtcaaacattttattttgctgttgtcacagtgcctagtacagtcccaggtgcatattaagttttcaaaaatacaaacgggattgaaactgacattgaattcatttggcatagaaaggagtgtggaaaacaacctccttgaaaggacatagtatgagaggagataagcttgatgcggggagggagatagcgtcagttc

SEQ ID NO: 245106 - DNA, 169 bp, Homo Sapiens
tggtaatcttggaatgaacagtaggaaaccagatcttcgagttgtcatccccccttcaagcaagggcatgatgcctccactatgtaagttgaacctttcttcaacttcattctttaaaacacatattttatacatagtcaatctgaagcttcctttggaattttctgtg

SEQ ID NO: 245107 - DNA, 356 bp, Homo Sapiens
taattctaattttaccattgtaacttaattaacatgaaatctataacaaggttacacatactttcccgttctaataccatgttcgtgacagaaacaaagcaggtgtcttctctgcaatgtggtcatctgaggtctgagatgaggggtcacacaggtattttataatatttaagggtttggacaacagtagtgataacaattctgaacagcactggctcctaattgaaaggttataggtaaatttaatgctgcaattttatattaacaccttgtccgaatgaagctcagaggaagatgccacatcccaggtcacacagagaggaggaatggagctgtgctctgctctccacaccacc

SEQ ID NO: 245108 - DNA, 388 bp, Homo Sapiens
ggattttctcttccccttggtgggagatgtctggaaacatcatggacacatgccgggaaaacacggaagctgtgcaccaaggtgctgacaaaggaaaaaggagaatggaggtgtgaacatccagctagcaggtcccactcagaaactcctgcatttccagacatggccaccagctctgtggatgagacaggggaggacagggtacctcacaccaggaacccacacaggtccatgtcttgctctgtgatcacacaacagcctccaccaccctgacatgcaggagggaggtcaaagcctcgggtccaacaacaggctccacagcaagggaagaaaggcaggaaggaactcagggccaggtcctcccaggcagcagctgcctgcacgctgt

SEQ ID NO: 245109 - DNA, 413 bp, Homo Sapiens
ctcccccttggtggttggtgggaggataagggaggaaaagcagtcacatcgatggagcgggaaaggccgctcctcccccaaggccccagaacactaaacagtcccattcagccacgtccaggggcctggctacctgaactgcatgccccacaccctacagagaaacaaactgtggagaaattttcaaacagtaaggagagaaagccagaggtgggcagaagccaaggggtggacaggaatcggacagaggggatcaatctactcatctacttcccctcaccagggagggcaaaggtgtggaagagtttccaatgtgacaggaggggttagggttcaacatcttctaacatacgatataatttatttattatgtttattgttcattatctgtctctcccattagaatgtaaatt

SEQ ID NO: 245110 - DNA, 615 bp, Homo Sapiens
  misc_feature (485)..(485): n is a, c, g, or t
  misc_feature (590)..(590): n is a, c, g, or t
ccccaagaccatctttcctctgggtttgagtcaccctagtgaccctggggctccccattttgagccctgaggtaccagctttgagactgtattctgtatatgattgagggctgcaaggaaatcactgttcgacttgtgtttttaaataatgatagaaaaacagcctattacctttaagctgaaggaacttctggagctcttgagcaggggcaggctataaatccataacttactaggagctgcagtataatgttcattttgaaccgttattgccgcctaaggattccatgaactaaccaaggcattacccctgagctgaggggtgaaatggactgctagaggaagttgttggaagtgtctacttgaatactagagaaatccctgcctcaaataagttggtaatggtgacatgattgatacaaagccattcagattagtaaccagtaaaagtgatttattcacttcttaggatggctggaaaaccnttgtcagcagcatagatgaaagatatccatcttcctccttggtgggactcaaaagtcagcaaccatattgaaccagttttttaaaaaataaaagctaaattgtcngaggaacagaatccaaaggtggctt

SEQ ID NO: 245111 - DNA, 295 bp, Homo Sapiens
cttttcctcccccttggtggggtgggagattacgtctattttgagaactcttccagcaatccttacctggttagacggattgaggagctcaacaagactgcaaatggaaatgtggaggcaaaggttgtctgtcttttccggcgcagggacatttctagtagcctcaacagcctggctgatagtaatgccagggagtttgaagaggaatcaaagcagccaggggtgtctgagcagcagcgccatcaactgaagcaccgggaactttttctttctcggcaatttgaatcattaccag

SEQ ID NO: 245112 - DNA, 738 bp, Homo Sapiens
  misc_feature (678)..(678): n is a, c, g, or t
ggtctgggagtctgaaataatagagattttcaggagagcagctcaaaggtacagcccagggccgcccacttctgcttcctgctgggctctctgccaccttccatatgacattggcctggtcggggcaaagaagtgaccgacaggcccctgggacatctttcactcattattcattcacgcacaggtatttgctcacagtgggcaatgggaaggggaggccaaaccacacactaaatgctgcccacagagggcctgcagcccaggggggatgatggagaacagctgcctggagggaggcctaaggtagagccttgaaggccaaggagaatggagaggagaatggagggccttccacgcacgggcactaaaagaaggccaagcctacttggggagaggcaatatcgggacctgtgcactgggctgcactgggcaaaaaaggctatgtgtgtcatgctgttgggagaaaatgggtcctgcggttaagtacatctgggaagttctggattaaatgaggaacggatctctttactgcaggacttgtcaagacctttaacctgtgaatgcagaatgaaccttacggtgggatcccaggacttgggtgttccacacttgacctaaggactagctaggggagggcagtgggagctgatgagatttgagagaaccaaggggttttgnatgccaggccaagaaggaaggctagacttttccttgggcagtgagaatctcaggaggctt

SEQ ID NO: 245113 - DNA, 172 bp, Homo Sapiens
ggagaaagaggaggcagttttctacttgctgtctcacggggtagtaactgggagaccattgagctgtaggtcagtgcagtggttccttggctgggaattttgcccccgctggtccagagctaggtttttgtcagaagatggaggaaggagatactatactaccaccaagggg

SEQ ID NO: 245114 - DNA, 592 bp, Homo Sapiens
  misc_feature (39)..(39): n is a, c, g, or t
  misc_feature (58)..(58): n is a, c, g, or t
  misc_feature (64)..(64): n is a, c, g, or t
cacttcatcaacttttcccaaaaagtgtttggaagactnttaaatgcaccttcttccnttaagnatgttttagaagaagctccactaccacaagcagcaaaagttggaagcctgaagtgcctaagcctgcttgtagccagtgatgcccaaattgagtgagtatgaaaacagtggcttcacattttatgttttcttggattaaactaatcagactcctgaagcttagttacatgtgcttttaaaaataatgcttgcgtaattgataatttagtgttaatcatttaaatgttaacttaggttgttggtgctatcgaataatactcagttcgagtaagtaaaaagtcagatcctgagcaatcagaggtgcaattttgttcattatgactgtattctacttcagtttcggttcaggaaaacccattctatagttcccattgactacctttgggtactcatacactgtattaaacatcagataattctaacattcattcagaactggaatgcccgctctatgctggattctgttagttgctgaggatacaatagtgaccaaaaatgcaatttccttatgcatcctccaccaaggggg

SEQ ID NO: 245115 - DNA, 269 bp, Homo Sapiens
cccttggtggcagagcacggactttgaagagcggaagctcatccgggctgcacttcgtgagctccgacaaaggaagagagaccagcgggacaaggagcgggaacggcggctgcaggaggcacggggccggccaggggaggggcgcggcaacacagccactgagaccaccacgaggcacagccagcgggcagctgatggctctgctgtcagcactgttaccaagactgagcggctcgtccactccaatgatggcacacggacggcccgca

SEQ ID NO: 245116 - DNA, 451 bp, Homo Sapiens
  misc_feature (369)..(389): n is a, c, g, or t
tcgtcacaggatctcgtggtcgatcactgtactattcagaaaaaaacaattgtggtgagattgctctttttaagctagtggctgttaagtatcattcatgttatatttttaaaagtatgaaatgacctttctacttcatttacagagttgaaactgtgggacagccagacagaagagatagcataggagtgtgtgcagaaaaacaggatggatatgactctctgcagcgggatcaagctgtgtgcattagtacaaatggtaagagataaataactgtcattctcttggaaatatattaattattttagtaatatgtgaatctgttccagttccatacatttatagtaggagatgagaaaatttaggtannnnnnnnnnnnnnnnnnnnnatccattatgaagtctcactccatcactcaggctggagtacagtgatcgaccaaggggtacc

SEQ ID NO: 245117 - DNA, 335 bp, Homo Sapiens
ggaccggacctttccaaagcggagatgctgcacatgtacagccagaaggacccgctcatcctctgtgtgcgcctggccgtgctgctcgcggtgaccctcactgtgccagtcgtgctgttccctatccgccgggccctgcagcagctgcttttcccaggcaaggccttcagctggccacgacatgtggccatagctctgatcctgcttgttttggtcaatgtccttgtcatctgtgtgccaaccatccgggatatctttggagttatcgggtccacctcagcccccagcctcatcttcatcctccccagcatctccgctttgaaaggtaccactat

SEQ ID NO: 245118 - DNA, 273 bp, Homo Sapiens
ttccaaagcggagatgctgaggaacaattacataagaagcaacgactgaatctcgtctcttcatcatctgatggcacctgtgtggcagcccggacacgtcctgtactgagctgtaagaagcggaggcttgttcgacccaacagcatcgttcctctttccaagaaggttcaccggaacagcacaatccgcctggctgtgatgtgaatccctcctgcgcactgtgtggttcaggcagcatccagcatctccgctttggaaggtccggctcatctc

SEQ ID NO: 245119 - DNA, 128 bp, Homo Sapiens
atcccgtatcgactttatactcaaagaaggaaaagccagattgcagtgagtgggtaggacagctcagatccaaatgaaagtagggtctcaagtaacccaaggttggccgggtacgatggctcaccgca

SEQ ID NO: 245120 - DNA, 130 bp, Homo Sapiens
aagctgtctttgtgtcaaaatgatagttcatgctcctcttgttaaaacctgcaggccgagcacggtggctcatgcctgtgatccggcattttgggaggccggggcggatgctcaccgcaatgatggtacc

SEQ ID NO: 245121 - DNA, 318 bp, Homo Sapiens
tgtgggcgccatggcaaagagggaggacagacctggcccagaggtccagccaatggacaagcagttcctggtatgcagcatctgcctggatcggtaccagtgccccaaggttcttcctggcctgcacaccttctgtgaaagatgtctccaaaactatatgcctgcccagagcctgacgctatcctgtccagtatgccggcagacgtccatcctcccagagcagggcgtctcgacactgcagaacaacttcttcatcagcagcctcatggaggcaagtgcagcatggcagcctagatgggatgctcaccgctatctgaa

SEQ ID NO: 245122 - DNA, 187 bp, Homo Sapiens
atgcccgtccccctattgactcttagtttagacatctttcaataacatttctggttcctcagtgcataataaatcacgactctttcttttctcatatcatacttgacgtgatgaccattgcaagcaagcattcacacatgactcattcattcctcagtacatactgatgctcaccgcaatgatggtc

SEQ ID NO: 245123 - DNA, 223 bp, Homo Sapiens
ggccggaccatcaatgcgggagccatcatgcccagccctccttaattttttaacatgaattaataggacctggacacacacagcctcatttatatcggcagccatcacagcctgccacatgtcagatgaggtctctggggctctcactccttgcgtcgggggtgatgccacatgtggcccagctgtaggtcacattcagctcctgtgttcaccaggatcagat

SEQ ID NO: 245124 - DNA, 186 bp, Homo Sapiens
aagccggccatcatgcgggagcatcgcgcccagcccgagtcctcttaaatggcaatttagattcactgatgtccttcagacagaagtatcttcctttactttcataaagatatgaaacttcatttcaggttttttttgagacagtcttactgttctgtcacccaggctggagtgcagtggtacaat

SEQ ID NO: 245125 - DNA, 281 bp, Homo Sapiens
tgcctccttagggactggtattatttcttcatctgattggcaggtgagggtgaagggcacagaccctttggaaatgtgatgaaagctctgggtctactcaccagaaaactgcacatacaatgacacaattttgtacggattttcagggggttcctggatttccctgaaaccttttcatgggtctcagagaacctctgccttaggagaaacaatcttaaatcaagagagtgtgacacgagggccagacgtgatgctcacacccagcgcatcgtgatactctg

SEQ ID NO: 245126 - DNA, 201 bp, Homo Sapiens
attctaggtaaagagcctgttatatttagtaacttctgtggtgaaatttctttttgaaggcagcacactcatactaggtcaaggtgagttctgtttctttgtttatgtcaggggggacatttgttcacagaagagactattttcttttatatattttgtcctgttttaaataagtgcgtggggccaggtgcgatggctcac

SEQ ID NO: 245127 - DNA, 239 bp, Homo Sapiens
cgcctagaggatcccattcaacttgcggtgagcatcatgcccggcacaatgacacttcttagaaacgtctagtgtgtattttgaatcaggtgagagcgatcgccatacagattttcccactttttgaatccctcttgcttccctagggcaaagttaggaaaagcttttaagagacagtgctgatttctcacctggcactttgtatgtccatttagtggtgatggctcacccattgaaat

SEQ ID NO: 245128 - DNA, 205 bp, Homo Sapiens
attagattgcggtgagcgatctaggatttttatagctagagaggagaaatcatttcctagcttcaaagcttcaaaggacaggctgactctcctgttagggtctaaatgcagctggtgactttatgattccagaaatcctatgggcccttaggaattacactaaatctggactgggtgtgatggcttcaccgctattgaatgggat

SEQ ID NO: 245129 - DNA, 144 bp, Homo Sapiens
tacgctttggcatgccaaagcgtagtacccaaggcctggttggtcaaactgtgggcaaagggttttcaggatgacggaggtcaagacaggatgtccagagactaccgagttcatcatgtgggtgttgggtactacgctttggca

SEQ ID NO: 245130 - DNA, 241 bp, Homo Sapiens
tgccaaagcgtagtatccaattgttgtcttaactatgactagacatgttatacagccatttatcttgtacaactgagaagaatcatactttgacctaccttgtagagatgtgaggatttagatgtttgctaacttcaaaactgtgcttgaatagactaataatatatgctcatatcagatgtcagttttcatttaacttgattcatttttggctcaggtcattgggtactacgctttggca

SEQ ID NO: 245131 - DNA, 293 bp, Homo Sapiens
tgccaaagcgtagtacccaagtgttcatcaacgatgaatggatacacaaaatgaggtattatatgtacagtggaatattgttcagcctttaaaaaggacataagttctcgacatgccacaacgtgggtaaaaatgaggacattaagctaagctgaaataagccaatcacaaaaagtcaaatactgtatgattccatcttacatgagatacctagaataatcaaattcatgcggacagaataatggtgactgggggatggatggagtgggacacgttgggtatcgctattggaa

SEQ ID NO: 245132 - DNA, 397 bp, Homo Sapiens
gagctcggtaccctgccaaagcgtagtacccaaccacctcctttatctaacccttacacatgaagtcagtatttctccagtcaatatttctcctgccctaagtcaccccagggacaggtaagagacgactagggaccactacttttgcccagaacccactgaaattattcaagctagccagtcctgaacagtttcctgccttgccttttccatggaaaccacagtaaaggcctgtgcccatgctttttccctttcctctttcttcctcctgatcaaccctagtacctctcatgtggccctgcattgcatagtgtatcctctcctcctgggaactataagtaataaactgttatttcaagacagtttctacaagtctgttgggtactacgctttggca

SEQ ID NO: 245133 - DNA, 380 bp, Homo Sapiens
tgccaaagcgtagtacccaacttcacacaggttttttcctgctgtctgtcattttatagctctgtgttttacatttaggtctatgatccatttgatggtttctgtgaaaggtgttagatgtgtcttgattcactttttgcatatggatgtccagtagttccagcagtatttgttgaaaagactgtcctttctccattagaattgcctttgctccttggtcatcaatcgattgatctttgactaagatcaatttgaatatttgtgtgagtcacacaagtgtgtttgcgtgggtctatttctggtctctttattttgttccatcaatctagttgtctgttcttttgccaataccacattgtcttgggtactacgctttggca

SEQ ID NO: 245134 - DNA, 429 bp, Homo Sapiens
tcggcggtcctgcaagcgtagtacccaataggtagttttggatccttagcctcctcccactctccaccctcacaaaggcctcagtgtctactgttcccttctttgtgtccatgtgtactcaatgtttaggtcctacttctaagtgagaacatgcagtatttggtttcctgttcctgcattagttcacttaagataatggcccccagctccttccatgttgctgcaaagaacatgatcttgttcttttttatggatgcacagtattccacgatgtatatgtgccaccttttctttatctggtgtattgatgatgggcatttgggttgattccgtgtctttgctattgtgagtagtgctgcagtgaacatatgagtgcgtgtgtctttatggtagaacaatttattttcctttgggtactacgctttggca

SEQ ID NO: 245135 - DNA, 139 bp, Homo Sapiens
tttccaaagcgagtacccaaggagccacagacttactggctcttccagaattctgcatcctacttgcacttaaaggcctgaattcaggtgctctgaggtgaccactgatgataaattttggtactacgcttggcaggtc

SEQ ID NO: 245136 - DNA, 117 bp, Homo Sapiens
ctaagatacccattctttctgcctttgcccaggatggaggctttgaaggcaggtggtcactgacactcggggtaagggtgcgcagggagccgggcttggtactacgcttgcagtacc

SEQ ID NO: 245137 - DNA, 245 bp, Homo Sapiens
agcggtctgcaagcgtagtcccaaagcatttaaataaatatcaatttttaaaagatacgtatttacctttcaaatcaacagattacattggatgtcttgagcgggtccataagtgcttagcctaaaccaattcattttaaatccctgtaactttttgtaccctagcgttctcttcacaccttttggttacagtttttcttcccccccaaaaatgctgcaagtgagttgggtactacgctttggca

SEQ ID NO: 245138 - DNA, 337 bp, Homo Sapiens
aaaaaatgcagaggacccactatgtattatacagatgcacatgcagtactcacacatattacacacacagaatatatatgcatacacaggcaagtgtgtgtattcacatacacacccctacatattctcaagaaggaaatacactaaatgctaaagaaattacctacgggcagtaaaattgtgggtaattgtttctctgcttctttgtatttttaaatgtttcaacagtaaacatctattactttgacaatataaatagtatttaagtaatatttttaaatcccagaactatcaaaacatatttgagtagaaagcacttgggtactacgctttggca

SEQ ID NO: 245139 - DNA, 209 bp, Homo Sapiens
ggccggtcctgccaagcgtagtaccaatagctgcgcgctccaggactgcctacccagcactaccccaaacccccagttccaaacccgagacttcaggcccgcccccttacgcgttgtctcattccaccaaattcagaatatttacacaatgccttcatgattttatttttctggaaattgaagtgtcaattgggtactacgctttggca

SEQ ID NO: 245140 - DNA, 228 bp, Homo Sapiens
caccaaatggcgaacggactgatccaggaaggcgacgtggtcgagaagctgcagacctcgatgcagtcgggcaagtccatctacgacggctggatcagcgactccgacctgatcggcacgcactaccgctacggcaagatcctgccgctgaccgactacatgaacggcgcgggcaaggagttcaccaacccgggactggatcagtccgttcgcatgttggtaccggcc

SEQ ID NO: 245141 - DNA, 244 bp, Homo Sapiens
cggaccaacagcgaacggactgatctgaggctttcagagaagactctacattatttgaatcaaaccatatgtgcctccatgctttctttgtctagacaccaccagtcaaatagcctaggtaaatatttcatactgatgaagcagtgacatctttgaaagctgacaccaagacagagtggctctttctggagttagtatatcaaagagggaaggttttgcatagatcagtccgttcgcatgttgg

SEQ ID NO: 245142 - DNA, 174 bp, Homo Sapiens
ctggaccaacatgcgaacggactgatcggttgtgagggtttggtagaaaatttttcccttatcttaaggctgaatgttgatcatgctttaaattaaatttgatacacactggtgacaggaaaattgtcaaataaatgaccttgattagtggacagatcagtccgttcgcatgtt

SEQ ID NO: 245143 - DNA, 701 bp, Homo Sapiens
aacatgcgaacggactgatcaggaggtgggaagacatgaaagttctccttgggttgctttttatagtattgtaaaagaaggggaaacggtcatcatttgagagtgaagacagaagttggaggagaaaggtgtgaacagttgtctgggaaagagaattgtttagggaatgagctgggactgcctggtagaagtaagggcacccatgaggtcgcatgggtaacatgcgaacggactgatctcctgttgtccctgtcttctgagctttgccctcacacacaccattgttcagactctgccacagctgcagtccttgcagacagtgtgtgtccctcctctgctcacaagcaatccttggctcccaactgcctgcagaatgaagtggatttcttagcatagccctgcagactttggccatttgtcacacactggagccagcctgccccctactacacccgcccaaggatgcacttccttcccgtgcgtaggacaacgcacagcggacgctggtttcagagcccaccaagcaggcacttgcctccacgcctgggtgtgccccctccctgcccatctctgtcctgtgaagtcctccagggccaagtatgaagcctctcccccggggctctccaacgtctcccggcaaacactggcacatcaatccctctttccagccagctcactccttgatcagtccgttcgcatgg

SEQ ID NO: 245144 - DNA, 385 bp, Homo Sapiens
tgcgaacggactgatcttctggggccatgcgccgaactcgcagacccgcggtctcgagatgaagaaggcgatggacaagctggacctgctggtcgtcatcgatcagtccgttcgcatgttaacatgcgaacggactgatcattgattttttaaaagtgttgtatggaataagtttaaaaacagtgaagaaatggtgacaatttttgtggaattcattggtgccccttaaagaagatcaacacatctttgacgattgtaaaaccagaactgtgaattactttcctaaacaatcctaaacttttagccatcatatgtgtgtgtttaaatgcaatccttgatactatacagacatggaattttagatcagtccgttcgcatgtggact

SEQ ID NO: 245145 - DNA, 161 bp, Homo Sapiens
aacatgcgaacggactgattctgcagtagagaacgccggctggggcagaatggaatagaggatttcaaaaagcatgcgttttttgaaggtctaaattgggaaaatatacgaaacctagaagcaccttatattcctgatgtgatcagtccgttcgctgttgg

SEQ ID NO: 245146 - DNA, 299 bp, Homo Sapiens
atctacaggatctcgaattcgatagttgtgcaaacttcacatctaatcagaacattttgatcactcctccccaactccataggccttgactttaatgtaatggcatatacatagtatagaaatacatatagaaacccattattctagcaccatttccattctttcccccgggactgcaacatcatctgtcataaatcaacttttcatgtctgtgtgaatttggttttgatctccctattgagagactggtgtacagtatttgtctatcctgcaccacttgtcgagattcgggatcctct

SEQ ID NO: 245147 - DNA, 213 bp, Homo Sapiens
tggacactgaaacgtaagactggtcagtggaatgcagcaccctggctctgctggaggcgtctatgagacaacacagcacttcattgacatccaagggcacctgcacatagtaaagagggacatagataacttagtgcagcgaaatatgccatcaaatgaaaagccgaaatgcccagaactaccaccatttccatcatgtttgtcttaccgttt

SEQ ID NO: 245148 - DNA, 311 bp, Homo Sapiens
aatctcgaccaattgtgcacctctgctctctctttcaccagcgttatgctgactttgccccatcacttcttcaggtctggaaaaaacattttgaagcaaggaaagaggagaaaacacctaacatcacccagttaagaactgatttgcgttttattgcagaattgaccatagttgggattttcactgacaaggaaggtctttccttaatctatgaacagctaaaaaatgttattaatgctgatcgggagtcccacactcatgtctctgtagtgatagtttctgcaccacttctcgagattcggtaacctcta

SEQ ID NO: 245149 - DNA, 256 bp, Homo Sapiens
accacttgaaaccgtaagaccaaacggcactcacgtggcatcagtccccactgcggtccacggccaggtgaacaatggtaagacgtgctggtcggtggctccccgtggctgtgggtactgggagcagagccccttctcactcgtggtttcggttctgactgtaacagttttagcttttgtctgaggcaatgtttgcatttcgaagctgcaggaaatctagtcttacggtttcaagtgtcgtaatcctctagagcac

SEQ ID NO: 245150 - DNA, 251 bp, Homo Sapiens
  misc_feature (45)..(93): n is a, c, g, or t
gttcagaggatccgttcactgaaacgtaagagggagattacagannnnnnnnnnnnnnnnnnnnnnnnnnnnnnnnnnnnnnnnnnnnnnnnnaccctgcccccccaaaaaaagattatacaaatgagtaaggtaaacagagatgtcagagactgtactgttttgggggagttttcagtggcttgatcacatgcatttctttccagacaacaatccctattaagtatgtgtcttacgtttcaagtgtcgga

SEQ ID NO: 245151 - DNA, 245 bp, Homo Sapiens
gagagacatataccatgtattcagaagccctaatttaacaaattcatatgcagggtagtatgaattaatgaatttcttagagtaaagaaacgtttagaaaaatgatctcccataaaacccggaaataagtaggtttcgctaaacctaaaatacatgtcctgaaagcattttcgttcttcccataagtactagatgcgtataatttgctttacaggcacataattttgatgagacaccggaataat

SEQ ID NO: 245152 - DNA, 466 bp, Homo Sapiens
tgttaatagtctcatggacatggaatttttgaaagtgatatatgatgcacattttgtgtgtatgtattctaattagtgtggataaagcagttacattgatgcatgttgtaagcagcatacttatgtatttctcttgtcttccttataagtgtccccatgtactcagtgtttattcccttttcattttgagtacctgcttatatggtcagtatgtgtacgttagcattggctccttatggtaggattaggacagcaagattgtagagctgttattgactccagacgacatagattgtcagccactctcattctacagctgaggccaggacaataaatgcctttcccagactgggtagtggcagatctgggatggaatatggttttcttgattccctttcagccttcatttctctctctcaggactactacttcttaattacttttcacttaatttcccaatactgat

SEQ ID NO: 245153 - DNA, 488 bp, Homo Sapiens
  misc_feature (111)..(123): n is a, c, g, or t
gaattgggaagattgttttagcctgggaccttggggctgcaaagtgctctgatcgtgcacctgcacttcagcctggggcaaaagaatgagatcctgttttgaataaatatnnnnnnnnnnnnngtaagttaaatcatctctccggctcttctctcattttcaagaaaccaacctaaacgaaaaccaaaaccattaaatacaaacttagcaggtgctgtggaaatgtgcgagagaatgaagacacctcggcacctccacactcttgcccaggcagagatatacactctgcacaaaggaatgaacagttaagaaaacggacaaacactataaaatagatttaccaatattctatgaatccatttcagcataaactctcagctcttttccccatcctcccccccaaattaataaggttgatttcccaatagtcagcttgaaagagcctagatgcccttaagtatatacgacagagattcccgattgagtct

SEQ ID NO: 245154 - DNA, 307 bp, Homo Sapiens
  misc_feature (12)..(12): n is a, c, g, or t
gatgctttagcnttaggaatgaagattctattagattctggactggaaaaagcaaaagaacttcagcatgaactctttaggcagtgtacaaaaaatgaggttaccaaagaaatgaaaactaatgccatgggattgattagatctcttgaaaacatcttgctgaatcgaaaattaaaagtttcacgaaggcaagtacaagaagaaaactttgaataccaagatttcaagaggatggttaatcgtgctccagaattcttaaagttaaaacattgcttagagaaagctattgaaattattatttccgcag

SEQ ID NO: 245155 - DNA, 612 bp, Homo Sapiens
cagacagttgacggcatctaatcacacacattgtatgtatgaaacatcactatgtaccccagggtatgtgtcattatttgtccatttaaattgttttaaatttcactttctggttgtgtcatagctaatacataaaagtagatttgacattttcccttgagttcctgctaaattcacgtattaaggtctagtagttgtcttatagattccttaggagtttccatgtccatgatcgtgtcatctacaattaaaaacaattgcgcttttctttcatatatatatgttcatttgtatatgacatttgcatattgatttacctataatgtacatatgatgtgtacacatatgcatacatatctatacaggattttttcgcctatgtcagtggccaggtccgtcagtgacaatgttcagtgaaagtggtgtgagtgggcgtcctttaggtgttcctgattttaagaaagcgtttggtctttcacaatttagtacagcgtaagctgtagatgtttctcctaaatgcctttttatcaggttgagtgagtttccttttcattttagttcctagagagtatatatttgcgtaaatgggtgtggattcggtcactagtctgg

SEQ ID NO: 245156 - DNA, 714 bp, Homo Sapiens
  misc_feature (507)..(517): n is a, c, g, or t
tcgaggatctctatcagacaagtgaccgagcagatccatctctaaataaataaagttactttcttagtggttgtctagaggttatataacactatacttgagattaatattaccttaatgctggcaacacatagacttggttttcatgttgtttcatttttacccccttctttgtgtgactgtcatacatattacggttctatatgctataaaccccaaaatacagtggtatacttattgtttaatgcaactttatgtcttttaatgaagttaaagagaacacagttttttatatttacctaggtactgtttaccttttcatttctttgagtagatttgaactactatctggaattatttcttttcagcctcaactattgcttttagtatttcttataaagctggtctgctaacaatgaattctctttttttgtggagtgtctttatttcacctgtacttgttttaaggacagtgttgctggatataggattcttgtttgacagcannnnnnnnnnncttctggtggcactctgacaatactgccccactgcctcctggggtccatggtttctgattagaaggcagctgtgatttatttggttattcttctgtaagtgataacttgtacttctctagcttcctttaagattttgctttgtctttcaacagtttggccatgaggtatctaggtgtaagtatctgtgtttatccta

SEQ ID NO: 245157 - DNA, 327 bp, Homo Sapiens
ggccggtccggcagctatccggtcaatgtggtctttttagtatataaacctaggtttgaatcttgttctgctgcccgtgactgtggacaagttgtttaacccttcagctttatttttatctgttatgtttgggttgttgtgaaggttaaattagactaaatgagctagttcacgtgtgaaattttcagcttcagtgttcagtggatattaattccacttcttcagtaaagagcccaactttacaggaatctaataaaaagcagtttcttggaaggtactggggtagttcctttcttcttggaaggagtgattgaaccggatagcttg

SEQ ID NO: 245158 - DNA, 254 bp, Homo Sapiens
catggctaaaggtagtgtttattgtaaaggcagcatgcctggagacctaagagtgggagtaggggggtgggcatgggcacgtgtgggtgcaggcagggcattctgaggggtcagttgaaaggctctgtctctggattcagctttaactggttctaaaataacgaagcagaaatgactttccttctctctctggtgtcagcttcaaatgaattatggatactgaacctacagagtaatgctgattaaataattga

SEQ ID NO: 245159 - DNA, 562 bp, Homo Sapiens
accagggtaccttggccccagcaagctgagcagatgccatgagcgggtttttctctataatgttggaaacctggctttctgacacacatttgcaaactaagtgtgaacagttcagagtagcagccgcaggatggggcagagctgagaagccaaggggggaagagttggggctgacctcttcttcacctcgggccttaatcactgaccaagtccaggaacagtatgtataagcatcagcccaagcaaagggtcaaggaaattagtgcatgaaaggctaatgctcataaatatacagcttttataattcagacgctgctaagcctaagaatctcagagcgctttggaaagtcatgggtaacatttgtaaaaatcatgttttaaaaccacctgccactgtgtggtctccttcaattctcataccaccactaatatctgagatgttattactcatactttacagataagcaaactgaggcttggagagattaaataatttgcccatattcccaacccagacccaaggtcaaaccacacacttgtatgattctagatcctttgtata

SEQ ID NO: 245160 - DNA, 598 bp, Homo Sapiens
  misc_feature (86)..(114): n is a, c, g, or t
acaacagctcaaccacgttgatggttccagcaagcctgcggtgctggcggccccgtctggcctggagcgctacggcctaagcgctnnnnnnnnnnnnnnnnnnnnnnnnnnnnntgcggtggaacagcgcagccgcttcgagtacccgccggcctccgtgccggggcagcgccgcttggcatcacgtaacggggacctgaatttacaggtggcgcccccgccgcctagcgcccacccgggcatggaccaagtgcacccccaaaacattccggattcccccatggccaacagcggacccctctgctgcaccatttgccacgaacgtttggaggatacgcatttcgttcagtgcccttccgtccccagccacaaattttgcttcccttgctctagagagagtatcaaggcccagggggccaccggcgaggtgtattgccccagcggagagaaatgccccctagtcgggtcgaatgtaccttgggccttcatgcagggcgaaatcgcgactatcttagctggggatgttaaagtgaaaaaggagagagacccttgaaccactgggcagccacctcctttgccctagaccagctcctctcca

SEQ ID NO: 245161 - DNA, 661 bp, Homo Sapiens
attcatatcatttccacatgttcacttctttttcctggaaagtgtaacttatgccagggtaacttggaaatccaagctcattattggagaaaaacgaatggtcgtctatttggcatatgttttgaaaataacctcagtgtgggaaaatcttttgtgaagtttattatgaatctgtttatagtatgcttttcaaaatgtgtatgtaagcatcttaaggcttaagaaaagaaagcgctaagtaggcatagttgatttctcctattgcaaaaatacaagtgagcaaggaagaagactatgcagcggaaggtatggttggaatgatgtgttgaggaatgttaatgattcgtctggaagcgtgcaaatgtggggcaagtgcaggcccttcacttccatcctggcttctttttgaagtgacatttggcattttagctgcctcacgatgctactctgataggaatcttctgcctatggtgcacattcggagaatgctctggccacagctgctctggtttgggtcaggagtagggcaagctttgctgaaggtggcagctgccctggcctgtctcctctgagttcgcttccagcctaggtctcattcctggcctggtggtagcatcttgctgcggggatggacctctcagaaacatcctaagtgcgcacc

SEQ ID NO: 245162 - DNA, 164 bp, Homo Sapiens
ggtcttaaggtcaaatgaggcagtaagactctagtacaagaagtcagtgtctggcagagatgtggctgagtgagttgaggggggagtcattagtgtagaggtgacaacaggctagaggtgacatttgagccagaagggcatgaagtaggaagggcaatgacagg

SEQ ID NO: 245163 - DNA, 585 bp, Homo Sapiens
  misc_feature (41)..(41): n is a, c, g, or t
  misc_feature (66)..(66): n is a, c, g, or t
ccagggtaccttggccccaggcatgggtctcttcctagtgntgctggtgaatcaactgttcccaanaggaaggggaaagatgggtgatcccttcacttcccttgggttaatgctggaagaaagtgctgaagctggcttctggtctgtgaccacccttcttgggacctcagtttctccatccgaaacctgggggagtcattcctctaacaaagagtgtgtgaagatccagtgagtacccggctctgaagatggtcaacttggagtaggggctaggtcagtggtggctgagtctgactccagaccctaccaaggcttgaggggctgctactggcagcagcccagggtatatcttgtcatctgtcctccatcagccatggactgacagggtggcagtctgcttgacgtgttgcaggttgggctctcggggagtgaactctgaggtggggtctggaatgcaggatttcgattagagagtactttcagaatcaacatttgtgagggggagaaggaagcaggacagggaagagggagaggttaagtggcaacagaggcccatggcagcctcagccacccccgcagggagct

SEQ ID NO: 245164 - DNA, 263 bp, Homo Sapiens
tggccccagttcaagtcacacaacaccaatgaggtgctggagaagctgttccagatagtgcctggcgagaacccctaccgcttccgggacccccaccagtgccggcgctgtgccgtggtggggaactcgggcaacctgcggggctctggctatgggcaggacgtggacgggcacaacttcatcatgaggatgaatcaggcgccaaccgtgggctttgagcaggatgttggcagccgaaccacccaccatttcatgtaccctgg

SEQ ID NO: 245165 - DNA, 471 bp, Homo Sapiens
catggaaattgttacttgttcggtgtgcgaaccagaatgaagggcaaaaggccaccaataatgatgtgctttttaaaggaatatccacgtttttcccttatttctgaactgatcctgctcagctgtgtggccccagactagccacatctcagcagctccctgtgtacattcagttctctgcagggtacttcgttcctctcccaactccatggagaatgttggtatcagggcagtacagcccacattctgcctagatgttccagcaggctacagaaacacagtagtcatattgctctttgcctgaagactggagactaggaagatttttttatatcttccatgtttctaatcatgttcaagttggcctctgtgttcgcacatggagcatataataacttctttatcatctttgtctactaatttcgccatgtctatcattcctgagtctatttctattgatttagttttctt

SEQ ID NO: 245166 - DNA, 569 bp, Homo Sapiens
ttagagagatatatggggcacatgcagtttctctcagggaatatggagccattgatgatgtagatattgatctgcatatcgatgttagctttcttgatgaggagattgctgtgccttgggaagtaattcgaacagaacctatacttgttcgactacactgttcacttacacagtatttacatggcccggtgcccactgttgatgtctttcagatttccacaaaagagcgatttggattgggacatcagctgcacaccctcatgcagacatttgttacacagcagtggcaccagagcaaagaaaaatccaattgcctgcacaataaaaagttgtcagagaagaaagtgaagtctcccctgcatttattttctactttgcgccggtcgcccagttatcctccccctggttgtggcaaaagcaaatccaaactgtaatctgagccggacggaatctccaatacgcataagctgctgcggaggacttgttccagcacagtcaagactgatgatgtgtatgtcacaaagtcacacaggacctttggccgctccttgtccagcgatcacaggccg

SEQ ID NO: 245167 - DNA, 465 bp, Homo Sapiens
tgagtgatctagacgatcccctctcctatctgaatccagataggtatgacgtttaagataacaaatcaaaaacttctgaaatcaacacccaatttgctatcacgatggtttttaagtcaggtggatgcgaggctgtgggcagagcatcctactgggctctcatcttttccaaagacagtactctctctcacacctgcactggacactgatagagataggacaggtacaatataacatgctggctagccaggccactggggttttagagagcctgtttccatatggagtgggccatgcctgagttctgatgcctggggcagcaatcgcatgacctgcagaatagccactctggattcaactttcagggactgagagctcccaatgaagtggaaattaattctgtgatgcctttaacacagagagggctataaaggatctggattcagataggagggggtaccgagc

SEQ ID NO: 245168 - DNA, 752 bp, Homo Sapiens
gtgtgctgtgatctagaggatctccctcctatctgaatcagatccattggaggcttcctgttgcttacctttgttgcttaccctgttgcttcctctttggaaaggggcaacatacatggcagatgccattctctgtctctttggaaaactttgtcagcacatttaaggttttttttcagccacagaaagccacctgcttcaaagtctcatcctccacaaatggcaagcacacaatcattaatggaggggaggggtacataggctttgccatttgattcagttgggacaaataggggaggatttcttagctctacagctctgtccgtgtggccaggtgacaatgtcaggctgcactgccattagacttgtccctttgcacataaggcttccctgcctatcctttccacagatgtggatcctcacatcacttcctaatgaacatcctgcacactaagcttcatctatatccagtttcctctgggaaccaaacctgtgacataaagtgaaaagtttctgagggaaaatagggtttccttatcagactaggaatcaaattctgctgagctagcaaataaagtaaagtctgatgccatctcatgattttcttttattaagtcattaccactgccagcaagaattatgtgtatcaatttgtggggacaaacctcatattggagtgggatgagacttgctgttcggttgaggagacatgctgatgaatgacttacccgcaatctggattcagataggag

SEQ ID NO: 245169 - DNA, 344 bp, Homo Sapiens
cctcctatctgaatccagatctaaacagggtctatacagtgcatctggttgatatgtctcttaagacttttaatttgtagcttttctgtcacccccttgaatttatttcttgaagaaaccaggttgttgatcctgtagaatttcttatgatagctaccatttactgagtgcttactctgctaggtattatgccaagggttgctggtaaatccacttaattctcataccaatccttagatgtattataatagacctttttctgatgttatatataagtaaattgaggtttgggaatatctaggtaacttgccgtagtcacatatctggattcagataggaggagg

SEQ ID NO: 245170 - DNA, 574 bp, Homo Sapiens
ctagggaatttgtttcccagaaaaattgtattggaaattgtgggataaaattacatgaaagtttaaaagtaggtttgaggttatgctaaaaacttttagacggtagtttgaggaaaagcttagagaatcatgtgttgattttaagggccatctcgtttactgtcttgaccgagggtagcagacgtgtttaatgtgctgtctcaatgtaccttgagtgtcattataaatccactgtataatttacctgccattctttcagttgagggttattagttctatagtatgaatattgatgtttccattttagcatgtggggagaagtagtagagaattactttgctaattggtatcagaaaaattattatggtctttttcttggtaacttagagtaagtaaatatcccttaacttctacataatttgtctccttgccgttacaagaaagtagtgctgttaagtttaagccatttgtgaatgtcagatatttttaatgaaattgtgcataggaatcatagttaaaatatgtcatatccatggatattgcaaaacttggtaattttgtggcagaaatcact

SEQ ID NO: 245171 - DNA, 383 bp, Homo Sapiens
ctccagacaagttgaccggtcatgtgacccttccagcagcacagcccttaaatgtgggtgtggcccacgtgatgcggcagcagccaaccagcaccacctcctcccggaagagtaagcagcaccagtcatctgtgagaaatgtctccacctgtgaggtgtcctcctctcaggccatcagctccccacagcgatccaagcgtgtcaaggagaacacacctccccgctgtgccatggtgcacagtagcccggcctgcagcacctcggtcacctgtgggtggggcgacgtggcctccagcaccacccgggaacggcagcggcagacaattgtcattcccgacactcccagccccacggtcaacttgtctggagtagggtaccgagct

SEQ ID NO: 245172 - DNA, 586 bp, Homo Sapiens
cgtacccgacttcctgtctggcaccattgtgtcttcttcttaaagtgagaattgtccttaagtgaaagtctgttggaggcagtttctattttgcttatctgaaatgtctttgtatttcaccatcatccttgaaagatagtttctctggacataaaattccaggttgatcattccaggttatcacgttgaagatagtatgccctcttcttccagctttctaatatagcagtgagaaatctatctttcttattgattgtggtttttttgtaggtggtgtatcttttcttgggtcctttaagatcttctcttttggtgttttgcagttttactataacatgactgtgcatgaatttatttattctgtttggtatatgttgtgcttcccataactgtggtttcatttcttagcttcaaaaattctcagctcttaggtctctaagcactttggctctcctttattttcttttttctttccttctaggatcttcagtctttattttaaccccgtcttttaaccttttatattttcctttgcttgttctctgtattgctttctggagagtttttgtttgtgtgtttgttgctg

SEQ ID NO: 245173 - DNA, 297 bp, Homo Sapiens
cgatctagaggatccctatgttatccccaacacccaagtccagacattaatgattaatgttattatatatttactgaaatctaggagtgatcagtggcatctctgacctatgaggttgttttaacaggaatgccactagaggagctgtgtattctagccagtctgtttctctcttttcccccatttcagcctttcagggatacaagaatggctctataacagctggtcaattgtatgtcagtgttaatggattcatatctagtgttgggcgataacatcagggtaccgagcgcgaat

SEQ ID NO: 245174 - DNA, 412 bp, Homo Sapiens
ttttacccacacccctgatgtctcttctgtatggaaaatgcaatcagtgatgaagggccgaaaaaacatcttgccagctgtagctcttttacagagcacaaagtgggaggaagcaatgaatataaatgtgttgggcgataacatctatgttatccccaacaccagtgattgctccacgcccagagcacacaaaatctgtatacacacggtctgtgattgaaccacttcctgtcactccaactcgggacgtggctacatctcccatttcacctactgaaaataacaccactccaccagatgctttgacccggaatactgagaagcagaagaagaagcctaaaatgtctgatgaggagatcttggagaaattacgaagcatagtgagtgttgggcgataacatagggatcctcc

SEQ ID NO: 245175 - DNA, 506 bp, Homo Sapiens
  misc_feature (106)..(120): n is a, c, g, or t
gaaccgttatcgccccacacagagaacattccaagcctgtgattaactctctcacccttaaacccataaaaactcttagtccataggagcaagcactcctaacccnnnnnnnnnnnnnnnttgtccagaagcccctctcaggtttattctccagaagttaaacttgtctttgactgttgagccacttttcatgtttcttttctctttctttacttgttacatttggtgcgtgatgttatccccaacactaatggatatctttgggcagttgcaaaatatttaaatctgcaaatacattctgccttaatagccagatactattgtaagatgtctcaaatataattacaagaagacttttgggaaattagaacacctttcccatttaggacattgttactgtttactcacccatgttctccaagtcctaaataaaacactgctcagttctttcttcctctcattaagtacttatttaataactgaaatgaatctgtgttggcacacta

SEQ ID NO: 245176 - DNA, 310 bp, Homo Sapiens
  misc_feature (57)..(181): n is a, c, g, or t
tgatgttatcgccccacacggtgaagccccatctctactcaagatacacacacaaannnnnnnnnnnnnnnnnnnnnnnnnnnnnnnnnnnnnnnnnnnnnnnnnnnnnnnnnnnnnnnnnnnnnnnnnnnnnnnnnnnnnnnnnnnnnnnnnnnnnnnnnnnnnnnnnnnnnnnnnnnnnctgggaaacagggtgagactccatctcccaaagaaaagcaacaccaggaggctaacaaatctacctgaagatgccctcagaagattcataacacccaggataccttagtgttggggatacatacggtcc

SEQ ID NO: 245177 - DNA, 149 bp, Homo Sapiens
tccctgatgttatcgcccaacacctttcccaaaggtagaatttgtgtgggttttacttcactgagtgactaatgcagatctttatgttttaatgatgggaagaaattcgtcagcctgggtactttttccatgtgttggggataacatca

SEQ ID NO: 245178 - DNA, 350 bp, Homo Sapiens
ggaggcgtctagaggatcccgtgatgttatcgcccaacactcctgccacgactgactctggttctaatgcttgttcagtctcttcaaactgcattttctgccttttaagtatgctttgtaattttctgttgataggtagacatgatacactgggtaaaaggaattgcagtaaacagggctttcatcctgttttcaggtgttggggataaatcacgtgcattttctgccttttaagtatgctttgtaattttctgttgataggtagacatgatacactgggtaaaaggaattgcagtaaacagggctttcatcctgttttcaggtgttggggataacatcacgggatcctc

SEQ ID NO: 245179 - DNA, 169 bp, Homo Sapiens
gtgatgttatccccaacactggagtcagaattaagaaatctcttttcctgtctaaattccactcagatttcttgataaggatagtcaaggcaaatctgaaataaccaagttaacccatatcaaaaatgactgttaaacagcctggcaactgtgttgggcgataacatca

SEQ ID NO: 245180 - DNA, 327 bp, Homo Sapiens
cggtacgtgaatgtatcgcccaacaccttctatgtaggtgagtgcacatgtggccgcagacgcattcagggagggcttctaggaggaggcaggtcctagccttttggatggggacatggagggtgaaagacagtcgggcatggcgtgtccgggcagggaggcggccctggaaagggctctgggcacaagggttgagatggaggtgggcctgtggcctgctggcccttctggtctgagccagggcagggggtggcagctaggcctgggcagggactgtgtggagaccttgcttattttaagtgttggggatacatcacggacggagct

SEQ ID NO: 245181 - DNA, 267 bp, Homo Sapiens
ctcggtaccgttggctcaagcagtcgcagctcagcctcccgaagtgtggaattacaggtgtgagcctggctcattcgagaatatgttaacaactcccaaagaaacccgtgtaatcattagcagtcactcccaagtgcccccttacccagcccctggcaacaactaatttactttctatttgaaaggatttgtccatttgggacagttcatatgaatgtagtcatacaatatctggtcttttctgttgggcatttttcacttagcatg

SEQ ID NO: 245182 - DNA, 126 bp, Homo Sapiens
cagccactccagctccagctgtgaccaaaaggggcccatggacagctaaggctgttgcttcagaagatgcagtcccaagccttgcacgcttccacctggtgttggcgatacatacgtaccggctcg

SEQ ID NO: 245183 - DNA, 274 bp, Homo Sapiens
gggctgcctagaggatcccggatgtttcgcccaacactgttacaacacttttgtaaatgagcaaaacatctttaaaaatccttataaattctttataatatgttacacatttagagacaatatttacaataaaagaatgggggagggagggaaagaaatctactttacagtaaatctttgcataaaacaagaggactgatagacgtggcagcgggttcaccacctacctgggcttccctggaatgagtgagggtgtgttggggataacatcagt

SEQ ID NO: 245184 - DNA, 597 bp, Homo Sapiens
  misc_feature (597)..(597): n is a, c, g, or t
cgagatattggaggtttaccaagaaagcatttgtcgaagccagtgaaggaaatagtctaggaatactgatgagaagcctagtaagaagaatgtaaactggctattggattcaccacacaaaggctattgatgattttgacaagatcagtttccatggagtggtgggggtgaatacttaattgtagctggttcatgagagaactggaagggaagaattataggtagcaactcttttgaggagttctgctatgaaggggagaaggaaaagagaacagcagttcaaagatgcagagaaaaaagtttaagagattttacagcatatttgtattgctaatagaattattgtgtcaggaaaaaaattgacaatccagaaaatagacatctatggagtcaatgtaaagctagagggttgggctttgataggaatagtgttggttcattcttagtaagagggaggaaggaaggctataaaagcaccaatgcaactgggttagcagatttggtggttgggtgttgggcgatgtgatgttatcgcccaacacggagaaaccctgtctctactaaaaatacaaaattgggctgggcgcggtggctcan

SEQ ID NO: 245185 - DNA, 399 bp, Homo Sapiens
tcggtaccctgttatcgcccaacaccccttgtgtcttgattctagactgtcatatgcctataccgattctgtccccttcagaagtagattcgcgaggacctgactttatgtgtctcttccagacctaaaggcccttggttttagcatcataggtgccatgtatatgcttaactttgaacagaaaattattattttttgtatctttaaactgatatatcgtagttgtacatatttaactttggacagaaaattttttttatatctttaaactgatatagttgtacatattttcagggatacatctgatattgtgatacatgtattcaatgtataattatcaaatcagtgtaattgggatatccatcatctcaaacattatctttgtgttggggataaata

SEQ ID NO: 245186 - DNA, 502 bp, Homo Sapiens
ctagaggatccccgtgatgttatcgccctacaccatgtactcaacaggaagaaattttaaacacatgacggcaaacggaaacataaactagataaatccacaagaaactgagggtcctctgatgttttttacatgctgcattttatggggatgagaaagaggccatcatgaaaaacgaaggctgagaatctgatagcgtcagtttccgctagggggtcatggggaggactggcggccaggacacaggccctgagccggccgagagcacagggattctcattccatgcccttcagaaccttttgcgtgttgggcgataatgattatcgcccaacacagtatggtagatcctttcataaaggaattcaggatgctatggaagcacatagaacagcttattcaaatttgggcataccagaagcttcactgagaaaatgatgtttatattatgacgagtatgactcagctagactcgagtgttgggatacatccggtccggctgag

SEQ ID NO: 245187 - DNA, 353 bp, Homo Sapiens
tgttatcgcccaacactttattttctgagcacttgagtcacatgggccccagttggcttgaccttggtggtatgcccaaccttgatccaatcactgtggccagagaatggaatatggtgattggcttagccaaggtgagagggatggagtctgctggacccgaaacatggcatgagaagcagactgttccttactgtggcagatagactcataatactcatacgagtggctgccatgagtccacctcctggcattcatgctcttgtgcaatcccttccacttaagaatgacacagcctgtgtctgcttctaaccaatagacacagcaaagtgttgggatacatcactgtaccg

SEQ ID NO: 245188 - DNA, 184 bp, Homo Sapiens
  misc_feature (54)..(62): n is a, c, g, or t
ccgattttgtgccattgcactccagcctgagtgacagagtaagactctgtctcnnnnnnnnnggcccaataaatttagtaaattcatattacggaataaaacatgaggctgctcattctctaagatatggtgtctagatctctccgacatctgagatacagtttggggatacatcacgaccgac

SEQ ID NO: 245189 - DNA, 482 bp, Homo Sapiens
tcctagaggatcccctcatctgcgagacaccaccctcatctgctgcagatttggcagcttccaacactctgtttccagaaattgtgatgtatctcaagtcacctttgtgagaaataacgtcttctgagaaactcttctgcctcttcaatttggtcattaaaccattgatgtcatctgcacctgcctccaggttttcaagttcttgttctgactgctgtagccagtgctcaaactcggtatagtcagcatcaaacttttctaattcttcctgcagagagtgagttaacttcattttcttctctgactcagccagtgcagtttcataatgcactttcagttccttcatgttcttttgcagtttctctttttcttcaggagagagatactgaccctgtttctcaagcaacacttgtgcagactgagtggctatgatcactgcttggtgctgagagatgatcttctcgtgttgggcgataacatca

SEQ ID NO: 245190 - DNA, 379 bp, Homo Sapiens
ggacctgaagtatcccaacacatccttatatgcctttttcagtgtgctgctaccttttcccagacctctacattcacagttcctcggtccggaaaccagcggcaatatttctctactgcactaaaaagctgcgtaagtcagctagtgctaacgttcactcctccttttctgagatggcgaagcagactcaaataagcctcatgcctgctcgacccttgtcccattgttaccctgatgcttctgagctccccttcttactcaccatgaggattgctttaacagtactcgggtgtcctccagtgtagttccacattttctaaccatcgctctggcgactattcgacccaggttcgagcccccgtgttgggcgataacatca

SEQ ID NO: 245191 - DNA, 138 bp, Homo Sapiens
tgctctagaggtcccgattatccccaacactgaacaaatagttaagaaaagttaagagatttacaagatttttgtcctacaggaagtgaaaacctaaggccttactatagtgttgggcgatacatcacggaccggtat

SEQ ID NO: 245192 - DNA, 242 bp, Homo Sapiens
aggacaccatctcactgtgtcacccaggccagagtgcagtggtgagaacaacgacctcccagctcaagcaatcctcccaccgcagcctcttgagtagctgggactgcaggtgtgtgccaccatgcccagctaatttttttagttttcgtagagacgagatttcaccatgttgcccaggctagtctcaaactcctgggatcaagcaatcctcccacctcgacctctcaaagtgttgggcgata

SEQ ID NO: 245193 - DNA, 204 bp, Homo Sapiens
gtaatttctagtttcctaagtagaatctctactttctgcctaagtatcaaggtctgtataattaagatttatccaatgtttcctgcttttctccgaagaaaacacttccattccagttaaatggtctcttttaagacatgactaccactaagacctttgatacagaaattattctcatattagtactgtccggcttaagacgcc

SEQ ID NO: 245194 - DNA, 566 bp, Homo Sapiens
tttacatatttaaaagtgtcttttggtatttgccgctgtgtttttaaataactttgtctatctgtcttgacttcttagctttggattttgagaactgacttcccgccctggttgaggattcagctttcttactgtgccttcctcatgcacatgtgcctccctcccctcatcctcttggtgttttctatcaccttgtaaagaaatcagtagtctgtgtgtacatttttatgactatgtaaatattattcgtggatgacctatctggtgtactatgattgcatttccttttgttttctctgtagttaataatcatctctttttcccattggcttacttctctatattcctattaccaatttgtggccagaattataaatctcctttcagtacattcctacacactgtgtattctgttggtttggaacctcctgcaccttctgttctttatttcaagtttgtcctggttaatcattgtaactgtctgcacactgtcatcctatggcctccatttactgtcatcttgtgggtttcattatgtcattttcctgtgttgggcgagaccatcc

SEQ ID NO: 245195 - DNA, 465 bp, Homo Sapiens
aaaagtcaaaacaagagaacatactaaatgattccatttttttatttatgacttcatgactaccattaagaaaatataacctgttgggaaactgtttctgccttgatgatgttgtacagacaagagataaacagtgaggaatatgcttagatgtattgggaaagacacgggtctgtggcattgtcacaagggtacacgaatactgagagtgaatgctgaaggaatgatccccattggtggtgaccctcaggtgagactagggtgcctgtgtttcagcaaagcctgggcaattggaatgcagggctcctaagattccatgacacccccaccttctaattctgttattgcaactgcagacggttacctggcacgctggccacaatctacctcactcttatcagagtctgagctactggcagtgtcttcagctctgagttgagcacctcaacatttttcattgtgtgt

SEQ ID NO: 245196 - DNA, 753 bp, Homo Sapiens
  misc_feature (297)..(315): n is a, c, g, or t
tttttttaaacccgcgtcacttcatcctcagtcgctctagagatcccccgacgcattcattggagtgacgcgggtgggaggtctgcagaaggttgcgtaaatgggaggcaaaggcgtggagatcatgctttcaagaagtttggctttgactggcatggcccaaatttatggccaagatatctaagctcacaaagggataaaatggcactgttaataacgacccctcatctgtggggtcatcaaagcccccacactattcctgtttgttgtccactgaagctctttcatttatttctnnnnnnnnnnnnnnnnnnntattttttacaactgctgtgtgtgacaagggctgctaggctctggggaaacatcaggatgggacaggcgacatctctaccttcaggtgtatacgttctgcggcattccctcgctcctcctgtttattcagttgtgcagatattggcagagtcaggccgcccctgactcatggtgacccagcgtctggtctggtagttatgaaatctcacatggtttatcgtctggccctgaaccatggggaaaacttgtgctcgtctcttgggggctattttctctggagtatggaaagttggtcttttgacagtcagaatctgaaactacaatccaatgtgtatttccagtctacacacaaacatacattttgtctctaagcattttaataatcacttatgggactatgttttaaaagatcacttttagctttttcatcggtaccga

SEQ ID NO: 245197 - DNA, 595 bp, Homo Sapiens
ccctacttcgacggacgcattcattactgccatcctcaggaagcttcaactgtagggccaggctttgcggggccctgccatgcacattgtggccatccaggagccagcagcaaccctggtgatctggtcatcttgtctcttacagacaagtgatgactgcaacctgttctcctgacttgacttggctcaaaaagcctctgcgactcacctgcttcttttgccaccatgtcctcttctgcccaccctcacattcctggtgccctaggatgacaagattgagccagtttctttaccactcagccagtcggcctgataactgcctttggccgatccctagactgagcagctgtgggcaggatgagcagggtcctgggccccaaagctggccacttctatgtgaggagctacttgtgccacattcctcaggtgcctgtcagctggcgggctcttggggtcccatggatggagtcttctgctcatatgtcacaggcaattcacaggcacctgctggcccaatcatgacctgcggtggctcagtgtgagccgcatgcctcacctctgtgacagtagcaccgtccagtgaatgcgtcggtcc

SEQ ID NO: 245198 - DNA, 680 bp, Homo Sapiens
  misc_feature (490)..(502): n is a, c, g, or t
  misc_feature (526)..(579): n is a, c, g, or t
agtcttatgactccaaagcccatgtaagtctcatctgtgagaaaaataaacaaataaataaaactatgtacatgttgtgtgtgtgtttgtaagtaagtttgatctagagaatggctgtatagacctggtactttgaggtgctttctcattcattttctgatttaatttagttgatgataataccctgtaattatatgggaagaataaattctacctgagtgggctaaataaatactgccagtacacacatacttgatacatatatgcaatgatggatgaaaagtgaatataaccttacttatgccaaatataaatccatcaagtatctaatatatcccatatatttgttagtttttaagagtacagtttattggacacttttattcatatagtcatttgcacccagtgattttaaaattatgaaatatttaaaacactcatgtagcttccactcatattcaaaaaatgctaccattttactatgtatgannnnnnnnnnnnnggtgagtcggattctcactttcgnnnnnnnnnnnnnnnnnnnnnnnnnnnnnnnnnnnnnnnnnnnnnnnnnnnnnngttcgagtgatcctcctgtgaatgagggtcaatgtggtaaatgtgctgggtgagtgacccccattgtgttgtgctaactttgtaaagggagtatagggctg

SEQ ID NO: 245199 - DNA, 338 bp, Homo Sapiens
  misc_feature (150)..(162): n is a, c, g, or t
atcctaacttcgacggacgcatcagaacctgtgaatgattacaaatctgagaaacacattgactttgcccaaaggtaagagcacaaaatgaagcaaattcctgactcctgtggcagtgatctaatggttagattactaaatatggcatcnnnnnnnnnnnnnaagggaatgtcactattactcatggagagaaacacatttctacagaatttttacaaactaaaaagaaattctaattaaaaacaattatctaacagtttttcctagcaccgaacatagtacttggtacatagaagatactgactaaatgtttgttgatgcgtccgtcgacggtccgg

SEQ ID NO: 245200 - DNA, 569 bp, Homo Sapiens
cgacggacgcattcagaggtaaaacagctgtttgtcttgaaatgagtatccgtcggagggctgttttcaccccctcatgtcagcataatcgctcacaaacaaggttctcagacattaaagactactgtttatacggggaggacaggctctgacttccatttgagataaagtgattctgtgggaagcgtcgtgagtgccatgctgggttcaccagttataaaacaggtgaatttcacattgcctcgtatcacctcttttggtggaattttcagttagtaaagagttccttttgagattgcagttgacagaaatttcttatgttaccctcttggccagataaatataaacatgaaaatcattccacctgggtggtggtgaatgtgttaacgtgattgtgaccatcactacacagtgtctgcgtggatcaaatcagcacactgtacacctggcacgtgtgcagtctctatttgtcagttaaatgttttacatgtttttaagaagatttgaaaccaaaaaataaagatttagaatggtacattcctggctgatgcgtcctcgaattttggtcc

SEQ ID NO: 245201 - DNA, 804 bp, Homo Sapiens
caggtcttttcccctcaaagcataattgatttgaaggagaaggaaataccagaattaagaaacaaactgcagaatgtcaatagagacatacagcgcttaaagaacgacatagaagaacaagaaacactcttgggtacaataatgcctgaagaagaaagtgccaaagtatgcctgacagatgttacaattatggagaggttccagatggaacttaaagatgttgaaagaaaaattgcacaacaagcagctgagctacaaggaatagacttagatcgaactgtccaacaagtcaaccaggagaaacaagagaaacagcacaagttagacacagtttctagtaagattgaattgaatcgtaagcttatacaggaccagcaggaacagattcaacatctaaaaagtacaacaaatgagctaaaatctgagaaacttcagatatccactaatttgcaacgtcgtcacgcaactggaggagcagactgatggaattatccactgaagttcagtctttgtacagagagataaaggatgctaaagagcaggtaagccctttggaaacaacattggagaagttccagcaagcaaaaagaagaattcaatcacccaaaaaacaatacaagcaacaaaatcagcacaggataaactgacatgatattaaagagccggttcacaaatcttcctggctatatgcaaagacattgagaattcatattccagatgggcaaagcacgactataagaagcaccaaagaaactgaacttcaataaagtaatcagctcacctaagtgaatgcgtcgtcgcaag

SEQ ID NO: 245202 - DNA, 616 bp, Homo Sapiens
acttcgacggacgcattcagtaaatattttttgaatgaatgaacaatgttagagccatgcctctgccattcactttgtgaactacctgtaatttttttctacccctacatttcggttgaaagttcacttgaaggtcaccacataaatgtgaaatctagtggcttctccctttacatcatgcttgacctctgcaaccattagtgcttacaaatttaccttttccacacattcatggtcacgtatacctgggtcattttgggccagtctcagtattgcattcaaaagaagcagacaagcccctaacctttggaaagtaatgaacttctgtaatatattagtgaaatcttctaatgagatagaaatatacaattacataaagctcagcaaacttcaaataagttctttttacccaccttcccatatccttacacagcttggcaccttcaatctctcttttgtaacagttcaccccaaacttgtacacttttggccaaaaaccccttgtcctttgtccccttttttcatcttctatgtttattttcttccaagaatagattattctttccagtttaaatcactttagcctcttttgctcctcccacctagttggtaccgg

SEQ ID NO: 245203 - DNA, 705 bp, Homo Sapiens
  misc_feature (128)..(158): n is a, c, g, or t
cccttcgacggacgcattcagaggacactcacagcagccgctggcttgcgagttagaaccgaggtttcttggaatgagtgagttccctggaaagatgcttagtgcttattttcaaaactccttgtttnnnnnnnnnnnnnnnnnnnnnnnnnnnnnnnttttagtcaactagtcattccatttttcgaaacccgaacttcgttagcaagatgtcatgaaagttgctgtggtgtgtttcatttccatgtataacttcaaaagaaagttaaacagcagatttaagttcatttgggctgccatctccatttgagtttgtgttgctttcacagtgtagatgtaccaagaattatgttaaggaatgtaggaattcccatttttctaaaaaatggagcaggatactgaataaatcttctttttgtttgtttcctttcattaaacggcttccctggaaactttcttaagttatcatagctgcttaagagaagtatttagttttctattaattcagtaattctgggtcccactgcgctggttcatggtaacatgaactagttgtatttcctcttttagagctctctcctttgccgcaaaacttgtgtgccgctgcgaactattccatctccagcgcagcttgcatttctccagtagtcttgccgtggtagcatctgaaaatccgtttctaatgatgcgtccgtcggaccggct

SEQ ID NO: 245204 - DNA, 371 bp, Homo Sapiens
cggacgcattcagaaatcatataatttgtgtgatcattgttagttttgcttaatggtcttgtttttttctttctgtcttggtcaaatctgaaggggaaccctaaattatggggaacagggtctctgaagtgggaggaaaatggccatccaaaggaaaaaaaagatttttaattttaactacaaaaggggctttatttacataacaaggccacctttttgccagccagaccagactgaaagagcaatggctgtacttctgaaatagcagcattttgtcctagcctgaaatatggtaataagatttaaaaaacacatttgtgtaaggagctccatgattaaaagtcagcttaatgaaaaggctaacagccaga

SEQ ID NO: 245205 - DNA, 343 bp, Homo Sapiens
  misc_feature (134)..(168): n is a, c, g, or t
  misc_feature (268)..(268): n is a, c, g, or t
  misc_feature (313)..(313): n is a, c, g, or t
  misc_feature (331)..(331): n is a, c, g, or t
aatagaaattatctcactacttaaatcccatttttttcacttcatatgaaagaacatattgatagtatattctatattatttcatagatctgtctgaaagagattgggaacaaaaatatctaattgagatattnnnnnnnnnnnnnnnnnnnnnnnnnnnnnnnnnnnttctgtagtatcagcgaaatcagtcatgtttataccttgaatataaatatcaggaatcatgcaattatttctactatgtatttagtagtatcttatattntgtataacattatttacattttgccaaattagtattcacaactgnctaagtaggatgttttcnggaggtatttgg

SEQ ID NO: 245206 - DNA, 926 bp, Homo Sapiens
  misc_feature (28)..(28): n is a, c, g, or t
  misc_feature (83)..(83): n is a, c, g, or t
  misc_feature (208)..(218): n is a, c, g, or t
tggttcaaggttccccactggtcccagntgccaggcatttcagggctcccacctgtgtgtgtccacaatcctgctgtttggtnactgggattacatgagctgattgacttattactgtcactgattagatgaccataaaaatagagagaaattttctttgaaaactaagttggctactttggaaagacttaataaaagtcaatttctnnnnnnnnnnncaaaacgctgttaattagatgagagtaaattaacgataaaagatcaagggatatgcgatctaggaagtttctatattcagaatggctcggcaaatatctaaattcttcctttactttaaagaaaccaacactggaatcacaaaacaatgaaataagggtgtggttgatgtaaagtagacaaaggggagctctcatcagcagatccatcttcaaaagaataggcctgtccttctattaaaagatcggcaaaggaatgcatatttataatacctgctttaaatcttaagcaaagctgctgaatttatacttaggtagtttagaactatctatggagtcagctaagagcttcaaccacacatcagctcattgattatcatgagaacagcctcacgccctgtataatagtgcaggtgttttaactccagttcttggatgaaaagctgaggttcagaattcatcagatagggaatggcaaagtgaagactatggaggcccacctgccccgtgtgctttcccagggaatgattaaccaaatgcaaagtgaaatttaaaaagaaaaataatctagggagatggtttggcaaagctaatcatgagaaaccaatagctttttgagtagatgccagttgagtgagtgtttggctgttatctcattgattcatctaagatttttgaaaatcgttcattacctatacagaatagtttttt

SEQ ID NO: 245207 - DNA, 899 bp, Homo Sapiens
  misc_feature (741)..(775): n is a, c, g, or t
ggtacttcaggaactctttttcaaactcacatcacagtacatctggagatgtctaagaggcagcctcctgacaccacaccatagcgaacatcggaggatctgataaagtgcctgtagtcattatggcttaatttatccatgggttcacgtcgtaatatcatcgtgattctttagctgataaaaattatacagaagatctttcaaagattacagtctcttatatgtggtccttcatttgacatagcttccattattccgttcttggagccactttcagaagacactattgccggcctcagtgtccatgttctgtgtcgtacacgcttgaaagagtatgaacagtgcatagacatactgttagagagatgcccggaggcagtcattccatatgctaatcatgaactgaaagaagagaaccggactctgtggtggaaaaaactgttgcctgaactttgtcagagaataaaatgtggtggagagaagtatcaactctacctgtcatcattaaaagaaacattgtcaatggttgctgtggaactagaactgaaggatttcatgaatgttctcccagaagatggtactgcaacatttttctgccatatcttctctatggcagtcgaaagaaaccattgacttaacaggtatcatttgaaaaataccataactggcattggagactgaatttctaaaaatcgaatgccaaagtacaagtagaggagttttttaattttatatatcatnnnnnnnnnnnnnnnnnnnnnnnnnnnnnnnnnnntatatgatacaaatgccttacaggctggcttaccttaatccgggtaagtgggaaactaattccccttcctttaaatttaatgaaccctccaattcaaattttaaattggtcccacgaaaagggt

SEQ ID NO: 245208 - DNA, 264 bp, Homo Sapiens
aaaggtgtaaccttgagggatgaataagaatttatctgaaaaactgacagtgggtgggtgatcaaatttctaggcagaagcagctgcatgcacaaaagtacataaacatgaaaataacatgttatgtctggaaaactgtaaacaggtcagtatttctagagcaagaagagggaagcacataatggccaagagatgaagctggatagtcacatggccactcaatacctgcaatttccatacagcccatgagctaaggtccgagcc

SEQ ID NO: 245209 - DNA, 546 bp, Homo Sapiens
tattgagtggcgggaaggagtggctagagaagctgatagtgatcaggagagcactgtgcccgggaagcaagatgacagaccacttccggagagtggtaactgtccattactgctgggacagagtaagacaatgcagcaaagagattgctttggatttggcaacatggaagtccctggaatccacacagaataaagctggtggcataagaatgcccctcctccaccaccactgaggaagcaccagctcccttctctttccagaggctccagctcttgacatggcaaatgtctgggctcaagttcctttctttgaactgctgttaccccacctgtaatatgaagatggtgaattccacttcctagaaattatctggggggcagatgtttgtactgtgtgagtggccacagtaatcatcactataattcgacgccaccacctacgatttgttggaatgttctctcccagatacactgtaatcgcctgcctgtttgtctccactgccgatcctagtgtgagctaccatgacctttcacatgccggtacgg

SEQ ID NO: 245210 - DNA, 226 bp, Homo Sapiens
tccaaaaagggagggagccaactgcttcggcatgggccaccactcagggagcacagtggggatgccaagcacctgctgtctctggtatttttaccattaacattgcttttatgccagccaccaactctaggagttggtgctactttatcatcctcattttaaagatgaagaaactgaggcccaggcagattaagtaatttgcccaaagtcacatggccactcaata

SEQ ID NO: 245211 - DNA, 226 bp, Homo Sapiens
tattgagtggccatgtgaggtattgagtggccatgtgaaatattttattttccaggctaaagcaaatgaaagtttgctggtatcaacacagcctgccatatttttcacagcatgcaacgatggtgctaggatagctatttcttactgtaattgcacggaggcagaaatggtctgggtataagctatttcataaaagcagctttaaattgtcagtattaagtgttca

SEQ ID NO: 245212 - DNA, 1079 bp, Homo Sapiens
catggccactcaatacctgagtggccatgtgaacacacagtgagaaggcagctgcattcaagctaagaagacagtgctcactagggctcctcaccaaatttgccagcaccttgatctgggatttctagcctccagaactgtgagaaaataaatttctgttgttcaagccacccagtctatggtattttgttatggcagccctagcttactaaggaacaactactgatataatcataaactagctgcaatcgtcagttagcttcagactttgtaacgtagccagtggagtgatcttaaattccatgtaatttgtaactcaagtaaccatgtaacttgaggtcgccctgcctcagacctgggtaaacttggcttaaacctccagtttcacagcatatgaaagaccattgccttctatttaatttattcaaatttctaaacttagtttttcatgatccctgtggattcattcctgcaaccctaagtgttgtatcagttccactcatctgccagctggtacatggaatatcaggagcttcaccattgtccctaagaaattaaattaaattcatgattttgtgactgttccaactttaattaagtctccaggagttgcggaaggaaattatatcccacaccgcgcagtcttctgcctcctaattggtttccctttgacactgcattggcttccaaaacttactgtgtgatcatcctcacaaccctcaaagaaactctagcatcccttccccttactaagcctaattcacttcctcagccctttacacagaaatctaaccatgtcgcttccttgtgtgaatgaaagcgataatgccatctcctaactgccaatatgcagtgacttgactctggtttagcaattccaggaccgctgaagttttcttcctctagcctccaacatatatcacccacaaatgatacccataaagcaccttccccctaatgggcatggcagctactctgtcctggacctagatgcctggcccagtgatgtcaatgctatacttttgccttcttcctcactgctctttaaggaccagcccctcccctctcacatgccatcc

SEQ ID NO: 245213 - DNA, 404 bp, Homo Sapiens
gctaagtttgtggtaatattattacaacttcatttttaattggaagtaaatatcagatatacattctgggtaaggtagttctcttcacagaaataaattcctgtagggctcttcacacatacagcatattatattgtttttccttccttgaaatataagactgtacaggaaaattgctggtgggcaggggtcggtctgcatccagacatagctacaggaaaatgacaccatgcttatttggaagcctacctaactctttcttcttacttctaggcatgtttgccacagtcgcagggatatcccagcgtgcccccgtgcactggtcggagaatgtgattggggcggctgtgtcctttccatacgtcatagcgttcgatgacgattcatcacatgccactcatgcc

SEQ ID NO: 245214 - DNA, 321 bp, Homo Sapiens
tattgagtggccatgtgagctaactgactttcccgtcttcataattttgtccataatctaaattataggccaatctaattatctggtcttttcaacacaaccatcctgttatgtaaagattttagattcatgctttcttttattgctcacttctttattgaagcagcactcatttattgtgctatcagaaaccccaattctatgataattaactcatttattcctcaatattcattttccccatttggcataactgaattcaacttattcctgagggtaccacttcttcatccttctcacatgccactcaatacctgtacc

SEQ ID NO: 245215 - DNA, 397 bp, Homo Sapiens
gccactcaatacctcactggtgaacccagctccaaatatgtaaatgttttaccatgttttctttagatttaaaaaagtgaaatgaatttagtgatatccctgccatatgaatcctttaatgttaatacattaatatgtgcccatgataatatacagtatttatttcaaatttatattaatggttttgcttactgtttcatgcttattgtctaggatagtagctgccacatagaagattctccaaaaagaataaaaatgtttgactgaatgactgctaacacactgataggttatccctttgcgatttcctttttcactcaatattatgttttttatattgttcatgttcattgttcatgttcagatttttcacatggccactcaataccggtattga

SEQ ID NO: 245216 - DNA, 455 bp, Homo Sapiens
ttacaaaagactaagtatggtctcatatctgtaaacaaaaaaagtatatgctgaagaacttagaagtgcatgcatctaagcttaagaatgactatatgtgggtagatattttgattgtattttctgattttcctttaatgacctcttacgttattttcagtttttagaataaaacctatttacagatctacagagttttcgaagtatttttgcatgttattttcgttttattactaattttttacaatacaatatccagtacatagattgcattatagccagtttacatttgaataatctgaaagttaaagagggttagtgacttgctgagtatcaggtgaatgaatatatgatatgccaaagccaagcactgattccagcttttactataaatccagtatcattcccctggtatgagacaccagcatttctcacatgccactctatagggtccg

SEQ ID NO: 245217 - DNA, 454 bp, Homo Sapiens
cttttttcgattttggatgaaatggctattacgacagatgactgggaagtgtgaattgcagcgaatatttgatacctatgtaggtgcacaaaggacacacaggataggtaatgttattcaaaaagaaaaagtactaataaaagtttaacggagtgtttttctcaggactcacagtggcagatgtatttcttttgtatcctgacaagtcacttaaactgaatttcataagttctgaagtcccgctttgactccttcagctctaaaattgtatgaatttatagaaaaagtggttatttaattgcttatgtgtggaaagaattctctggctcctgaagtttatcggttattccttagattatagttgcaacctattttctggtgaaaaatttctatacttacataatccctttgaaattttcactcacatggccactcaatacctggccactcaata

SEQ ID NO: 245218 - DNA, 728 bp, Homo Sapiens
gctgtaaaaaattagtgcagttttttttattaaagtttttagcgctcaaggaatacgataaatctatgtctgttcatagtctctttcactgtacattaaacttttatactgctataagtcaaaaggaacatttctacagtggtctgttcttaaaaatcaaggtaaatgaatttcatgttctatgacaaaacatggcaattatttttggcaaagaaattagaacaatatgcagcatcatagtttcgccatgcaagagtttgttgatttaaagcataggcaatgcataggaaaaactttttttaaggatgtattttaacagaactttatccttcatgcaaaatgttttctcggcagctaacttaaaaaaatatttcagctttatttggggatggagacagtggcaggagtcagggtgaagggcaaaggagaggtgcttaaccaagctcattctattttcagtcgctcccacataggatcaaagtgatacctgcaggcatcttctgcttgttcctctctttttccaatgccttggaatcgagagggaaaaagaaatgtctttataataaacactggctcacacttcagccccaagttctagtaccccagtttcaattacagtcacatatttatcatcaatctggaccagaagcactgccttgtcgatgtgggatctggtacctggatctctgctgcaaggcacccatcggtgaatcacatgccactcaata

SEQ ID NO: 245219 - DNA, 608 bp, Homo Sapiens
taaactccaaactgggataaaatatccctttgcattcttcgtggccaccgccatagtctgacacatacgtctgtacagttagacttgcaggctgcaggagtgccctgcattgttttcttttaattagaaataaaaagtattagtctaaatgtggttctggtgctggtgccctgtatatatgtaacaatatgggacccctccaaataggttttgcttctggtgaatcttggtcattaggttagtatatgactgtctataatattttccatttgtattattatattggggaaaacattttttatcattttctattaagaaaatggaaaacttaaatatggtgttaaaaatggaaatatatgtgatatttgcattattaaacccctttgcagatctaaagtctcagggttccactattagtggttaaagtactgaataatgtctgggtctatttccatctgtaaaataagaatatttgtctcacgtgtctgtcatgaatagcaaatgagaaaatgtatataaaagcactttgtaaattgtaaaagtagtacagatgtgagcttctatttgtttagaagcataaatgtgaattatatacagtttgaattttg

SEQ ID NO: 245220 - DNA, 496 bp, Homo Sapiens
gcctgactttcccatctgggctgatgcaggagggagaataccagagaccaaagttcaaggggccgggccctctcctcccctgttctgtccttctggtcactgtccttccatgatcccttttccaggagaatatgtgacctgggccctaggtcttctgctaagctgccctctggcctcatttactcaacacaggctcacacaccgacaccggccgacagccatgcacagacacagttagagaggagcacccacgcgatgggagacacatggcccagcgttgggccattctggtccacactcttgagacagcacgggagcacagcggagccactcagcactcacaaagcgacaacatggctccagaacatctacgtctccacatgcacacatgtaactgacacgggcagtcccacacactcgctggatttctagacatacaaagacacctactcagtgaagtcacatgccactcaataccggatcctctaggaacagt

SEQ ID NO: 245221 - DNA, 405 bp, Homo Sapiens
ttaaccgcctcccaaaaaaagctttgtgtttttcagtgctgcatgtggaaacaaacaaaaagatgatttcctgaaattatagaggacatttgacattcctaggtcaaaactcaccttgcttaatctttgtggtacaaataataattcatgaatatttataccatcctcttatatagaagttagagtttttctcttgcatgttgaaactgaaaaagcactttttttacaagaatatttaagttggcagacaaagtttttgtattcacagtagaatggagttgtgggatttatccttgttatttctagtttggtaaactagagtgtattgatattttggtttttctccacagttcgtaatggacctgaaagtgcagcagattatgttcagttcctcgtaccgctgct

SEQ ID NO: 245222 - DNA, 1074 bp, Homo Sapiens
gccaaggaaagatgggacctcccggcccagcactgccagccacaatgaataactcttcttcagagacgcgaggacacccccacagtgcctcctctccttcagagcgtgtgttcccgatgcccctgcccaggaaggcgcctctcaatattcctggcaccccagtcctcgaagactttcctcagaatgacgatgagaaggagcggctgcagcggaggcgctcgagggtctttgatctgcagttcagcactgactcacctcgcttattggcctccccctccagcaggagtattgacatttcagctactatccccaagtttacaaacacgcagattacggaacattactccacctgtatcaaactgtccactgaaaataaaatcactaccaagaatgcttttggtttgcacttgattgattttatgtcagagattcttaaacagaaagacaccgaaccaaccaactttaaagtggctgcgggtactctggatgccagcaccaagatctatgctgtgcgcgtggatgccgtccatgccgatgtatacagagtccttggggggctgggcaaagatgcaccgtctttggaagaagtagaaggccatgttgctgatggaagtgctactgaacatgggaacaaccaaaaaggctgtaaagccaaagaagaagcacttacacagaactattgagcagaacataaacaacctcaatgtctccgaagcagatcggaagtgtgagattgatcccatgtttcagaagacagcagcctcatttgatgagtgcagcacagcaggggtgtttctgtccactctccactgccaggactacagaagtgccctgctgtttccctctgatgtccagactctctccacgggagaacctctcgagttgccagagttaggttgtgtagaaatgacagatttaaaagcgcccttgcagcagtgtgcagaagatcgccagatctgcccttcctggccgggttccagtttacaccgtgggacagtgaaacacataatgcgtctgtctcgctcctgctagacacagctcaagaagcactgactttgcttgcatcctggtgat

SEQ ID NO: 245223 - DNA, 186 bp, Homo Sapiens
tgcgtctttcaactgcggttggaagaacgcagtcgtgaacttcagaaggaggttgaccagagggaagccctaaagaaaatgaaggatgtctatgagaagacacctcagatgggggaccccgccagcttggagccccagatcgctgaaatcctgagcaacagtgaccgcagtgaaacgcaggaccgg

SEQ ID NO: 245224 - DNA, 500 bp, Homo Sapiens
  misc_feature (89)..(168): n is a, c, g, or t
gtgctcgtcttttgtaagcccgccacctcgcacagctgatttattgtctttttagtagagacattttcaccatgttagccaggatggtnnnnnnnnnnnnnnnnnnnnnnnnnnnnnnnnnnnnnnnnnnnnnnnnnnnnnnnnnnnnnnnnnnnnnnnnnnnnnnnncctgtttctgtgattatcttacattgtcattgtccccccaggcctgtctttcactgtggcatgcattgtctagggtagatgcttgttagatattttatgacttgctgtctttttcaacaggacaaattgatggccaggagatcactgccaccgccgtgctggccccctggcctaggccaccccccaggagattcagccctcccaggagaatgttgccaccaccgcctatgtggcgcagtctcccccacggatgaggagaaggtaaacgatttgtagtttcagtggactgatcagccacaaacctcactaaccgcagtgaaacgcggaccgct

SEQ ID NO: 245225 - DNA, 1059 bp, Homo Sapiens
  misc_feature (811)..(820): n is a, c, g, or t
  misc_feature (822)..(822): n is a, c, g, or t
  misc_feature (986)..(993): n is a, c, g, or t
  misc_feature (995)..(996): n is a, c, g, or t
  misc_feature (998)..(998): n is a, c, g, or t
  misc_feature (1002)..(1004): n is a, c, g, or t
  misc_feature (1010)..(1013): n is a, c, g, or t
ggggcctgtgggttggctagttattttgcaagcgggaggggccgtgcgcgctcctgcctcaggcctctgtcccccaccccctttccccggtcccaggctctccttcggaaagatgtcggacacggcagtagctgatacccggcgccttaactcgaagccgcaggacctgaccgacgcttacgggccgccaagtaacttcctggagatcgacatctttaatcctcagacggtgggcgtgggacgcgcgcgcttcaccacctatgaggttcgcatgcggacaaacctacctatcttcaagctaaaggagtcctgtgtacggcggcgctatagtgactttgagtggctgaaaaatgagctggagcgagatagtaagattgtagtaccaccactgcctgggaaagccttgaagcggcagctccctttccgaggagatgaagggatctttgaggagtctttcattgaagaaaggaggcagggcctcgagcagtttatttaacaaaattgctgggcacccactggctcagaatgaacgctgtctacacatgttcctgccggagggggcaattgataggaactacgtccctgggaaggtccttggggaaaaggattgctgagtctggtgtgaccctggtcagagagatcaggattagattttgacaggggacttggaacccacctcagtgttgaagatccttgagatagattagctctctagctgctgagcccatgctggtagctgagtagcccctttcccacctcgcccagtgtcggtgtccttgctgccttttgatttttatcctctgttacagannnnnnnnnnanagatttctcctttcattgtgcacaagtgctgagactctgaggctccatttcttctgtgtatatatcctgacttggggcttttattcagcaaattgttcattcttctgtcagacaatgtcatattcaactctgttcatattaaacccctgtgaagcaagcccccnnnnnnnncnnanccannnaacaannnncctgtcgggcgccctcgggccttcaaaaagctttctagaccattcc

SEQ ID NO: 245226 - DNA, 329 bp, Homo Sapiens
tgcgtctttcaactgcggttgaaatcacagagcatacttaaaatctgaccatatactggctcatagagtaaattgcaatacattttagagaatttaagtcatacagaatatgtcttctgaccataatgcaattaaagtagaaaagaacagaaaaacttatagaaaattcatagaaaaatccacaatcatagtgggagattttatcatacatctctcagtaactgatagaaaaaccagacaaaaatctataaggataaagaaaatgcgaacacaatgtagttcacataaggaacctatactacttccacccgtgaaagaccggtaccgac

SEQ ID NO: 245227 - DNA, 615 bp, Homo Sapiens
gcgttttaactgcggtctccatcgggagggcatatagtagcctatctgaatctctgcctactatttgtatgtggtctgaagatcatcatctgatttctcttcctattcctatgattgaaggactaattgtatcagattcccagatccaaatggttgacttcttgaggatattttgagcagcagcttctggtttggtaggaaccataaaaagggctttgtaaaattcccttcagtgttggctacagtgggtgatggcaggagtgggagagaggctaagatccagatagcatctgactggcaaagcatcatcccttgatttctttatccacctttattcaattctgaacgctgaaaacaggacaatagtgtgtgatgtcagttgtactgagctttctaaatattccttttagttttctctgagtatataggatttatatacctaagtcttgtctgtttatccaactattcatctacccatctgtcaacaagagtttcaggtattcattctgtgccacatgctgcgccacatgttgaggatacagtaataagcagaaaataaatggtccttccctctcgagcttgccatctaacagaggggtcaggcactttgctgag

SEQ ID NO: 245228 - DNA, 261 bp, Homo Sapiens
tcggtcctgcgtcttcaactgcggtgtatttacagcttcctttatagccaagtcaactggttcacagttttatcccaacatcctttatgcatctcaagcattctgcagagtgacttaaggagggaacgggcgctttcctataggccgacgaggttaaggcacgcagagaatctcagcccgcctcttgctgtggttatacgtacccttcattttcgtaacagtcctctgcagtccaccaccgaaccgcagttgaaagacgca

SEQ ID NO: 245229 - DNA, 400 bp, Homo Sapiens
cggattggcgaccatttcaagagctcccacataaaaacgttcatactaaatttattctgttacttaagagtgtttatggatttacattccatttgtggactaattttctcactggatcttctttcctgcagtaagaggtgatttgggtcctgcggaaggtcattgtctcaatttgtctggtgtttgcagatgagatgtctgcaaagtagtagaagatcaaattggtgcctgccgaagaaggatgaagtgttgtagaacatggtggattttaatgccaattccaacaccacttatcatgtcagattatcaagaaccccttaaacataagttgaaatggtcgccaatccggaccattaatattgctatttcaggcacataatgtagtctctaaaaagcagtg

SEQ ID NO: 245230 - DNA, 323 bp, Homo Sapiens
cggattggcgaccatttcaaaataatatactacccaagaattattttaagtatatttttagttagatttcttcccactgagagaatcttaaaaatcgaatttgacccccagaaggcacagaaaaagtattttgtcctaaatcagaaagctaattagcagactgggatgacaaaccagaaattctaacttcgaggttagtgcttctcaacctcctcccccttaataatgtcatgctgcctctagtattagattttagtatgtcaaattagggggaacttgattagcacatcagctaagatagccacggtaagggctgtggatgt

SEQ ID NO: 245231 - DNA, 695 bp, Homo Sapiens
tgccgacatttcaatttcaaaacactgctaaggtctgtgtttacgtatgcctgtgggaatggtccttaaaacatgctcacttgggaacggaaataaacatgtcatgtatcatatgtttaaattcacacagggtttccagtaagtgctatgatttatttgattttttttaaagccctgacacctgcataaaattaattcatgtgcataggcctgtggcatagttggatttccacaccataatcctgagcactcaccgcatttctgaaagcaaagggtcacccaaccaccacaatcttgtacctcattacatcttggatgtcacttccccattgtaataacattaaatggcttaaccttctgctgtcttgaaacatacttaataacaaggatgtcacaatctctgtaagtgagattgtccagcctcatcaaaaagagaacatggccatatttgacttcactggaacaatctgcaaaaaactaacattttaaaaatctccagtaatctctagttcctagtatgtagaagggatataaagtatttccccagggagttttgcttttgcacaggagccaggactcaacagctcaagcaacatttcccaaggtcagtgacaaagggctgggatagatttactttcctctgcatgagagcacccatgtctccaggtctgcaaggaattccagattttctcttg

SEQ ID NO: 245232 - DNA, 550 bp, Homo Sapiens
aagaaaagaaaagaaaagtaagcaaaaatatagataattcatagaaatacacattaatgaaaaatatattttaaggaattcaaacacacaaggaacaaaatgatggtttaaatgcaattctgtgattctagttttcccttatcaaattagcaaagataagaagaatacttcaatctagtgtacctttgcaggaaagaaagccctttcatgtacacttgatgaatgtgtaaattgctaaactcttttttgaaaacaatttgtcaatatatatcaacagtcctaaaatatttatgcccttttctctagtaatttcatatcacaaagttgtcagagagatgcagaccaatatttatatcctgggatttcattgcagcattatttataataatgaacaattggaagcaactcaaatattcaacagagagcaattataaacaacattatgatacatcaagaaaatgtaagattatgtggctagtaaacattttgtggtatggtttggatgtggtcggtcctgctgaatgcatgttgaaatgtcgccattccggga

SEQ ID NO: 245233 - DNA, 559 bp, Homo Sapiens
  misc_feature (45)..(96): n is a, c, g, or t
  misc_feature (158)..(173): n is a, c, g, or t
gtgaacgataaaagtgaatgatgaagccaggcatggtggctcatnnnnnnnnnnnnnnnnnnnnnnnnnnnnnnnnnnnnnnnnnnnnnnnnnnnncgggagttcaagaccagtgccactccactccagcctgggtgacagaacaagactctgtctcnnnnnnnnnnnnnnnntagtgaataatggtcacctcacatccatcagaacggctaaccaacaaaaaacaccagaaaataacaagggttggtgaggacgtggagaaatcagaagtcttgcacgctgttggaggaaatgtaaaatggtacagccactgtggaaaacagtatggtggttcctcagaaaattaaaaatctaattgccatgacccggcaattccacttctgggtatatgccccaaacaaatgaaagcagagtctagaagagatatttgtacaccatgttcatatcagtattattcacagtagctaaaacatggaagcaacccaggtgtccacttgatagaggaatggatcagccatacaatggcatattactcaacttgaatgtcccactccggtcc

SEQ ID NO: 245234 - DNA, 624 bp, Homo Sapiens
agaggatcccccggattggcgaccatttcaagtctacgtgtgttactctctaatggctcatcctttttctactaatttaattattatctacatcagaatataagtgataggaccaatttcccattatgggtttgtcagaaagggtagtattttctatcttttactgtttcttgaattctgtactctgcatagccttgattagtactttttgttttcttagcagttgaaataacatccttatctcttctttcatcataatcattttaaatgtgtatgtgtttgctaagtcagacttctatatagcaagttaaccattttcctaggtagagcaagggctctggggagataaagattgatcagaactaatctgagccaaaatttctgcctgttcttctgtaattttttaatgtactttgtgttaaagaaatgataacaattgccaaaattttttttagtactaatgctgtatttgagaaagctgtttaaaaaattgctgtacattaacattattatgtttctccacagtcattgtccaataatgaattagaatcatgtagattttaggatgcttttttagggagttgaatatatttgactttttgaaatggtcgccaatccggggga

SEQ ID NO: 245235 - DNA, 624 bp, Homo Sapiens
  misc_feature (234)..(247): n is a, c, g, or t
  misc_feature (257)..(380): n is a, c, g, or t
agcggaccggatgggacattcatacataatttgatgagatcaatatcaaatattgatattagctgatgactatggtaacactagtcacagctgagccatgatagtatactgtgattatttttccttttctgcacaaccttttattttccctggaagttcatgactggtcttcgctttttcatttgcttcattttctatattcttattgctaatttagtccaagttatataaacnnnnnnnnnnnnnnctttaatcannnnnnnnnnnnnnnnnnnnnnnnnnnnnnnnnnnnnnnnnnnnnnnnnnnnnnnnnnnnnnnnnnnnnnnnnnnnnnnnnnnnnnnnnnnnnnnnnnnnnnnnnnnnnnnnnnnnnnnnnnnnaaattcatttttataatcttgccactcccacaaccactgccctcatggaccctgggcacgcctcacccgaattacagaaattccctcccagctggtaaaactgttggtgtgtggctctccttcattccatcctccctggtttagccagagaaataattctaaaatgtacacatcccaaagcatctcattttcctgcatgcagtctttcatcatccattcactaactggagggacacatctgaat

SEQ ID NO: 245236 - DNA, 710 bp, Homo Sapiens
gctgttctagaggtcccgattgtgaataggtaggtgctggctgtaatactaaagaagtcatagatagattaagatatcttaaagctgaaattgaagatctagaactgaaggaaagagaacttgatcagcagaagttgtggctacagcaaagcatcaaaaatgtgatggacgattccattaataatagattttcctatgtaactcatgaagacatctgtaattgctttaatggtgatacacttttggccattcaggcaccttctggtacacaactggaggtacccattccagaaatgggtcagaatggacaaaagaaataccagatcaatctaaagagtcattcaggacctatccatgtgctgcttataaattaaagagtcgagttcatctaagcccgtggtttttcctgttcccccatctgatgacctcacacagccttcctcccagtccttgattccagtgactccacagaaatccagcatggcaactcaaaatctgcctgagcaacatgtctctgaaagaagccaggctctgcagcagacatcagctacagatatatctacagcaggatctattagtggagatatcattgatgagttaatgtcttctgacgtgttacctctcttaaggcttactcctaccccggcagatgactacaactttaatttagatgataacgaaggagtttgtgatctgttggaggtccagag

SEQ ID NO: 245237 - DNA, 773 bp, Homo Sapiens
  misc_feature (76)..(88): n is a, c, g, or t
aaatctataggtatccaagtgaatagtcagtttcagcaagaatttcccatcctgcaggctagctggggatctaggnnnnnnnnnnnnnggaatacaatatgtatgactactatggacctggacccagtttacgtccaccaagttaagagtactttctctttcatacaaaatgagatcatatttgtgttattatcttgctattacaacctcctgcttgctgttgcatatattatttgcctacttcgtaaaggcagactttgtactatagtcacttgctactcaggttatgatttttgcaccgacagtatcactgttacttgagtacatgttagaaatgtgtcatcttgggcctcgcatccaacttactatatctaaatctacatttttactagatgtccaggtgactttcatgtataccaatatttggatttttttatactagtttttgagcaggcttccctatatgtgtaacttatttacattactactgtgattaatattcaggtgatgtcctcactcttctgagctacaaactgatggaatacaaataattattggatatatgatgggatgaggttagtgtactattactcaagctcaaaactacaaaagtaaaagtataaaatgttcagagggatttgttaaatgtcttcttaattgtgatagcttcatactgtcattaccatagtatcttataaggaccttgtttacatggggaggttcgtctatgacagaagtgtttacttattccatatttctattgacctacctat

SEQ ID NO: 245238 - DNA, 462 bp, Homo Sapiens
cgattgtgaaataggtaggtgatgtttgtagaaacagttcgtgactatgagcaccagttccaccttaggctggagcaggagcgaacacagtgggcacagtatagagaatccgcagagagggaaatagctgatttaagaagaaggctgtctgaaggtcaagaggaggaaaatttagaaaatgaaatgaaaaaggtatgaaggaatgtgttcatttgtagaaatatttgaattcaaatgcaaaatgctttaatattgttgtgtaatagaaagtaatagaagtactttgatatttcctgtgagaataattatttggacacagacctaaacatagtactaaataatgttatatctatggctaactctctcaccttcttcacatttttgatcaaatatcactacttcatggggtttctcccgaccacccgccatttaacatgcaaccacctatttcacattcggaca

SEQ ID NO: 245239 - DNA, 319 bp, Homo Sapiens
cgattgtgaaataggtaggtatatgtagatagatgtgcatgtatgtgtttgtatatataattttataagtttcacgcataaattaatacatgcctgtgtgcatacatatgtatgggatatatttgtatatatatgtacaggtaataaacatccccaaggtttgtggctggccatacacataggcatcagtttaacaaccatcagacctcagctgtacaataacaggtgttttgtttaattaaaattatactgttctgcagcatttagacatttgtcacatttcattagctttgacaaccgtactgtaacattaaccacg

SEQ ID NO: 245240 - DNA, 1010 bp, Homo Sapiens
  misc_feature (874)..(910): n is a, c, g, or t
aggtaggtagggaaggaaaaacatttagtaactataaaatttgaaactggttccagagaaaggtaaagggattattacccccacaggaagttgattatatgggtggctatattatacatttacatgtgagctcacacacacatatattactgcttagagttgtatagtacagcgattatacattttaagacaggattgagaatactgatttggtctgataccccaagaatcttccagagaaatgtctgcaactttaggagttagcttttaaaataactcttcctttagcacttttatttccttaagattaaactggttctatgttaggctaatcaggaggactgggactaagtttaaccatcagggcgtgactgtttctgcacatgctcaagtgactcagagagctgttcttggacttagcagtaagagctgtcatacctaaaccttcatttaggctgctgggttatttttattaagtattttgtaattcctagtacctagggcataactagttgttctaaggagtttagacttaatacatattaataacttgcattatgaggggcttgatactgaacatgccaataccaggattctaactgaggctccacatggagaaaagatttccttgtcaacggcagcagggattggtgcagatggtaatcaatctgacactaaaataatggatacacaaaatgtaccttaaggaaattgtgtaaagcttcttgtacagttgaagatggtatttttccttacagagtagcagccatttttttctctatccagctcagttttgagacctgcacatacacaacaacatcactcttagtaagttgttcaccttttgtatggattatctctccccagttagacnnnnnnnnnnnnnnnnnnnnnnnnnnnnnnnnnnnnnagatataacatatactaatgaaaatatatatccataaataatatatattagagatccaccctcatggtattcagtgttaatattttatcctctatctcta

SEQ ID NO: 245241 - DNA, 462 bp, Homo Sapiens
gtcgatctagaggatctccgatgtgaaataggtaggtgattgacttgatttggtggctacttttatactatctggattaacgagactattttcttcattagtttcaggcatgtgagcttaatgaagcattggaactcccaaattacaaggaaaatacagatatagcttatgtggtaggttcaaaggagttagtgaacaaacacagtagggccacaaattattgttaaagacatgaatgcatgaaagtgtatctatgtccaaatggactctctgcaaccatactgttccacctgaaaattagtagatagaaattcagcaaatgcttggacaggggatactctcagaagtattctgactaaatagcatggtttcttttcatatcaactaaagtaatttcttctctatttgactctggactaaatcttatgatacctacctattcactatcggggatcctcgaga

SEQ ID NO: 245242 - DNA, 688 bp, Homo Sapiens
cactagaatgacaagtatttaattgcctggccttggtttcttcatatgtggaatggggtaaagcctgccttcctcatagggctgttggaagatgtaaaggaggaaggaaaagcaccgtgaaaatgttaacgatggttagaaggtgggctctgctggtgacagacagagccttgatatcacctgttggttggtcacctgcttccccaaggccacgccctgcagccttctccttgaccatcccagccctgctgatgttccttgtgatttcacaatggagtacttatataaaattggtaactgctttccgggaaattgacttcccttcccctcgtcctgaaaactcaggcatgggcatatttcttggagattttctagttgaatcagaacttcctcttggtttgcgtagattccatttagacctgcattgtccagtgtggtagccgcttattgagtaatccacgtggcttattgagtactggaactgtggcttgtccgaattgggactgctttaggtgtaaaatatacactagatttccaagacatagtatagcataaactctgtacaccatttcattaataattactatgttgataacatgttgaaatataacattttggatatattagattaagtaaaatgtgttcttaaatttcacctacctatttcactatccgggatcctctagat

SEQ ID NO: 245243 - DNA, 699 bp, Homo Sapiens
gctcggtagcccgattgtgaaataggtaggtaagtagtctagggctggtatgatgacatcgcaatggaatcactgtttcaggctccttaaagttacttctttattgtaaaattgcttctgtagctccagccatcatgtttactttccagtcttgaaagaaaaggaaggtagaagagaaaaagcacctgcctcccatcttagtctgttacctttggagaggtttcccagaagccacaccataagacttctgcttacatcttgttggctaccctgtgtgcaaggaaggcaaagaaatttagccttttagctggatacattacttccccgcacaaaataggggctcttactaagggaaaagggaagaaattagtagaatctgccactcttctgctttgcatagccttcctacatcataacttcccaaagctattactttagcagctttctattgtaagtactctcctatatattcatatctttagctgtctaccttgtgtgaacaataccgagaactttatctccacacttgaccttttgcctaatacagtttcactgatgaacatcaacagaaactgatttattaaattcgaatgtctaaaaaggagtattcatcattttttaccaaaatttccttctctttccttctctgtttctcttcattacacctacctatttcacaatccgcagatcctctagatc

SEQ ID NO: 245244 - DNA, 758 bp, Homo Sapiens
cgcgtgtaacaatcgcgattgtgaaataggtaggtaagggggatttgtccacttagagaggcatctcaagttgagctacaagggaaggatctggattggcctctcagagaggaggagtattccagtctgagggatcaacgtgagtctaagcaaaaggaacacctgtctgatggaggggaaggagactggcttgacgggagtcatggaggatcagtatagggactgctacagataaattgatattataggttgactgctagagggttgtcaatactcatctggaatttatagagtttcgtctgatggcacatagaataactgatgattggagagtagggaaatgatttgattaaaatgtttagaaagctcaatcaagttacagaatgccctggagtaagatgagtcagtccatctcatcaagatgaggataaattgtaaatcatggtggactgttgcattttgggtgagttgctgcaggactcacagttttaccctaccatctacctgattctaggtgatttcaatgtccctgaagatgaatcaccaacatctcagccttgaggtttggttgttcatctgtattccaacagctttcccctcaattccacttcagcaacctattgacatcgtgaccccgaaccatgtcacaaagcatggttcacaacattttccattgctcaaaccaaactgataaccccttctcctactatcacctctgatccacctacctattcacaatcggggtcctctatgtcagc

SEQ ID NO: 245245 - DNA, 670 bp, Homo Sapiens
cagaggatctccgattgtgaaataggtaggtgagaaaactgagccaaatgcaagaggctaagaggagaaagtttcttctatgataaatctttggtatattaatgttcatatcttcccaggaacatcttaggtacatgctctctatcaaatggttagttgtatgtaattctttatgaaagacacagcatagttaatgctatggatttagcgcatagttcagtttgaagaatggtagaagctctgctttgtcactcatacttagttgtcagtaattgttcacttactgagacttctcagtgtaggcaccatcgcttctaaacttccctgccccccagtgtcttatattgttccagtataggaagatgcagaactagatactggatgggagctgtcatttcagtgtacaataatcatgataggaaatgtcctgaaatttctgttggagcctcatttctcttttgtcttatttaattgtagtaaaaatgtgatttcgcctttatgcataccatagatttgattagtggcattttagtgggaatttaatttctgacttacataactacctacctatttcacaatcgccagagatttcctgcatacattaaaaaagacaggcttgtttttctactatatatcccgagcacctagcaacactacctggcccaatcta

SEQ ID NO: 245246 - DNA, 642 bp, Homo Sapiens
tacgcattcattttgccagtgttcattcaggtatccagggacattcatatggttaaccacccaagtcacagcctttggagtttttctctgtgtctcctttgctcctgttgataaccattgcctgtatcattctgtcactatatttacataattactctgattgccataggtcacttttaaaaaattgtttcttttcaactgctctgatcagatctccttttctcaacctctttcttcctttctccatcttctacttttctctcagaaccttataacatttattactaggacttccttaaatatcgcctcctgtgacaatcaactctagggcttgctctaacctatgttgctgtttttcacatgctactttgcagacttcttttcttctgcctgtgtctttaatgacactgttcctcaagacctgtattagattcctgtattttccccactcctcttggataatctcattcatcattagagtttcaatgaatattataagcaagttacatccacatctatagcacatcaccagttctcctgcctatatccataggtaaaatgctaacttgataattccacttgagttgacatatacacacttcaaattcattatcttcagactgacctacctattcacgttcg

SEQ ID NO: 245247 - DNA, 690 bp, Homo Sapiens
  misc_feature (114)..(114): n is a, c, g, or t
taaaagaaaaccatctacacatctacaacatggatgaagcttgggacattctactaagtgaaagaacccagtcgtaagaggacggatactgtctgattccacttagctgaggtncctggagtagtcagattcatagagacagaaagaatgatgggcgccaggggctgggagagagagaatgggtaggtagtgtttaatggggccattgtttcagtttgggaatatgaaaatttctgaagacagacagtggtgatggttgcataatagtgtgaatgtacttaatgccactcaagtgtactcttaaagatggttaaatggtcaattttatatgtagtttaccacaatttagaaaaattgacagagaaactgaagcttaggtatgagtatactctcactaaaaggcacagaaactcatgcttcactgctgcctttatcctaaaatgtcctataaaatgtgggaaaccctgtaataactcactctgtgagcacaaatttggatcgagtgagaagatgcttgacttccttcctccaggcagcccatggtttaagtttttatcttggacaagatatcttgtgtctcttctccccagtgttctgctacccatttatctcaatatgcttcaatgtatttgtatgaagatatgtctgtatccattatgattacctacctatttcacaatcggggatctc

SEQ ID NO: 245248 - DNA, 351 bp, Homo Sapiens
cggatccccgattgtgaaataggtaggtacagaggaccagttaagaccagttaggaggctgctgctgtagcccagctgggatagcagtgccctaggcaaagataacgacagtgaagttaaagagagtggacaagttgggtaaagtttagaatcacaggacttgctgactggagaagagggcaaaagcagagttagcacaacacatgagttatgaccaccttgagcagctcagcagggggtggtgccatttacagaacagagatggcatggacagagcccatggagaaggaggaggaaaaagagagtttggttttgggtttttttataaagacagtgtctctggctctgtca

SEQ ID NO: 245249 - DNA, 648 bp, Homo Sapiens
ctaccgacagtgaaataggtaggttagctctggcttgacctctctcatgagaggggccgattgtgaaataggtaggttaacaaagaaatcttagttacatggtgctttataatttacaaagcattttacgcccatctcactagagattcacaacctccctggaagtggacagggcctggataatgagtgtaactagtgcccccattacagataagaaattgttctgagtgaggtgccccctcattacctatcaactcaacatagaacagtccagtaattgttcccttgcatcataatgctgctccacatgggctcagatgtttccattccaccttggaaatgaaaaggggaaagcatgcatttattgaacattcatcacgtgcccagtcctgtgtttgatgcttgttcttgcaacagggataacttcagcacgtttaccatgagcagcttcctctagcacagcaatgaaatacatgcacatgtgtcttctgcagatagtacacacccctttgctcttcttattcctatttgtctgaacacattacagcaataagtcagtccaccaatgtaaacccctaaacgtaagatgtgtgtgcccataggactatgagagcaatcacctacctatttcacaatcggggtaccgag

SEQ ID NO: 245250 - DNA, 391 bp, Homo Sapiens
gttaacctcttattattacttggaatgtttttccttaacttttttcacatttttattagtttggcacaaactatgaagaccctaaggctaggaaagaacactgtgaaattttcattatatagacattttaaaaatactctgatctttgctgtgctgggtaagctatttaatttttcttacagtaaattatcttagtattgttatattccttcaaaggtgactttttgtgtgtttcagcttctatagtgtttatggggtggacaactaagacatttagaattgcaaaatgccaatcagtaagtataacctacctatttcacaatcgcccctgggagtcattgtggctggttgggcctatgggcctgcaggctgtgtttgatgtggtgacgca

SEQ ID NO: 245251 - DNA, 420 bp, Homo Sapiens
  misc_feature (270)..(280): n is a, c, g, or t
ccgatgtgaataggtaggtccagaagatcatttttgtacgtgtggttttttctcttggcataatcctaaactgacttcgtatgacctttctgaaattcttcagagcaggtctagacactctcagcccctcttgctgactgtggtaagaaagcatccccaggtggacacgtcctgctcctctgtcccctgttcagtaagacacacccccagacctttgtataatgcagacaggtaccagctgtgtgaaatgagtgattaagtgttgattcnnnnnnnnnnnccttcaaaatgctgactccaaatccctattttttcccaggtctatgaggtaagagacccagttcctatccccttattttctctttcccttggccatacctacctatttcacaatcgggggatccccatagagtcgaccgg

SEQ ID NO: 245252 - DNA, 467 bp, Homo Sapiens
  misc_feature (231)..(247): n is a, c, g, or t
cggcacgaagtgaataggtaggtgatggtgaactccctcagctttgtttgtctggaatgtctttatctctccttcatttctgaaggatagcttgcaggctgtagtatttgggcttgacaggtttttttcctccagcattttaaatataatatatcatcccactcgctcctggcatgtaaggtctgccaagaaatctgctactaaccttattggaactttattatgtgagannnnnnnnnnnnnnnnngctgctttcaggatcctctctttgtccttgatttttgacggtttggttatcaaatgtcctggtgtagtcttgtttagattgaatttcattggacaattttgaccttcctgtacctggatatttatatttgtctcccaatttggaaatttttctgctaatatttctttaaataacttttctacccctttgtctttctcttcacctacctatttcacaatcg

SEQ ID NO: 245253 - DNA, 393 bp, Homo Sapiens
agaggatcccccgattgtgaaataggtaggtttgttgctaaaatacccaagaaaatgtaaacatgtttcaacttcaaagttttctttcaaaaaaagatattccttcttaagctggaaagatgctggaagaccttccttctgagtttcacactgatacatgcaattgcttacttgacatctccacttgtctctctcacttaacactttcaaaactgaacttttgatcttcccacagccaatccagtgttttatcttctcagtaaatgatcccactgcttgcctaggtacatcagccacagtctgcaaataatcctggacaccgacctctctcctatccacatccattccatcgccaaagtctgtctattctacctacatatttcacaatccggt

SEQ ID NO: 245254 - DNA, 824 bp, Homo Sapiens
  misc_feature (475)..(514): n is a, c, g, or t
ggggataagactgcgaggttccaacagcagagcaatcctccaagccgcagctggcactgtccggcaccagaggggctgctgacaaacacgtcttctgcagctggcctgcagtctgctaacactgagaagccctctctcatgcaagtgggaggatataataaccaagccaaaacctgttctgtttctaccctgagtgcaagtgtccacaatggggcacaagtgaaggagctagaagaaagcaagtgccaaattccagtccactctcaagagaacaggataactaagactgtttctcatctgtaccaggaaagtatctccaaacagcagcctcatattagtaatgaagcccacaggagccacctcactgcagccaaaccaaagcgatcatttatagagtcaaatgtgtgaaccttaagaaagccccatttgtggaatttggaaacgtgtgttgactcctggtggtaaattaaatagnnnnnnnnnnnnnnnnnnnnnnnnnnnnnnnnnnnnnnnnctttggggtggatctgatgccattgatatatctaaaatgtgggataaaacttctttaatagctagaaatccccataaataagaatgctaaacagaattgaaaattatatcaactttaaaattttaagaccagcccagaaagacattaaatgactcctcacttatgaaaattgttttggcttttgccactttccctccttggcctttgctatatgggtaaaatcacagaaccttactttagagaataaatatggcctaattggtccagaagtaacagggtttaactccttgaccaaaggaatggaacatcc

SEQ ID NO: 245255 - DNA, 273 bp, Homo Sapiens
tgatcaggttcagcggcacttccagttcgttgaccagctgaaacggcgcggccgagccgatgcgatcgaagagttcgatcagggactggaaatggccctgcgtttcgcgcccgctgctgcgctgggcgccttgcaagtattcgccaaacagggtttgtggacggatcagcggcgccacggtggcaaggtaatccgccgcctgcgccttcagcgcgtcggagatcgcccgcgtctggctacgcagcttgatcagtgcttcgacatcgaatgtaa

SEQ ID NO: 245256 - DNA, 208 bp, Homo Sapiens
ccagtacggtgatcaggactttcagatggagggtaagagagcgcatcgtgattactctgctttgggagcgtcggtggcacaggcaggtttgccggccgcatatttaaggcttgggtcaaccagcgcgtcgaagtgcttgagcgcctcggagccgatcagcagcgggaactggaaggcgcttcgggcggtgaggttcccttcgataggg

SEQ ID NO: 245257 - DNA, 194 bp, Homo Sapiens
gtagttgttggagatgaagctctcgttcaggctgacggagtcgcggttcagcggcggcacgaacatctgcaccttgaccgggtccttggtgctggccacgaactcgaccttggcgtcgatgttccacaggtcgtcggtttcatcctcggtcaccgggaagccgaggaagaagatctgataagccgtgaccgcca

SEQ ID NO: 245258 - DNA, 919 bp, Homo Sapiens
  misc_feature (321)..(321): n is a, c, g, or t
gcgcccggccaacttttctttagaaaaatgagtaaagtagctaaacttcacaggccccttagaattaaatccttagggcatggttcaagtctgtaggaagcaaatctatacttttttatataggcttttaagtagagcttagaaccctggggggagaaaagcagtcaggtgaggtttgagattccttctatagaatgatttcttaaaatgaaaatctgggcccacttaactaccctagataaaacgcttcaatggcttcccatggctcactggataacatctaaattcttcatggaattgaaggcccctatgtgctggttntggctaagatctcccctttgatgtgggtcccctgttgattatacgtgcggccttccagctgcccaccatcacagctacagctcgctccccttggcctctgtgccttggctcgcactgttcctactgaaggcctagcacctgctcttggcctggtgagcccctccaccttccaggcttactcaaagaattctttctgcccctccctgtgtcccgggacctgtttcatatcgcttctgtggtcgtgaccccatggtcttgtaattgtgaacttctttgctgccccttcgaagctggggagtgcttgttgcagatgcatccaagaggggtaattgcgtatcaacagtggatttgctggttgtttctacagggttctgaagcatgcaacatagaacagatacctttaaatttaggggcgctaaggaaagcaggaaccagtaatcctcttctgtggtgggatgggagggtgggggagaggggtggaatggagaggaaacagggctattgtcggcagccctgggtggaggtgggtgcaagcaggacagatagtgcctgggggtggggggcggagggttcgcctctaggaagggggctacaaggg

SEQ ID NO: 245259 - DNA, 1050 bp, Homo Sapiens
atatcggtgaaagaccagaggaaggctatcaaggccctgttggcgtgggtgcagaggaaaacgagaaagtatggcgtggcggtgcaggactttgcgggcagttggaggagtgggctggctttcctggcggtgatcaaggccattgaccccagcctggtggacatgaaacaggccctggaaaattccacacgagaaaatctagagaaggctttcagcatcgcacaggatgccctgcacatccccaggctcctggagccagaagacatcatggttgacacaccagacgagcagtctatcatgacttacgtggcacagtttctagaacgttttccggagttggaagccgaagatattttcgattcagataaagaagttcctatcgaatccacttttgttcgcatcaaagaaactccttctgaacaggagagcaaagtcttcgttctgactgaaaatggggagcgtacctacactgttaaccatgaaaccagccacccaccaccctccaaagtctttgtctgtgacaagcccgagagcatgaaggaattccgcctggatggtgtttccagccatgcgctgtcagacagctccaccgagttcatgcaccagattattgaccaggtcctgcaagggggcccaggtaagaccagcgacatcagtgagccatctccagaatcctccattttatcatccagaaaggagtacggggggtccaactcttttccgatcaagtagacagttcactttgaggcttacacctacaaggatcctttctgcagtaagaacctgtccctttgctttgaagggagcccaagagtggcaaaggaatcattgaggcaggatggacatgtcttggcagttgaggttgctgaggaaaaggaacagaaacaggaatcctcgaagattccagaatcctccgtctggacaaggtcgctggtgacatttttttggtggagggcacaaacaataattctcagtcttcttccctgtaatggtgctttagagagtacagcccgcacgatgaagtaagtcactctctttcactggacagca

SEQ ID NO: 245260 - DNA, 246 bp, Homo Sapiens
ctcctgcttagcctcccaaagtgttgggattacaggcatgagccaccgtgctggtctaattctctataccaaaatttctctgtttatctgaacggtacagtttctgttctctcgactggaccctgactgacactggtgatggtaacaatgacaattattattctgatggctgtcttccagggatgagcacttagtatacacgtgctcaccgcaagttgaatgggatacactggaagcagctagaca

SEQ ID NO: 245261 - DNA, 292 bp, Homo Sapiens
tctccactcaggcttggaaccagcacagcggagtggtaagaccagacggtcatagccaaggagccccaaactcagacccgggtttggaaccggaagacagaaactccacatctgtctcagaagatcttcttgagccttttattgcagtctcagctcaggcttggaaccagcacagcggcgtgttcagaccagacagtcatagccaaggatccccaaactcagacccaggttaggaacctgaagacagcaactccacatctgccttggaagatcctcttgagtttatagacat

SEQ ID NO: 245262 - DNA, 426 bp, Homo Sapiens
gtgtgagccactgcgcccggcctatattggctaattctaggtacctcatgtaaatggaatcatccagtatttgtccttttgtgttgatttcactttacatgtcttcatggttcatccctgttgtagcatgtatcagaattcttttctttttttgtggctaagttcatcttccattggatggatagaccacatttggtttacctattctgccatcgatgggcacttgggtcatgtcccctttttgctattgtgaacgacgttgctgtgaacataggctctaagtatctgtttgactttttgccttcagtttgtttgggtttatatctaggagtggaattgctgggttgtatggtaatgatctgttctaacttttggaggagcagtggctacatcatttcacatttccacctgcagtgcacgtggttc

SEQ ID NO: 245263 - DNA, 442 bp, Homo Sapiens
  misc_feature (119)..(119): n is a, c, g, or t
aacgccctggtgcctgtgtctctgagacctgtgctgcgccttgggcaccttgaagggtccggcatgccaccccagggggcccctgtcagaaccctccagctgggcccaggcatgagggnctgtaggtggatgggcagcacagaggtggggctgcccgacagtagagaggcaccaccagtctggcagggaccagtgagcaagaatgagatcaacaacctcctggtggctcggtgcccacagtccacgcagcaggacgctccaggcctctgccaggcgagtctctgaaaacctatgtggcctacaaggccttctgtttccaagtctccaagtttaagaagcctgaccgaactccctctacactcaggcagctcttccattccttgatccttggtggcttcacagaccccagagttgcgtgggatggcctcaccccaccagcagc

SEQ ID NO: 245264 - DNA, 504 bp, Homo Sapiens
gcagagtctcaaaatatgaattagtttataattaggcaaggaaaggtgagaatgtgtgggcacattttcttacagggaaggagactgataccgaacttgtactaaatcagacgaaagagacctttacaagttggagattaggttcatgccttcaacagatagtcaaatttgtccagtaaagtaaagataaaaggttatagcttcctttcccagtgtctcattttaaatattttccatctaaggggaagcaggacaacttttgtgaaagccagccagacctctgcctgttggggtcctgtttacacctgtttggtcagtactgactgcaaagatggtcatggagacaggccagggcaggttctctacctcttctcccgtaaagtaactgtaaacacgaagcagttttctaagttggaggcaggtctttcaggctcccatgggagtagatggatctcagctgtgccgtgcccgccctctgcggctgtctgtctcaagcacgtcaac

SEQ ID NO: 245265 - DNA, 328 bp, Homo Sapiens
accacatgattgtcaccgctccggcagtattttcccttttgcatgtaatgcaacctactcgtgggtgcccaggattgagattggatgtctttgggaaccattactcggcccatcacatctgagttatgttggagtcaccgaggatcaaggagacagcactgctgtgcagagggcgatagtgaaccaggaactacaagagtcaggactgagaggaacggtcgtggggcccacagggaatggctgcaatgaggggagtggggcctgaatctgatgacagctttgggggcttaggaaggaaggaggcagaaaggtctgagaaccacagtga

SEQ ID NO: 245266 - DNA, 337 bp, Homo Sapiens
ttcaaattataatattttattatagaaaaagcatcccaaatacaggatttcgtaaacactggtaggtgaacaagtgcaattttagaagtaaatacaaagtagaggcaaaacctacaagcattttgccttcagaagaaaatgtaatgttctcctgcactagtgatcccacccagaacacaaatgtggctccatctcccatgaaagcatcatatttgctttctgagctcagtattcccatttcaataattgcaaagtgatggcaagaagtggcactgaatacattactacaaacccttgacttaaaatattgagacaggtcttgcctgtcatccaggct

SEQ ID NO: 245267 - DNA, 340 bp, Homo Sapiens
tgagccggtccacatgatgctcaccgctcttcccatcatcatttaaattactcaaacttcttctgttttaaaaacctctccctaaactcagggagaggtcttctgcacacacattgagccatctgctcttcctggtgccttctctacagcagcctgagccatgtctctaatctatgaatctcatcatgttactcccccatttacatcacttctccttgcctcagggattaagtccaaactccttaacagcccctgctctgccctgccttgcaaggcagcctcactgcttgcccctctccatttcatctgctatggacgtcgacaatcgggatcctctaga

SEQ ID NO: 245268 - DNA, 218 bp, Homo Sapiens
ctccacgctccaggccaacatccattttcaacgctcactcagcaaaacagaaagtattaaaaatttgaatttcagagcattctcacagtttagagggcactaatttattttaaatcaagactgggaagtccaggttgtacattagctataagaataaatcaactatcttaaaacaaaacaaaacacctacaacaatgatcaatactggatcccacttg

SEQ ID NO: 245269 - DNA, 268 bp, Homo Sapiens
cagctgaggctttggattttaattctaggtgtgttgagaaaccactggagtttttgagcaactaaggcacatgatctgatttacattttaagactcaccgtggcttttcatagagaaagattgtagtgggtaaatggagaagcaggggtcagtggagaagccattgcaatatccattcaagtgacaatgggggctcaggcagggcggttgcagcaatgatggtgagcagcaatggtttctggatatattttgaatggaatttcatgat

SEQ ID NO: 245270 - DNA, 183 bp, Homo Sapiens
ttgctccaccgctcccaactttattgaacactataagcaaacatgttaaatatgttcaaattcttactcaactttctcaaatccaagcctctttttccctaagatatgttttttactgaagtttatcacaagcatgccatcagaatagtgtcactctggccaggagcgtggagctatggtact

SEQ ID NO: 245271 - DNA, 222 bp, Homo Sapiens
atgctcaccgctccctctgagttttaagagtttgtaaaactaactttttaatacatctaaaatttataacatatgatgtgagatataaatctgagttcgctttttccacactgttatctagtttttcccaagagctatttattgtaaaattatttctttcactattgtttgcctctccaaatttgtcatatataaatgtcttccaggtcagagcggtgaggc

SEQ ID NO: 245272 - DNA, 733 bp, Homo Sapiens
  misc_feature (27)..(27): n is a, c, g, or t
  misc_feature (55)..(55): n is a, c, g, or t
  misc_feature (97)..(97): n is a, c, g, or t
gaatggtgggctttcaacagcttttcnacttcccttttcttcctctccatccttnacgggcccaggctagtcagccttcactccttcacgaccttcntgaccttcagacatgggcttttcacaacccaccagattcatccatctatagtgccttctagaaataataaaaaaatgcaaacgtgaccattttgctcccccgcttaaagccctcatgcaggccatcacctactggaaaatgtttgagctccttagaaagccatgcaaggccctctgagagctgctcccagctccactgcccaacctcccatcctgccattcccaacctgaatgccagggacctgaaactgacctgcactggtcactgctattgttcacgacttgctaattttcacctctttgcctttccttacattatcgtacctgccatatccctaccccgctcctggcccataatttttttaaattagaatttttataactgactcagtaattgaaataaaaagttcagagcttttatgagagaaattgaaccagaaaaataaaaatacattcagagatagacttaacagcagaatgaatgggacagaggaaataatctatgcactagaagatagaataatacatattactcagcgtatacaacaacatagaaaatagaattaaaaacagaaagactgaggagcttgtgagaatatgacagaaaaagcaaattcgtgttatcggagtcatggaa

SEQ ID NO: 245273 - DNA, 150 bp, Homo Sapiens
catcgctcgggctgatttagtttcttccagcccttcctattgttaacatgggggttgtgttgaagaatataaagttacaaagtcaaggaagtaggaaacatttttacaagtattatgtagccatcttgtggagcgaagagcaagctggat

SEQ ID NO: 245274 - DNA, 232 bp, Homo Sapiens
acagtgtgctccaccgctccaccaccagccaaactagtgtataaagtacaggagagcccctgagatttgtcagggaaagaaagatgggagagggcgggaaggtagcccaagttgaaaaatggccttgataagaattccacattttggccatgggtctagtttggagtgggttttgaccagataggagagcccgggttagggagagagagcgtgcacatcatgtgtaccgacc

SEQ ID NO: 245275 - DNA, 338 bp, Homo Sapiens
agtagggacggagtattccctctcttgactgatgtttcagcagtatgtggacagattcttcttttaaggtaaatgagcagggcttgtaatatgagtgtcacttaggcaacaggacatttcaatgaaatggtgatggaaataggttctttttgtagattgtgagctcttgggagcatggattttgctaaatatactgatttttaaatttttttgacatctagcatggtgcatttcacataggagtttttcaagaagtactcatttcacaggcatcttgaatgatagatgtttggtaagaactgcgcaagacagtgtactaatcactcattctcattcag

SEQ ID NO: 245276 - DNA, 603 bp, Homo Sapiens
cctgtgacatcgtccagggccacaggagcacgtgctgaccagttttcccttccagttcctgcacaaaaagtgtccagagggctgtttgcaaacactagtgcactttgtagcttttcaccctctgtcccagggaatctaggagagatgaggcccgtcagagtcaagagatgtcatccccccagggtctccaaggcatttccacactattggtggcacctggaggacatgcaccaaggcttgccagagccaacaggaagtgagcccagagcatggcacatgagcatcacccgctgatggcgggctgctgtgcctggtgccaacaggggcatcccggcccatacccctccagacaggaagcatgggtttgcccacagacctgtcgggtgctcctgtgagtggcctccagatgtctttgtgcataggcacaagtgggccagggctggagggaggtgggaacctcatcatccggtgggccttgcaatcttaacccagaacccttaggtattcctggcagtagccatgacattggagcaccttcctctccagccagaggctgacctgaggccactgtcctcagatacaccacctgagcgaggatcctct

SEQ ID NO: 245277 - DNA, 860 bp, Homo Sapiens
  misc_feature (425)..(445): n is a, c, g, or t
  misc_feature (679)..(679): n is a, c, g, or t
  misc_feature (737)..(737): n is a, c, g, or t
  misc_feature (750)..(750): n is a, c, g, or t
  misc_feature (847)..(847): n is a, c, g, or t
atacacagggatacaggcattgggtaaatacactcgtttcaaatgggagaaattggccaaagcaaaagagctacaggccccatgcaagtccaaaacccagcaggcaaatcttaaagctccaaaatgacctcctttgactccatgtgtcacatctaggtgatgcaagaagtgggttcccagggtcttgggcagccccgcccctgtggctttgcagggtacagccccccttctggctgcattgagtgtctgcagcttttccaggcacacagtgcaagctgtcagtggatctaccattctggggtctggaggatggtggcccttttctcacagctctgcttggcagtaccccagtggggactctgtgtgggagctccaaccccatatttccctttgacactgccctagcagaggttatccatgagggnnnnnnnnnnnnnnnnnnnnnacagcaaacttttgcctggatttccaggcattttcatacatcttctgaaatctaggcggaggttcatgaacgttaattcttcggtgcatctgcaggcttaacaccacctagaacctgaaaggcttggaacttgcaccctctgaagccatggcctgaggtgtaccttggccccttttacctgtggcaggagcagctgggatgcagggccccaagttcctaggctgcacacagcanggggttctggacccacaaaaccatttttccttctaagcctcctggcctgtgatggganggtctgctgtganggtctctaacatgccctggagacatttggcccattggcttggtgattaacatttggcttctcattacttatgcaaattctacaaccaatctcctganaaaatacattctc

SEQ ID NO: 245278 - DNA, 187 bp, Homo Sapiens
aacctgcattttctagccacgtggacccgtacgctccagctcctgggtctgggtttggggggctgagcctgtgtgtgatgtgcgcctgtgtgcgtgtctgagtgggtcagtcccggcttactgagtgctgtgtgcgtgagtgggtttgtgcaccgcccaggagcggtgagcaatggtaccggctgag

SEQ ID NO: 245279 - DNA, 286 bp, Homo Sapiens
  misc_feature (58)..(76): n is a, c, g, or t
acctgagtgctcccccgctccagcctgggttaccgagcgagatgctatctccaagagnnnnnnnnnnnnnnnnnnnggaagagaggtgagggccactctagggacaagggtagaggttgagacatggtggtgaaggtgccagacctcaggcttcaggtccagatggggttgggttcgggattatgagctgaaggtggaaagtgctcctagagccctagacctcaggctgctgagctggggaatggggaatgaagtagtgagacggagcgtggaccaatcatgtggt

SEQ ID NO: 245280 - DNA, 434 bp, Homo Sapiens
  misc_feature (400)..(400): n is a, c, g, or t
ctcagctgttcatcctgtaggaatttggactctcttagttcttatcataatacctcagtatggcaggtaggaatctcatcctcacacacagttgtacatgaaatagcacatttccttaattgtgataagtcactttgattttatcttccctcattctcctctgctggcatgcttcaaggttctgaaggctcccaggatactaacaccctccacgtggatgtctgagcaggtacctgtctgcagatgcctcaagtctggggctctccatcgcttccctgacacatctggaacttgggatagactcttatggtgggaggcagagcctgttctttctcattgcctggaaggggaaacccggccctggctgtcccagacccccagacttttctcagcctcccantgagaagaactcagagccagagcgtggaggtacc

SEQ ID NO: 245281 - DNA, 360 bp, Homo Sapiens
  misc_feature (230)..(306): n is a, c, g, or t
ctttgcatatttcttttaaacttgagatcatgtaatgtcaacaagtttattggatttttctcctaatgtagtattagtatttccatgtgttgtaaagagcaagcttttaggtatcatttttaatgcaatataatgttgtaacatcctattgcaatgacagcttgtctttctcccaattttatctgcactattaggtattaagaatatttaatgtggccgggcatgaaggnnnnnnnnnnnnnnnnnnnnnnnnnnnnnnnnnnnnnnnnnnnnnnnnnnnnnnnnnnnnnnnnnnnnnnnnnnnnngctacttaatttaccttttatccaggaccgtggagccatcatctgggatcctct

SEQ ID NO: 245282 - DNA, 229 bp, Homo Sapiens
cctacatgattgctcacgctcagccagagcaggaagatttcttccccacatctccagtaggtacagtgatatgaagtgtgtggaggagaaaagaggaaacacctatcatttgagatggctgcgaaaggaaaaggcatcctcagggagctagattttacttagagcaagaaatgaagggatgattcagaggttaaagagtggattttatgaattactcaagggagcggtg

SEQ ID NO: 245283 - DNA, 165 bp, Homo Sapiens
tcgagcctcccaagggtgttgggattagaggcgtgagcgcttttcttaaaagagttccagggttctatgtatggaagagcgagtttgtcagtttttattggaacaaagaaatgaattgacagcattgtgataaacactggaagtgtcgcttctaaaatttgtcca

SEQ ID NO: 245284 - DNA, 173 bp, Homo Sapiens
cggccaacataagcacctttttatttaaacttgacctttggcacaggactctgacagtctccctgacatttccgttttacgactctggcattgccatttatcttatctaggcttacgtgctaccaacaaacttccgcggtgtcactgtcccggaactcctctatattccttcc

SEQ ID NO: 245285 - DNA, 667 bp, Homo Sapiens
ccaggacctgctgcgggaggacctgaacaagaagcagacccagaaggacttggagtgtgcactgctgcttcgtgcagcacgaggccacgcgggagctggagctgcggcatgctccaggccgtgcagcgcacgcgggctgagctcacccgcctgcagcaccagacggagctgggcaaccagctggagtacaacaagcggcgtgagcaagagttgcggcagaagcatgcggcccaggttcgccagcagcccaagagcctcaaagtacgtgcaggccagcgccccccgggccttccactccccattcctggggctctgggcccacccaacacaggcacccctatagaacagcagccctgctcacctggccaggaggcagtcctggaccaaagaatgcttggcgaggaggaggaagcagttggagagagacggattctgggaaaggaaggggccactttggagcccaagcagcagaggattctgggggacgaatcaggagcccctagtcccagtccacaaaaacatgggagcctggttgatagaggaagtttgggagtctgcctgaggagatagaggagcttagggtgccctcccttgtaccccaggagaggagcattggtgtccaggaggaggctggaacatgagcggtgacaatcatgtggaccgctat

SEQ ID NO: 245286 - DNA, 203 bp, Homo Sapiens
ccaatgatgctcacgctcaagcttattatttagacatcgtgtctccaaacactcaggtctccaaacccaagttagtgtctgagaacaggatgctgctttggttcaagacgtgggagcagcaataatagagggctggtgatggctccctcttggcattcagtatagtgtagatctaccatgtaattaattctctgtttctttga

SEQ ID NO: 245287 - DNA, 176 bp, Homo Sapiens
atcaccactaccaccacccccactctgcagtgagtcttgggaacatacaggtcttggtttgggttccaaggtagttctagaacccaggaaattgtctcgccggcctgagcctcggtcccactgcacagaggggaagagccggaagggagcgtggagggatctctagagtcacccga

SEQ ID NO: 245288 - DNA, 812 bp, Homo Sapiens
  misc_feature (730)..(760): n is a, c, g, or t
ccatctgactcatggaatcttctccggtcctgctatttctcgcatcaacaacgcatgcttgaggcagtagtagtcaccaataccatacctcaggaggacaagatgaagcatgctccaaaatacaggtgattgacatctctatgatccttgcagaagccatcaggagaactcacaatggagaatccgtttcttacctattcagccatgtccctttataatagagtaacttctgaggctttttgagaataaaatccaccccacccttgtttccccttggtatttgatgacaaattcagcagaagacccggcttgctccagtgtagctttctacatcccacatcaggtatattagagcttatccgaactggggaaagacggattgagattaactgctgggacctcctacctgcattatctcattctggcttccttgataattctgtgggccttgcagctttaactatagctcagctgctgcaagatttcagacttttgaggatgttgtgtgagggtgtttgactgtgactggggaagctcagactactttgtatgtgaatgcttcagggttttctttgttgagaacaactagcaacaaaggcaacccatgtgtgaccagttctccccaaggtctatgctaaattatagcaagagccctgggcaaccccaaacctagtcctggtagctgagcaccctgtaaggcaggagcaggcagtcagtttgagcagacatnnnnnnnnnnnnnnnnnnnnnnnnnnnnnnnaggcagacagtgcagcaaatgttcttgggaggaagaagctgatcatcaccac

SEQ ID NO: 245289 - DNA, 133 bp, Homo Sapiens
ccggggccacctggagagcagtcttctgagccaccttgtggatcccaaggacctggagccacgggctgccaactgcactcgggtactggtgtggcatactcgacagagaagcccaagatgaagcaggagaacg

SEQ ID NO: 245290 - DNA, 809 bp, Homo Sapiens
ggacgcgtgggtcgacccacgcgctcggggcttggtggtgaccgctggcggggcggggcctggggctcagaggggtgggctttggagatcagagggtcgacgctgcttcgttgcctggactctggtttccgccctggagcaagccggggcctggtcggcagctgggccgccatggagtccacgctgggcgcgggcatcgtgatagccgaggcgctacagaaccagctagcctggctggagaacgtgtggctctggatcacctttctgggcgatcccaagatcctctttctgttctacttccccgcggcctactacgcctcccgccgtgtgggcatcgcggtgctctggatcagcctcatcaccgagtggctcaacctcatcttcaagtggtgagacagagaagccctccggcatcctggtccccaaccccgagggccctgagtcatgtgtttctttttggagacaggcccttttggtgggtccatgagtctggttactacagccaggctccagcccgggttcaccagattcccctcttcttgtgagaactggtccagggcagcccttctggacactgcatgatcacaggagcagccctctggcccataatgacggccctgtcttcgcaggtggccactcgggcccgcagcggctgggtaagggtgatgcctaggcctggcttattgcaccttccttttggcggttggcttgtcgcgaatcttcatcttagcacatttccctcaccaggtgctggctggcctaataactggcgctgtcctgggctggctgatgactccccgagtgcaatt

SEQ ID NO: 245291 - DNA, 453 bp, Homo Sapiens
ccttgggtcctgaagtgacctcactggcctgccatgccagtaactgtgctgtactgagcactgaaccacattcagggaaatggcttattaaactttgaagcaactgtgaattcattctggaggggcagtggagatcaggagtgacagatcacagggtgagggccacctccacactccaccccctctggagaaggcctggaagagctgagaccttgctttgagactcctcagcacccctccagttttgcctgagaatggggcagatgttcccggagcagaagacgtctccccttctctgcctcacctggtcgccgatccatgcatctctttcttttctctgtctactccttatcccttggtttagaggaacccagatgtggcctttagcaaaactggacaatgtccaacccactcatgactgcatgacgagcgaaggacatcatggtaccgact

SEQ ID NO: 245292 - DNA, 205 bp, Homo Sapiens
tggccacatctgacagttttatggcatcattttctgacccccatctaggttgggaaaatgtccaggcttttgcagcctctggtgggcactattttatgccctccaagtaccagttgttctctgtagttcgcacaaatcgccccttgttcacacaaggcacgggccattgttggaatcaggctttccaagctggaggggcccttag

SEQ ID NO: 245293 - DNA, 345 bp, Homo Sapiens
ccccgcgccctttcccagtggttgcaataacggacttagaggtctggaccattcaagtaaggaacaaggctcgcttatccaagttctcgcaggataaaagtttgttatgaacgatttcacatggtttctctttatcagaaagttgttagggacttttaatcgcagaattggcctcgggtgcccacgctctagtattgaaatggcggttttgggacaaataagcaacatccgtgggagtggaaagcgacagacctgatcccggaagcgttacagctaggcgccaagttcacaggcgcgaagttcaaatttgtcttgtgaccctgtgataggtggtacaggggagcg

SEQ ID NO: 245294 - DNA, 625 bp, Homo Sapiens
aggctggtacggtccggaagtcccgggatatcgtcgacccacgcgtccgcaaacattaaatgtttttaaaaattgaaagcctgaatgtgactgtgatagatttgggtagtaatttaaagatgagtacctgaagaattctgcttcagagtataatgatgacccttcttgagttttgaacacctgaaattgtaatcactgaaatattaactgtttcttaataaaaagttacctgaaataacaacaaaatacaactcctcagctagcttgctgttaaaccacatgaagtctgttaaaagatatttatttttcttgtaaatatctgaagctgtagcttagtggaaattttagcaaggtaatggattttgctttaaaatgtctgccttacaaattcataaccaccagatttgtccgtcagcactttattcatgttttccctgatttttatcttctcaccattttacctcttttaacaggagcctgagcacaaggtttaatgaggaagctggggctataaatatgtgtgtatatatgtatatgtatgtttgtacaaatctccatgatgtttgccaagtttgaatgcgcaaaacttggaaaatgtgacaataaagaataaaagtagtaactc

SEQ ID NO: 245295 - DNA, 187 bp, Homo Sapiens
gaccatatgctcaccgctccggctaattttgtatttttagtagagactttggagtttattctgagagtaataggaagccattgaaggattttaagcttggagaagattttcagatttgccttacccagactattgtggagagtaatatggagcggtggagcatcatctgggatcctctagatcaccc

SEQ ID NO: 245296 - DNA, 365 bp, Homo Sapiens
ttggccaccgttcttctctacctggtcatgcactccaggtggccccaggtgaggcagacgtggcgtgggcaattcttctcattttacaatgtagggaaactgaggcccaggtaggcaagcctgacttgctggagtcacacaggaagttggcagctctgccacatccctggggtctggagcccctgctctggggaaggagaggtggggcgctgccttcccacagtcccctcaagctggcagggactgctgtacccccagggtgagaggagaactaaaaggagcggaagctggcctgggtccggggagagccctcgtgtttgcccaaaagggaactggagaagggtggctgggcccatacgcaggga

SEQ ID NO: 245297 - DNA, 189 bp, Homo Sapiens
tggcaggatagatcttgattctcttcaaggcaccagatcccccaaggtgttgcctgttccttctgcacccgagaaagttaggatatatataatataaatggctttgatgacatgccactaacgtgtgagtgatcgatgccccttaattccctaaataggagcggtgagcatcattgggatcctctgaca

SEQ ID NO: 245298 - DNA, 483 bp, Homo Sapiens
ttctagaggatcccacatgatggctccacgctcagatccagaaactcaggctttattccagaccttctgacacagactgcattaacaagatcttcagtttattgtagacgttacaatttgagcagtaccttctaactcaatgtgacttttccatctgaaaagtttacacaactctttctgtatgatgtaaatataccactcaaaaatgtacatgttagtgttcatgtcttcatcatctggaaaagtatcatataaatactgatattttggatcttatgccaatctcttttctcagagttagagtatattttcacagagtagagaatatttctgtgttgaaggttattagataatttcagtcacccctataagtaagacccgattatatttactcttatttcaccttgagtgaaacttaaaattctgcccacggggcacttggtaaatatgtgtgtttgtttgtgtttttcaggagcggtgcct

SEQ ID NO: 245299 - DNA, 493 bp, Homo Sapiens
gagccatgaagggtagggctggaccaagcaagtctgccagcaggttccctgatggcaggcacaggcactagtgccaaaggagaatccagtgggtggtcaccatgtacccagaagtgtgcctacatgtggagctgagaaaccttggcttcaagatctctgcatggtaataggggcagctgaagctctatctaggagagtgggtgctcttgatacctggagatcttcctaggcatggggccgagacagcacccctgcaccgagatttctgcatggcaggggtggtatgactcaggctgctgaaccagggaaacaggtgctctgaatgcctcaggatctgcctggacatgaagcagagagggtctcactgcaccactatctatgtctaggaatggtggggccggtcgggctgttaaatcagacaagtgggcactcccaatacctggatatctgcctgaccatggagaagaagggatcacctcaagatctcttcaca

SEQ ID NO: 245300 - DNA, 533 bp, Homo Sapiens
  misc_feature (14)..(14): n is a, c, g, or t
  misc_feature (24)..(24): n is a, c, g, or t
  misc_feature (43)..(43): n is a, c, g, or t
  misc_feature (63)..(313): n is a, c, g, or t
  misc_feature (321)..(344): n is a, c, g, or t
gctgggtgcccaanaagccctgtntcaaaaaaccaaccaaccngcccaagcccggtggctcannnnnnnnnnnnnnnnnnnnnnnnnnnnnnnnnnnnnnnnnnnnnnnnnnnnnnnnnnnnnnnnnnnnnnnnnnnnnnnnnnnnnnnnnnnnnnnnnnnnnnnnnnnnnnnnnnnnnnnnnnnnnnnnnnnnnnnnnnnnnnnnnnnnnnnnnnnnnnnnnnnnnnnnnnnnnnnnnnnnnnnnnnnnnnnnnnnnnnnnnnnnnnnnnnnnnnnnnnnnnnnnnnnnnnnnnnnnnnnnnnnnnnnnnnntccatccnnnnnnnnnnnnnnnnnnnnnnnnctgtaggggtggggcagagggacaaagatgggactaaaggagcccaaaagacaggaagatgctgtgtctcatgcctgtagatgctgtgtctcatgcctgtagttccacctactctggagagtgaggcagaagactgcttaggcccaggaatttgagtcgagcctaggcaacatagcaataccccatctc

SEQ ID NO: 245301 - DNA, 162 bp, Homo Sapiens
caccgctccgtgtagaccatagtataaaagaaaatctagccccttcttcgggcccgagagaatttcgagcgttagccgtctctcagtcaccggctaataaaggactcctgaattagtctcaaagtgtggcatttctctataactcacttggttacaacaagc

SEQ ID NO: 245302 - DNA, 164 bp, Homo Sapiens
tgtatatgaccaattagataaagtgaaattggtctcataggagttacgtacaggcaagtacaagctctgactcaaaaggacagctactactgagctcctattttcaaacaaaaccacaaattagtgttttcatatgtatgtcccattttaatctgccgaggcgc

SEQ ID NO: 245303 - DNA, 233 bp, Homo Sapiens
cccgctctgaagtggccctttcagaccatgtcattggagtggagagagcaagaggaaaatggcaggtggtgaggacagagtgggcacggcccagaggaatgcagctgagggagcgctggaaagcccttggctttaagtctcagctctgagcagagtgacatgatctgacttgcattttggaagggtcactgtggcttgctgagtgggaacagcctttgtggagcggtggagca

SEQ ID NO: 245304 - DNA, 329 bp, Homo Sapiens
aacagaccaagtctatatgattatcaattccttttctattatttgagtcaactagatcacaatctaagccaagcaaaagcaaactagttgaatgaaggattttgtgtcctttcttgcatgtagctttttggagaaagattgaatgggcatggcaagagctgtccactgcacagatccaatctccagacgtaggatactctctttatagctatccctggttttgtaacctgagataaattccatagaatagccttacaatattttctcgcagagctgatatttacttcagctttaaatatacagtcttacaccacatcacgttttgctta

SEQ ID NO: 245305 - DNA, 204 bp, Homo Sapiens
  misc_feature (53)..(53): n is a, c, g, or t
accacgcttgaggctctgtgccttggcacaaacacagattgaaagtctacatnctgattgaccctgtttaaaatgccttcctttacttctgaactgttgataaagagctctatttgtttgtagaatttttccttaaaagtggggcaacagaaattatttcctgtccagcgtcctatttcaagaacctgtgcgttctgatcaacc

SEQ ID NO: 245306 - DNA, 304 bp, Homo Sapiens
acagcagtgttagcagaacttgtgactgttaccaaaagaaatcacaggcatttcctatcacgttatcttccagcaggcaccttgaaatgtcatttatgctcatctctgcttctaagtcacagtggttattaaagctgccacaggtgattttttacttaatgcattcatgaagaagcacatgaattgctatgtcacagtgtgaaaaaatattttgatctctgtattactatgcagagttggattcctttgtcctgcacgtgtctttccttctgagaagggtcctaggcggatcctctagagcacc

SEQ ID NO: 245307 - DNA, 455 bp, Homo Sapiens
aagttcttattgtcgaggggcaacagtatgcagttgttggaaccgtattgctgttaataagaattatccttgaatattgccagtgtgtggataacatcccatctgttactactgacatgcttactcgtctgtcagatttattgaaggtgctgaacatgactgaggccacttaggtcaaaaaacctggcctggcttcaaatgtgcatggaaggaattctctgaactttacaaagttcatctcgctaagtgcttcaattcaagaagttgccagttagttcttggagctggtgcactgcaagttgttgaactaaccgccatttctacccgaaatatgggtcaaacttcttgatgcctgcaaaacactgcccactaaatccgtgttaacggtgacaccggtttcctcttgtaaacccccggccagtgaagccgtattcagggttatagttgtttcttga

SEQ ID NO: 245308 - DNA, 219 bp, Homo Sapiens
ctcttcttctttttcgggggactgggggactcctcccaagatcacattttagcatctttctctcctactccatttagaaaaataagtaacaggtgaaatgtggtctcagtgttaacgggataattctgctacgcgctcctccctgatgattctgaaatgctctactgaacgagctctgtgctggtcctttctacactgaatgtggatcctctgtgtaac

SEQ ID NO: 245309 - DNA, 818 bp, Homo Sapiens
cgggtactggcaatggttttcggctttggcgctcggggtgactcttctcaaatgccttctcatccccacatagcaacttcagagtggacgttggattacccccctttctttgcatggtttgagtatatcctgtcacatgttgccaaatatttgatcaagaaatgctgaatgtccataatttgaattactccagctcaaggaccttacttttccagagattttccgtcatctttatggatgtactctttgtgtatgctgtccgtgagtgctgtaaatgcattgatggaaaaaaagtgggtaaagaacttacagaaaagccaaaatttattctgtcggtattacttctgtggaacttcgggttattaattgtggaccatattcattttcagtacaatggctttttatttggattaatgctactctccattgcacgattatttcagaaaaggcatatggaaggagcatttctctttgctgttctcctacatttcaagcatatctacctctatgtagcaccagcttatggtgtatatctgctgcgatcctactgtttcactgcaaataaaccagatgggtctattcgatggaagagtttcagctttgttcgtgttatttccctgggactggttgttttcttagtttctgctctttcattgggtcctttcctggccttgaatcagctgcctcaagtcttttcccgactctttcctttcaagaggggcctctgtcacgcatattgggctccaaacttctgggctttgtacagtgctttggacaaagtgctgtctgtcatcggtatggtcgcgtaattcaattat

SEQ ID NO: 245310 - DNA, 453 bp, Homo Sapiens
agtctgagaagtttgctgaaggaccacttagatggtgaagccagcagggtagagatgtgatagaaatacgactccaagacagtcaatattcttcaagtaacagacaatagcatagatacggatggatcggcctcacataaaaacaatgcccttactgaaatgcacgctgtttggggaatggatcacatctcactcacacctaacaaggaaatgactgccctctcgcagtgtgctgaggatttccctagaagactccatgaggaaaagacaggcatgcatatacattctagaaaatgaaaatacgttagtgcaaggcagactgcaaccataactaaccaccatgtgaattctttagttataagaaggagcttacatataaagttaccagtgcgtaagtgggataggtttcggctggtaaatcaacggccgctgatcccgtaatcatggtctatg

SEQ ID NO: 245311 - DNA, 504 bp, Homo Sapiens
  misc_feature (61)..(61): n is a, c, g, or t
acattcttttcatagctggtttgtatgcatggcgtcaaaccttcacctctaatatgtgacncttcaagaaaacaggatttcagggtttactggagggaggggattagcctaggtctgagggaagaagaacctggaaatgaagtcagtgtttaaagctccttatatttaccagagtaaaaagttgaaaagtttcacttttggaactttttagtcttttgtactgatgccagagtgatctttctgaagtgtatgtgttgtgcttattctttactgttaaaacgatatcatggttgaaaactattagctaattactgagtgttcttgtgttcttactgttttagtaaaattaaaacgatttaagtatttgcgtccctgcctcctcccatgattttcattgtatttctatcatatcatgctatatccttctgcaaatctccatacatatccagttaaatgctttctgaggtagcgcgtctagtgaactcttaataatcatgtaacctt

SEQ ID NO: 245312 - DNA, 413 bp, Homo Sapiens
ggtaagagagggatgcagcgacagcattctcaaagatgaatgctatacaggtaactaagggtggttttgtaatggtttgattatttcccaaatacaggtatttatttgaactgaaggaagatgatgatgcatgtaaaaaagcccagcaaacaggagcgttttacctctttcatagtctggctcctctgcttcagacatcagcacatctatacctggccccccggcgcagcctgttaggtaagtccagagtggaccagtggcgttgttcagcctgtggccactacgcagaattcagcgcataatgaattctaagaacgatacatgccctttggagtctagagtattcagggagctagtgagtctctggcgtgaatcgccgcccagtgaatccgttatcatggtgaaccttttcc

SEQ ID NO: 245313 - DNA, 340 bp, Homo Sapiens
ggtgttagaggataataagaagggaagtgtaaggtaaaaattggggcacatctataatgctgttaaaaacagacataactgaaaaatacaccggagaagcaaaaagtaccttctccttgaccattctaggggtgttgcagaagaaacagactttaggtgaagcatatatgtgagtataattatgttgcgcttgcttcttaatgaaagccatgtcaatgaaggactaggctcaaggtagagacgctgataatgttgagtcagctctggaatttggccctgtagtaagtatatagagatgccctatgatgccgtaatcctcgtgtaacctgtttcctgttgt

SEQ ID NO: 245314 - DNA, 144 bp, Homo Sapiens
ggggacagctcttttcttggtgcttcttcactgtctcccttttgtttgcctctgtgtaccacaatcttctggttttccatctatttctcttacctctttctcactctttatctctcatctgaactcagttctcttgtaccttca

SEQ ID NO: 245315 - DNA, 240 bp, Homo Sapiens
ggttttagagtttatgtcacctggtgctttggctgtggtggggttcttgcagatgtgtgaaatgggaatttttgagctcataaattttcaacttgagtttagaacacttttttgtatggaaggccacttatttcatgagttttagttctgtattatgaatcataataatgcaagactaaaacttacagactgacattcaacagatgttgccttctcgccagctagtgtgttctgccttgc

SEQ ID NO: 245316 - DNA, 602 bp, Homo Sapiens
tttcatttaaacccaaaaagaatttttttggaggtagttattattatctccataactcaggagtttaaataacttggtagcaagaagcaaagtggattagaattaaggcatctctagctctaaaatccatgtcttcttcactggaaagacacatcaaccatcaataaatggttaggcaccaacagtgcatacagttgaataatgatacaagatacaaggccaatgatgctgggcagctaccagccttctttgcaactcttatacatgcagtgcttaaatgctttatcttcactagactttagtgcagccaccaatcagtaaagacccaatacttcactgaggagtctcataattatactttaaggtgagaaacatacctatgagtagaaattaagttaatcatgaagatcaactcctgtgtgatattaagctgggatttcaacgaatttccagtgtctgtatctcatgggagatattgtggtagagaggaaagtgaactgaagctaatgtttttttcaagcttacatttgaatcccatctctgccatttgatggtcgggagactatgagtaaactgcttgtcctgatatgctacgtcggaga

SEQ ID NO: 245317 - DNA, 875 bp, Homo Sapiens
ggggtcttccgtcgcagagtttcgccatggcccggggccccaagaagcacttaaagcgtgttgcagcgccgaagcattggatgcttgacaaactaacgggtgtatttgcacctcgtccatcgacaggtccccacaagctgagggaatgtcttcctctgatcgtcttcctcaggaatagactcaagtatgcgttgactggagatgaggtaaagaagatatgtatgcaacgtttcatcaaaattgatggcaaggttcgagtggatgtcacataccctgctggattcatggatgtcatcagcatcgagaagacaggtgaacatttccgcctggtctatgacaccaagggccgttttgctgttcaccgcatcacagtggaagaggcaaagtacaagttgtgcaaagtgaggaagattactgtgggagtgaagggaatccctcacctggtgactcatgatgctcgaaccatccgctacccagatcctgtcatcaaggtgaacgatactgtgcagattgatttagggactggcaagataatcaactttatcaaatttgatacaggcaatttgtgtatggtgattggtggagccaacctcggtcgtgttggtgtgatcaccaacagggaaagacatcctggttcttttgatgtggtgcatgtgaaggatgccaatggcaacagctttgccacgaggctttccaacatttttgtcattggcaatggcaataaaccttggatttccctgcccaggggaaagggcattcgacttactgttgctgaagagagagataagaggctggccaccaaacagagcagtggctaaattgcagtagcagcatatctttttttctttgcacaaataaacagtgaattctcgttt

SEQ ID NO: 245318 - DNA, 530 bp, Homo Sapiens
atcattgcctgtgttttgcaagtttttatttgacagtatttccctcccgacttgttttattttaggaataatgcaaaaccacccttcgtcgggtgatgagaatagccgtatgataagagaatttgctcatcgtgctttaaatgattaactgttttaccttatttagtatttcatagactttgcatgatatggtacactcctaattatgcattctttggtttccaaatcttaatctaagatactttgttaactgactggtagcctaagaaagagacttttcttcctgtttttctctctccccattttttggggtaagttttgtaaagatcagtgctgcttctcatgactctaaagtaaagctcttttggatagcacagcctaactttacagctagacagaatgggcattaagaatatttccaaaatccaagtttatcaaaattattttgtgggacatcatccatctatcttattaatgttatgtgtttacctttggacttattttggggaaaactgttcacattgggtcct

SEQ ID NO: 245319 - DNA, 1380 bp, Homo Sapiens
  misc_feature (24)..(24): n is a, c, g, or t
  misc_feature (86)..(86): n is a, c, g, or t
  misc_feature (113)..(113): n is a, c, g, or t
  misc_feature (1262)..(1274): n is a, c, g, or t
taaaaactcgttccccaatggcanaaccttgaaaacacaggtcctccctcccccccaaagggcagagctggaattaaagtgcaccnagctccttctgttcctctgcagccccnagatcttgctgggtgccccagggaagcccggtggcgggggctggaggtggggtttcctcccttcccccaaccaatgattcccctccccacccaaccgccggcatggatcatgaaagactgggattggatttggggcatagaaatactagctgtgttttggttgaaaggcattccccaggaccaagtcattttagagcagatacggcttggtttcttggtgtctggcctcaggttgccttgaggaagagctgatgagttgacggataaggatgcatatgctttttgacccactcactagaacagagatcagtaaactgtgtcctgtgagtgaaattcagctgggagcctgttaaataaatcttcctggaagggagccaagccctctcgtttgtgtgttgtctatggctgcttttgtgctaggacggcagagttgagtagtttcgacagagacctcacggctcgccaaactgaaagtactggattcagtatctggccctttgcagacaatgtttgctgaccccctactccagaagagcccagcccagaatacccggccactccctacaataccagctcctgcttgagaaaggataggctttaatttgatggccaattaggaagaaaaggcctatttaggtgatgttttaaataaccccaggaacccactgctgagacttttaatgaaatgcctcactctcctgtcctcgtatttttagttctgtctcttctctctgcctttatttgtccccttggactcctctccttattgctaaatttcccattaggatctggaaaatcctgtcccttagagattttcagcagtctccttgattttatgtaaaaggtcagcatttcctgatgggaattactaagtagtcttcattctcttctttcctttcccatcccctcacatggagaagccacggtttccagctgggtctcctggaatcgcccggacgcagctttacccatcttggctgagggtcaaggtgagataacggaatcctaagggaaatttgtccaatgtactcccccggtgtgtattttcctctgggtataaaggtttccccccagtgggcacggagtccatgtcaggcagtcagatgtatggctatgtcgctgtttgatagctttttaaatcggactttnnnnnnnnnnnnntcagcctccaaggatgggctggatattcttttttggaccccctttgagctggttttaatgacccagttgctttgttttacccagttagttagggagacaatgcaat

SEQ ID NO: 245320 - DNA, 417 bp, Homo Sapiens
aggtgtgtgccaccgtgcctggctgtggagggttcttcagaggcagagccctgggttggtttgaatccttcatgctttgtgctgctaccttggttcacttagtacagaggccagggggagtggaaagggagaagtgagatgatttgggggcttcctgggacctgtgtactaagttgataggggctcgttttcaatcctgtgttgtgtgcctccacaggaattgaggcatcggacctgtccagtctgctggagcagtttgagaaatcagaaggtgagggaccatgggtagttttgctccaactctttttttggtgatacttttttggccccacccctgtagttgcttaaactagggtgagaggggacacccttacgccactggagcagacccctaagtggaagacatgcatcgaatcc

SEQ ID NO: 245321 - DNA, 1171 bp, Homo Sapiens
  misc_feature (936)..(946): n is a, c, g, or t
cctaccaaactataatcatgtggctttaagacaatgaagttttagaatgaaaaactgcaacacggtactttcctttggttaagaaatttaatttagtactaaaggtttaaagcagagtgttctgtatgtattatatctattcctaaatacaaaaattttcttccaggtaactttaaaattaatttgagacataaagttccttcagaaaatcaagagtcctgattgaacaagggaatcatttatttatcacctataatagacgagaagtctgactggaaagtattttaagattaccaaagtgtgtcgcaaggatcttcccttagacaatctcatggttcaagacaattgtccattctacctatttagtcctgtggttctctacattagacaaaggccaccgaaatatcacacatggagaacttgatgctcagcttccttgtaaaagcttgtagccttaatcagcttatacacaggataaaaacaagtagacaccggagatgaccttagtggcaaaaagcgacatgagacaatggtacagtaacgaaggtctgtacccaaaagtgtacgttcttatccttctggcacttgaagcgaaatctttagccactcggcctgacacctaattggataatttatgtcaatttatatggatacaccttcctgggttttcttttgattagagaattgcaaaacaaaaacattaggaaaccattactgtggcagaaagtctaaaaccagatgacataaaccatacctctggttggttgcatcagatcccacatcaagactaaacccaaactgatccccacaatttcttgtgattggtgaggaactataaatgactcccatccaagcttataccagaaaaaaggagcacattttctacaaattatatcatttttaatccattaccacattattttaggggaactaccnnnnnnnnnnntagtggcttaacaagccctgaataacattatatattttctcatctgttttatgaaattttatcaacctacctaacacagttgtagtgagaaagactgacatacttactatgaagcatttagggatcttaggaggaaaagagccaaaaagaaatcaaataaatggctatttttctctcgtttttcattaacataagatcgtaagtatgacagatttttatgtttgt

SEQ ID NO: 245322 - DNA, 386 bp, Homo Sapiens
atgagccaccgtgcccggccagggctgagacttttctggtccaagacctagatctttggtttcaaatgagagttatttctgatgtcatccattcaataaatatttattatgcgcctgttctgtacctggccttgtgccgagcagtgctgaggacaggtttggccctggggttccctacctagatgaggaggcagacacgtaaacaataagttaaatatgggattataaaatgtgataagggctatgaagaaaccttggggtcaatgatatttaataacagggtggggatacgagaactagtgagatagaatgggaaggaaaattccctttttgtttttggaggcagagtctcattctgtcgcctacactggaaggacaatggcaat

SEQ ID NO: 245323 - DNA, 925 bp, Homo Sapiens
tgctgcaggtgactccaaggattcgattgcattgtcttccaaatgacacttgtttacatgattgaagctgaaacaagaaggcagcgtgtcaccttgtccagcgtcagctgggaatgtgtgttgggcaacttagaactttcactgctctgtgcatgtttgagaaagcaggaaagcaccatgcatattgattttggggttacacgtaaatttctgcaagttaggtgaatttgcaaatacagaatctgtaaacagtaaggtttgactctattaatgtcaataataaaacataatgagaaaaatatgagatattgcaatacacagaattcaaatagggcaatgggaaggtgcctggggcgggtgctacagattgggaggtcagctgaggtgtctctgaagaggtttcatctaaactgagatctggattacaaggaggagcctgtcctgtgaagatcagggggaagggcatttgaggtgggagtgagtacaggcagggcaaaggctccaagacagaatgagtttggtgtgaggaaacccaaagagaccactgtggctgccagaaatggagagctttggaggcaagtacaggcctggtcactagggccttgtcggctggagtgggggtaaggatttgtgctcagtgagtgattcttgctatatttctccgtacatgttgcggcatttttttcattttccctgccacacttcctaagtggaggtgttgctttttacttctttgctcttttttggtgtcctagacacagtagcccctatatgtgctgagtgacaccaagctttcggcttctggtgctgtaacctttccttccttctgtgaccattgtgaatgaggatggagtatgaatgggtgatataatgagagagagtctgcattgtattgtattggtgtggtgggggtgctgaggtaatg

SEQ ID NO: 245324 - DNA, 733 bp, Homo Sapiens
acctgtttctccctttcctgtttgccacacgcccatcattagtcacttgtgacatcccagctcaccagcgtcaagagcctgggccctatctgtctcctctgcttgacccaggcttaccccagatgtttagagaccctgcctaaagcctccttccttcaggtcttccctcaagttctttctccaagaggccttccttaattaccttgaatatatattgcaaaatgtacagaaattaacccttctccctcacctccataccccctttccctgttttattccttctctttatcagttatcactaaaataaacatagttcatttatttatgctattcactctctgtcttctccacaagagcatgagccccacgagtcaggaaactttgttttcctattttgctcattcctgtgcctctatagtctaaaattgggcctagcacacagtagatatctaatgaatatatacttaaatggacaggtgggttattgcaatggacctataaatggtgctactgcatcttctctaatgcactttctaccaaaatattcatcctaaattacaagttgaaaatcgccaccttcctcataatttgtcagtaactacatatgatttattaaatagcatctaaaacccttaaaaagttctagcccccatctccttttccaatcgcctttcccaatgcagtgatctctccatacatcctaaggtatagtcacgccgaggaagacaatggg

SEQ ID NO: 245325 - DNA, 596 bp, Homo Sapiens
aaggagaggtcactgttgtggaagttttacccactccatacttttgtttggatatgtcactggtttgttagaatatccatggaaaccacattgaattgacagataatggtcctttggtctgtattttcatccttatgtttattcttgtagaaaacaatgaattcaattcactctgtctctcatcctacatttattcctctgctgttttcactgaatctcaaaatctttatatacaacatggggcctaagaaggatctgaagagttgttatgatttggccatatcctttcttgactctcatacaaaaggtgaggaaaaaagaatgtcatttagagtggctgtgtttttcctggaccatcttgtacaagaatccagttcctgctgaaattctgacaacccttgaaaaagctaaagcctttaacccaagttaattttcttgctttgctaagaatgataatcttgtcataaatgctatttaaaattttaacatttgagctaaagtagcacataggaggtagatttttacaaaaatgaaatgttattatctaacattttttataacttgaaagtgaatgagcttattttgtctaaatctta

SEQ ID NO: 245326 - DNA, 662 bp, Homo Sapiens
  misc_feature (45)..(111): n is a, c, g, or t
cgtgttcggcctattcaaccttccctccttcctaaccccagtacnnnnnnnnnnnnnnnnnnnnnnnnnnnnnnnnnnnnnnnnnnnnnnnnnnnnnnnnnnnnnnnnnnntaattctttttatagctttctttccattccatggttacctccctagacagacacttaccaccttctctcaggagtactgtgctttgtttcctaagtgttctccaggttccggcctcacctcttctcactctgcactactctgcacatggctgacatattcatctccccaaagcagcactattaccatgtcacttctctatttcaaagccttctgtgaccatctttgcccatcccttggcttagaattcaggatcctcttcagcagggtcccagcctgcctttagggttttatttctgagactgcacaaaagacacacctgctcaagcccacaaacataccataagattttctacttctgtgcctctgctcaagcccttctcctcaattgaaaggctccttcactcttcccaaatccaaataacatctctggtgaagtctggcctcctctaggaagtttcttcctgttaccccactcctcaatgttttctccatctccaccctcagggtcatgaccattcatttgggactcactggctttcctacctttgtg

SEQ ID NO: 245327 - DNA, 259 bp, Homo Sapiens
  misc_feature (141)..(212): n is a, c, g, or t
atcaattttcaatttttttgagagagcttgagaaacactggtgtttattctttaaatattcggtagaattcaccagtaaaggcatcaggtcctgggttgtttttttgggcagtctatgactgctgattcaacttccttaannnnnnnnnnnnnnnnnnnnnnnnnnnnnnnnnnnnnnnnnnnnnnnnnnnnnnnnnnnnnnnnnnnnnnnnggttatctaatttgttggcatatgattgctcatagttgtcttacatg

SEQ ID NO: 245328 - DNA, 637 bp, Homo Sapiens
ccgatgccattgtctccccaatggttaaccccacgaacttctacatctcaattgatctgactccattgtaagttgtttagccaaaaatcttagttattcttgactcttttctttatttccattccacatttaatctacaagaaaatctcattggctctaccatgaaaatatagccatattttgaccacttcccattacttttattactatcactttaacctaaaccatcgtcatctcttaccagattcacataatatactttcctaataggtacccttgctcctatctttgcctgcacaatgtaatctcgacagagcaatcagaatgatcctttcaaaatgcaagtcagattatgtcactcctttactcgggatgtgtgaaaaacttgcagtttctcctgttttactgagtggagtcctacaatgaactaaaaaccttccaagctctttcttctgtcctctttatttctctgacctcattttctctttcttccttgctcattctattccagacacacctgactctttgctctttattgaacagcacaggcctcagggcctttgtataggatgggatttcctttgctgaggttgcgtgttgcccaggtagatatgtggcaactccattatctggaaga

SEQ ID NO: 245329 - DNA, 666 bp, Homo Sapiens
gatgactgagtttcgattaagtgatttagcaaaaagtatgagatcgtttgacaggtggcctgaatggtaatgttgtggagtgctgcctgaaaaatatagggcttgaagctggtgatgtaaggcatatgttgcataataaggaggaatgtgttttaattcagatttgatgtagtgagcgatgtttctgtattcacaagttccatacttaacataaatgaacctacttgaaaactatttcgaagcgataattcagtaatttcctgttgcaaattttgagaaggtcaagttcgtacatctaacataataatccataacaatccatcaaacacaataatccattgatgattatcaaacataatcatccattcatgattttaagaactctcagaaaagttgtagtgggagaacttgataaatttgtatctgtaaaacttgagaaagagcatctacaaaaatcctatagctaagattattcttaatggtgaaaaactgaataattttcttcctaagatcaggaacgggacaagaatgtccactcttgccatttttattcaatataataccaagttctagccagtgcagtaaggcataaaaaagaaataaaagacatacagatcagaaagaaagaaaactgtcccagtttccaggttacatgactgtttacct

SEQ ID NO: 245330 - DNA, 620 bp, Homo Sapiens
gcgcggtacccgattgccatggtcttcctattccttcctccctcctgtccagtccccaactattcaccacacagttgccaggaagtattttagagatggagatcagagtttgacacagcctgcttagagacatttcagtggcttctcattgcgattgaaatgagacccgtactcctttctgtggtctagtagacactgtatgatctatcaatccagctgactctgtttacacttacgatcattatctactgtgaccttaggtcctcagaacatgccagagactttacctgtagcctcaatgctcactgttctctctacataaaaatgctctttccgctactctccatatagataaatccttatttttcaggtctcagtttaggtgttaattcctcatagggatatttccttacaaacctatctaagtagtctctcctgtcatcccctagcacaaccagtacttaccataatctgtagttattgtttgtttacttcttaatcatctgccttgcctgaccggtgttgtatctgtgttactggtcattgttttcccacagtatgtttacaacatactgtggctattgctcaattaatgcttgttgataattcggcagggaaga

SEQ ID NO: 245331 - DNA, 219 bp, Homo Sapiens
ctccactggtcaaaccagccacatttctccctcactacctatcatcatgcaattattccttaagttatattaccacgactctcctaaacgtcccaaagtctattattaagtctaacaacttagcttcgaacctcaacccaagcatctgacaacacactgaaatgtgcaagcaagagtccctatggccgggtgcagtggctcttgcctataatcacaaca

SEQ ID NO: 245332 - DNA, 975 bp, Homo Sapiens
gggggcatggggagcctgacgttttgaaggatgagcttcaactctatggagatgctcctggagaggtggtaccctctggggaatcaggactccgaaggagaggctctgacccagcaagtggagaagtggaggcctctcagttaagaagactgaatataaagaaagatgatgagtttttccatttcgtcctcctgtgctttgccatcggggccttgctggtgtgttatcactattacgcagactggttcatgtctcttggggtcggcctgctcaccttcgcctccctggaaaccgttggcatctacttcggactagtgtaccgtatccacagcgtcctccaaggcttcatccccctcttccagaagtttaggctgacagggttcaggaagactgactgaggccacttccaggtgggcagcagaggcaggccgcagggggacaccactgcgacccctggagccacaagggcagagcagctttctgatagacgcacaggaagacctggccagaccagtaagcagaacacttttccctccagagaaaacaaaaacagaaccaccgcgcaccccccgccggccgcctccccgcccccaaagactccctaatccccaaacctgaccgggaggaggccgcgacgccacgcacagcgcaactagccctggccctcgaccgtcctacacccagacacacttgcagaccagcacgatgtccgggcgcccctcccgtggacgctcaccgcccggcgaaccgggcgcaggctgatatcaacgtcacgctacgcagtctaccagaagcgcggatctgggacatctaatccgcggagtgccccgccccaacccctacataaccgtcctgccgcctcctgccctacatcgtacaaaccaacaccgggcaccagagaccagaggagagtatcgtataacagtgtaatgctcgcacgtcgctgcggtataccacgccggtaatagcagagac

SEQ ID NO: 245333 - DNA, 265 bp, Homo Sapiens
tcaaagcacagtttttgaagaagcatgtaaatggctacttcatggattgctttgtgaagtaactaaagagcttgagtttaatttgaaatccagtagttataaatgtgggtattaaagcaatgttaaatgggttccattgtgcttgtatagtggcaggagaagtgtttatctgtgacatatgaattgtgatagattggaatgatttgttctgataaaccgttgtaatatgtatgttttaaattttatttattgggatatgcagtgt

SEQ ID NO: 245334 - DNA, 403 bp, Homo Sapiens
gtcccagcagttactatacaggctccctcctcttccttgggatgctgctgacacttccttctgatttggtgttagctctgtcccaccacactcaccagctgtttttcccatctctctggttgctgcttctcagtatcttttgagggctcatcctctttgctgtggtttaaatgtctgtccctgcagaactcatgttgaaacttaagcccctggccatgtgtggtggctcatgcctgtaatctcagtacttcaggagccttggggcagatggattgtttgaggccaggaattcgagatccaacttgcccgacatggccaaagtccgggtccaccaagaaataccataattagcccggatctgataatgtgcacctgtagtcccagctacttgggaggctgagac

SEQ ID NO: 245335 - DNA, 332 bp, Homo Sapiens
  misc_feature (104)..(168): n is a, c, g, or t
acctagagtatcccaatcgccacgacaaggagctaggactacaggactgcaccaccaacacctggctactttggtattttttgtagagacaggattttgccatnnnnnnnnnnnnnnnnnnnnnnnnnnnnnnnnnnnnnnnnnnnnnnnnnnnnnnnnnnnnnnnnnatgagccactgtacatggtgtttattaaattcttgactcagtttatgcccttacccccttctcttccacttctcacagacacacacatgtcaaggacctaaccaagttagatgaatcttgtgtctgggtgtagctgctccttgtcgtggcgattgggatcaact

SEQ ID NO: 245336 - DNA, 319 bp, Homo Sapiens
  misc_feature (76)..(93): n is a, c, g, or t
ggttgactctagagtgatcccaatcgccacgacaaggagctgagaccactgacgcgcaccaccacgcccagctagnnnnnnnnnnnnnnnnnnggagatgaggttttgccatgttgcgcaggctgatctcaaacttctgggctaaagcaatctgcctacctcagcctcccagaatgctggggttacaggtttgagccactgcccctagcctaagttttgctaagttcctgtttactacattctaaaattttaaattgaatttctgtttttgggtactaagggtttttggtccgtgtgtttgtttatgtttttgttttag

SEQ ID NO: 245337 - DNA, 336 bp, Homo Sapiens
cttcaactttgttaaatcattgtttgttcaatttaaatgtagcacttcatgcccacatcatcatccagcaaccccagatccaaggctggaactgaggcccctgactgcaaacatttacacacatcctcaacctaatttcgtcaaagtagtttgtataacccggttttattaaagggtgattcgtgtaccctgagaacacttctcagtttgtctttcagcctttgttttcacccctaaactgtgctctgtctggtgcagaactccatgctgattctcaagtaccaagcagacacgctttgtgtcactatcgtcatgtcagctctgtgtcgtgcgatt

SEQ ID NO: 245338 - DNA, 493 bp, Homo Sapiens
gcttctttcccctgatcccaaaatggctcgatgaaggatcacaggtctcttcttatcatccccatccttactaacatatgtgagattaaatctaataggcaggtggaagtccagctgaattgtagcacattgatggtatctgccaatcttatgaggtacatctgagttgttctagatgctagaggatagtataacaggaaaaagcccctgctctcatggtgagacagataataagtatgtaatacaacttttcaaatagtagtatgaatggtaaaaaaaatagggaaaaggggtgggaggagctgaggtttgatagaatggtcatggaagatcccattaatgagatgtactttaagtagagacctaaatgaagataattttttctctagtactgaactagcactgtacaagtggattgcatataggcatataggcagaacttctctagtactgaactaacactgtacaagtggattgcatataggcatatagc

SEQ ID NO: 245339 - DNA, 411 bp, Homo Sapiens
tgctcagtctgatcatgtagggcaggcggtccatcaactgttggtatgctgggatggcgctgacatggatgtgaccctccagaagatttctagaagtttgaggcaggaaatgttaagcccctcccttaccactaaatagagatttccaatacaagcctatcactcatttttctaaatgttttcaagtctgaaatatatgttagcacttgactctactctttcagaactaaaaatcttatctgtctgcccctacccccaaatcaagaatttaaacctgttcagaccaaggactgtatttcctacttttgtcttttgtccccttttgtgcgaccactctcaagatagtaagccgaattctgcagatatccatcacactgccgccgctcgacatcatctagaggcccagtccct

SEQ ID NO: 245340 - DNA, 706 bp, Homo Sapiens
agggtccacacccaccaatccccaaagtccgcataatacccattaagacgtcttctggggagatccagagaacagtgaccaggctattgccagaagtggatcttgactttgggaagaaaccttccgagcagacggtgtctgtgatggcctctgtgacatcccttctgtcgtctcccgcatcagctgccgtcctttcctctcccgccagggcgcctctccagtctgcggtcgtgaccaatgcagtttcccctgcagagctcacccccaaacaggtcacaatcaagcctgtggctactgctttcctcccagtgtctgctgtgaagacggcaggatcccaagtcattaatttgaagctcgctaacaacaccacggtgaaagccacggtcatatctgctgcctctgtccagagtgccagcagcgccatcattaaagctgccaacgccatccagcagcaaactgtcgtggtgccggcatccagcctggccaatgccaaactcgtgccaaagactgtgcaccttgccaaccttaaccttttgcctcagggtgcccaggccacctctgaactccgccaagttgttaaccaaacctcagcaacaaataaagcaggcaataatcaatgcagcagcctcgcaaccccccaaaaaggtgtctcgagtccaggtggtgtcgtccttgcagagttctgtggtggagctttgactaggtt

SEQ ID NO: 245341 - DNA, 567 bp, Homo Sapiens
  misc_feature (442)..(461): n is a, c, g, or t
tgaggcgatctagaggatccctccacactagtccaaaggaggggagaagacaggatccaataatcgcacacttgcaggaaggtgagatgcacagtttggaggcagcataggggaagggcttttaacctggtccagaagcagctgatgaagtaagcactaaccggaactatcaccaagagtctctaaggcagaggataacaggccatgtgcaaaagtgcggtggggaggaggggatggaaagtacttgggacttaaaggaaaccagtgggcctaaagcagacacagtaaaaggcatgccaatgccaatgcctaggggacatgcagggcccatatcatgaggggctctggaggccgtggtaagaaattttgacttttatactgatagcaatgagaagatatcagagggttcaacaggaagcaataaagttagatgtggctttgnnnnnnnnnnnnnnnnnnnnccattctgccttctgggttaagaacagacatacggcagaaagagaacagggtggatgtgtataggctagacccaggaaatacaggagtcactttgactaggtgtga

SEQ ID NO: 245342 - DNA, 439 bp, Homo Sapiens
acattttagacataagcaatctatcacatcgtcttctcactgtaaaatttcagaattcttctcaacacagctttggaggctgccattgttagttaatccataggcagattatttgctatctttgcagacaattgtgacaggaattgccagttgtcccccaatacccattttccctttcttccttggtaatagtaagtctgtggccaatgagaataaacactctatgtcccaaccttcctagcaaccaggtgtgtccacaggacttactactaaaagggttctgacccttttaatcataaacatcatatcaattatatcaatttgttatcaattaataatatatcataacgattccttctgtcccactgtgatattgtgatacaataagaatgtaggctgggcacagtggctcacacttaaatcctagactttgactagg

SEQ ID NO: 245343 - DNA, 279 bp, Homo Sapiens
actccccagttctttatcctcaagtcagggagactgctaggctctgtctgcatttctcctttgccctgtggtctggaaattctccgatctataagttgaggcagttgtaggtctcaccttctttgtttcccctttctaagtattcacagtccttactacctgaacacagtcatatagccaatgtccgaaaacccttgtttcatatattttgtccagtgttttagttatttcaggcaggaagttaatttgtctcttaactcacttggactaggtgtggga

SEQ ID NO: 245344 - DNA, 689 bp, Homo Sapiens
cacaatgaaacaatgggaagacccagtatgtcaggtcattaaatgaaaagcccttacctgaaggttgggaaatgagattcacagtggatggaattccatattttgtggaccacaatagaagaactaccacctatatagatccccgcacaggaaaatctgccctgtaagttttctaaacattgtagattaagagtaaaatactagtccttcagattttgatataaagatttgtattagcaaggagtggaagtcttagtatttcttgagttagcttgacaataggtttctgttcattaagtattttgcatttccatctccctcttggatattttatcctagagattttcatatttgttaccatttgttcacacagcactaaatgaaactatttagaatttataggtattgtactgcttaccaattagtctctgatttctgattttcagcttctttcattcccttaactttttgacgttaaaaaagctctcattacttatcccccaccccatttctgagaaagtaaccttttgatttgcttatgtgctttatgacttcttttgtgggaaaatatataacctaaagtttcttgtttcatgtgtacagttcagtggcattaagcacattcatattgtggcataatcattacaccatccatctcagaatgtttcatcattccacatgaaacctgt

SEQ ID NO: 245345 - DNA, 1143 bp, Homo Sapiens
  misc_feature (47)..(81): n is a, c, g, or t
accgtcacaaatgaaaaatgtcttttagaaatgaggtggcagatttnnnnnnnnnnnnnnnnnnnnnnnnnnnnnnnnnnntagaaaaagaaatgataacagatggagctacttaacctttacatgttgaatgctgccactgttaaaatttctgagggggtatcatagataaactatcccatagttcatctggaaaaataaggtggtgaaaattgctaagaaatttttgaaagggtaatgtaaacctagattaactgtttttgaaaggtagtacagaactgaatgcacaactagatatcaatggtatgtactcacccagaaaaaagacttcagtacatcacatgtgagggcttaaaacattgttataaagacgggatcacaatgggaaaaggattattcaataagtagggcaggcattctctatgcctgctagggaagtgtgacttgttatactctttatgtacagcaattggcagtctgtgaaacttttaaattcatatacataaccttttgccctgcaattccacttctagaaatttatcctaccaaacaaagcacatagatgtgcaaaagtatgtatttacaagtatattctttgcaacttggtaatgtcaaagaattggaagcaacctaaatatctgccataggtaggataaccatatgctttggctttttgaacactaccagtttatacctgctgttcttggataattattaatagtgctttcattctcaatgtctcactttagataataaattacagaggattggtgaaactaatttgcccaatggaaaaaggaatgaagaagtgctttaggtactgagatgaaaagatctctaaggcataataatgtttattgagaaaagcatggtgtcaaactgtatggcatgctacaattgatgtataagaagaaaaaatgtgtatgtattcctatttgtttgtatatggtagactgtctctgaagacatatatggaagaacctgatcacattggtagtctccaaggagcagaactagatacctgggggataaggatcctaggagctgagccttctcatctgtaaactctcattgtacttcgagctttctaactgttcagaacaatactacaaattagcaacctaaaatcacaacacaacaaaa

SEQ ID NO: 245346 - DNA, 1013 bp, Homo Sapiens
tctagaggatctgcaccacaatgaacaatgtgtactcatcattccctttactaaacagataatcattactgtctaccacagtgaagattcggtttacatatactacaagtttctttgggggggaagaaaaagttgtatggaaactaacaaatttggttaactccttgctatcaaacaaatccagtgtttttaatagttcttcttattagaaaatttctccttgaacatctatattccaaatattccttattctgcccaggaatgataaaagaaataatcaatctctgacaaactgataaactaaagcatataaaacaaatgacctcagacttaacacctttgaaagacccattctcaaataactgcaaatttccaatttaaccactttcattttctaatttagtgccatctttaagttcttcgtatccctcagactatgacacccttaatatatgtcttacataaaccttaatcagtgaaaaacagtattaatttgtggccacttaaggagaagcaactccattctaaattatccaagctcaaggcatctctttttgcccctaatttttgctggcctaagcaatactactttacaaacaggcctggtacctaaacacggtaaaaggctgagaaaatgacttgggaaaccaaatcccagttcactcagtctacaaggcagcaccactgttctggagtgttcctaattatatacagctagtgggcaggcatagtggaaagggctagaactctgtgaggatgaatgcaaggcatttcagaaagactggctagaatcctcactccaattaggcaataccaccagtggctggcaccccactatagatggaggctggggaaactcacccaccacatcctaactttgtctctaactttgttctagatagccatgtatatgtagtaaattgtatcatttacttatattaaaataactatcaggttttttgcctgttatcagctgtgggtcttcatgtcaatcacatcattgtttcattgtg

SEQ ID NO: 245347 - DNA, 452 bp, Homo Sapiens
  misc_feature (294)..(319): n is a, c, g, or t
aattttcctttttgtttaaagaacttcctttaaccattcttttagagtaactctgcttgtgtcagagtctgttagtttttcatcatctgagaatgccttgatttgcctttcattttttggaagatattttttgccaggcatgggattctgggttgacaattattttttcagcacgtgaaaaatattttgccacttccttctaacctttatggtttcagatgagaaatctactatcattcaaattgttttaccctatagctaaggtatgatttctttcttgctgctgtcaagaannnnnnnnnnnnnnnnnnnnnnnnnnagaagtttaattatgtgtcatggaacatatatctttggctttatcctttttggggttcactcagcttcttgaatctgaaagttgattctcttgccaaatttgtgaatattcatctatattcttcattgttcat

SEQ ID NO: 245348 - DNA, 633 bp, Homo Sapiens
acaatgaaacaatgttttttcaatgacactagacatcaggtgacaaaagatagtgttcgagagatggtaaacgtgaggtgagccctgcaattgcttagcttacagacttgagagtttatcaggtcatcacacagggaaggagaactaagacaagagaccagctgacttccttggttgtaacagagctaagtccagaaagaacaaggtaactgcagcttataaggaagggtaccagagagagagttttgcacagagagagaaccccggagatctgcagaggaacccctggagtatgtagcagagtacatcagcatacacgtgtgacataatcacttgcttctagggaaagaaccatctgaatgcattggaatagtgcttgacactcagacagggccaagaacaatgcctgttcagaattcacaggtcattgggtagaggactaagcaaggtcttgcctcattagaggggaaaattagccttagattgcacactgcctaatacccacctaacagggcataacagcaagacttgaatgcatcaaatggttcccaagtagcttttattatttaattttcttgagatggaatctcactctgtctcccgggttggagtgcagtggcaaatctcggctca

SEQ ID NO: 245349 - DNA, 305 bp, Homo Sapiens
attcacccagttccttgaagactgcttctcacacaataagagctcaacaaatagttgctggttggctgaatgaatgaatgaatgaatggggttcaacatacaatggcagatggtgatcccttctgggaagctcgaccaaagagccctgtgaggggtcaccacagggatcacattgtggggtagagttgggaatctggtcttatcaattcccatggccccaggttagtaaggacaaacctagcactgacattgccacgccttcactctcagcaggttcacaaagccttctgcacacttgctggtat

SEQ ID NO: 245350 - DNA, 168 bp, Homo Sapiens
gctgtttttctcaactgtcagtggaattattgtcttcctgtctccatatttaggtagtgtcagtggctgagtatcaccgcaggatcgatgctctaaatactgaagaactgcgcacactctgcagacgcctccaggtgcccccttctgtcgtcttctcgcagccgtata

SEQ ID NO: 245351 - DNA, 369 bp, Homo Sapiens
caggtgacttttcttcaggagcccagatagggctgagccaagaatactcagttgctattttgccctctagattcaccaatcaggaaagtgcctcctcctctgagagagtgagaggatggagagagccaagagtgttaactcctaaagccatgttccttcataggaacagaaaaggaaaatacctccaattttcttgatatctgttagggataagctaacctccatatctgttcagggaaatatctgttagggaaggctcttcgttccgaactcttggcgttttcttgacttgagtctttgagtgatcttcacagttttatgacattggtcttcctaactatgacatgtacatcgccggggatcctctgg

SEQ ID NO: 245352 - DNA, 484 bp, Homo Sapiens
caaggtagacctaacatcacaaagctgtttcaacggccaatccactgcttaggatatttatacaaaagaaggaagaagcagactacagtgcctttggtacagacacgctaataaagaagaagaatgttttaaccaacgtattgcgtcctgacaaccatagaaaaaagccacatatagtcattagtatgccccaagactttagacctgtgtcttctattatagacgtggatattctcccagagacgcatcgtagggtacgtctttacaaatacggcacggagaaacccctaggattctacatccgggatggctccagtgtcagggtaacaccacatggcttagaaaaggtccagggatcttcatatccaggcttgtcccaggaggtctggctcaaagtacaggactattagctgttaatgatgcagttagagaagttagtggcatagaagtatcagggaggagccttgatcaagtgacagacatg

SEQ ID NO: 245353 - DNA, 300 bp, Homo Sapiens
aagcttaacgagggaaagccagaagatgaagtagagcctgatgatgaaggaaagtcagacgaggaagaaaagccagacgtggaggggaagacagaatgcgagggaaagagagaggatgagggagagccaggtgatgagggacaactggaagatgagggaagccaggaaaagcagggcaggtccgaaggtgagggcaaccacaaggcgagggcaagccagcctcccaggcaaagccagagagccagccgcggccgccgaaaagcgcccggctgaagattatgtgcctcgtaagcgggtccg

SEQ ID NO: 245354 - DNA, 195 bp, Homo Sapiens
cctgatttcacaagtgtggtgttttcccaaggctcccttcccaagctcagtgcaaacctctcactcccaagtttctttgaggccacttgcccccaagcacttcacgatagaccctcgagggcttgtgtccatttggcccttttacaagtttaatgccaatttcattgattttgttccttgccacaccgatcctca

SEQ ID NO: 245355 - DNA, 287 bp, Homo Sapiens
cttaacgaggcacactctctgtctcatctctcctcctttctcattagccccttttaatttgtttttccttttgactcctgctcccattaggagcaggaatggcagtaataaaagtctgcactttggtcatttcttttcctcagaggaagcctgagtgctcacttaaacactatcccctcagactccctgtgtgaggcctgcagaggccttgaatgcacaaatgggaaaccaaggcacagagaggctctcctctcctctcctctcccccgatgtaccctcataagcgt

SEQ ID NO: 245356 - DNA, 690 bp, Homo Sapiens
tttttttaagttgattgcagtctaattgttgtttcataaaagttggatctgttcctatgcccaggatgattttgtgaaccgtgaagtacgtgagactagaagacgcccaaacaagtcagataatagtaactacaatggttgctgatgttgagattattgttgaactataattaataatttggatggcagaatttatctcttttttgtaaactctcataactgaattgcttaagtataatttatagaatttcagtgcagttcattcttaatggaaaatctgaaacctaaattgcagatttaaaaggtactgtacaaccattatatctgtaaataacttagcacctttttgtcacttagaataatatgtactactacttgagtgagcgcttttggaagttatatcaagttctagtgtttgcttcttagtaactgaactgaatttacagttctgtcctagacattttgcactaaagtagccgaatccactctcatgtcttttcgttaatgtgctctgtaccactggtgagtgctccatagtttccttacctgctgctacagaatgttattttacatccctatggctatttgccaaggctacaaaaaaggaaagctatatttgtatgcaacactaaccttttgactgctaatgtatgtttctgcttgctgtgcctcgttaagcttgggatcctt

SEQ ID NO: 245357 - DNA, 427 bp, Homo Sapiens
caccccctcatcctaactttatgaaagaatggatcgccaactccgagaagttgccgcgcaaggtgctgcagcacgtgagtgaccccaggcgcaccaggagagcaccaggggatccgctcgtcgctgcccaggccattgggacccaggccaagggccactaaacacaagtgtagacagctcaccaaagtcagcctcaaacccaggggatgttccaaaccaccctggaggcctcctggtgggaaacttgtaactcagagccagggagctccgtcggcgcgagagctttgttgtttaatcttggattttactcggttggtcctttttttcactggtacgccgtgggccctgccacttatcgtaaccccaagggaatcagccaatatatgtactgagacttcctctctctcttcttgctttaacttctttc

SEQ ID NO: 245358 - DNA, 252 bp, Homo Sapiens
aagcttttaccgcagggcagaaatcaactgagagtatagtcaaggaacagaaagcaagctagtgtggctaaagtatggtaagaaagggaaagagtggtaggagatgaggtcggataattggggtttggtcacatagagtctgtaggtcagagagaggaatgtggagtttttttctaagtacagtggaaatcttttggttttaagcagaggagtgacatgtagggtagagagtggatggagtcgcgcgagtat

SEQ ID NO: 245359 - DNA, 480 bp, Homo Sapiens
ttggtgttgcactccaaagagttgctgtgatttcccggtatctgtctttctggcttgttagatcttctcattggcgtcctttctccgaagagttaaccaagacgttggcatggtttccttgctttcctcctatctttgctgctagagctgctttcgaaaagaagtcttttcttgcagtggtatcttttctttgggttacagtgttgttcatcctttctttgccgaaagaatgaatcccagtgcttcacgaggttaaaggaaagatctgctggtagtgtttagtctttgttctgagctgatatgtgttagtagctttttgtttttaaattttattagtaaaatttcaccagtgaaccagaagctctttttttctgttgtgaaatgctagctttaagatttctgagaactttgtgtcaaagaaatctttgaaaagttactgaagtatatagagaggttcacaattttaaatgtgcaggtggt

SEQ ID NO: 245360 - DNA, 549 bp, Homo Sapiens
tcagcaagattcaggcaggagagacggaaatagccaccttccaggcgtgagtcctggagataaaaatggattttaaccctaggactgccgggagctggccctccgcggctgctcagactagggctgtgtgtgcttgctctcgcctgtttccggtgtctaactggcttgtttctctttatggcttggcttcattccgacctggggtggggccacatccaacccactgcccactggctgtccgtctggcctgccccgcggttccaacccacagtggtgaagcagcgcttgcagatgtacaactcgcagcaccggtcagcaatcagctgcatccggacggtgtggaggaccgaggggttgggggccttctaccggagctacaccacgcagctgaccatgaacatccccttccagtccatccacttcatcacctatgagtttctgcaggagcaggtcaacccccaccggacctacaacccgcagtcccacatcatctcaggcgggctggccggggccctcgccgcggccgcaagcttattccctttagtgagg

SEQ ID NO: 245361 - DNA, 299 bp, Homo Sapiens
aagcttgattgccaagggaaaacacaatagttgtcttcactgtttccttagtgataaaagtagggctgatgttttgaagatatatgagccagatttttatgtaatacacaattttcacaatctgggcagtccaaagattaaatgtactgcttctgtgggtagtgagtttctccattgctagatctaagtatcagatgggtaattagtctttgagatccctactaaacaaagtttataattatgattctagaactttctagagtaaaccataatatccctggtcaaaggcaatcaagctt

SEQ ID NO: 245362 - DNA, 911 bp, Homo Sapiens
aaagatgtaatttaaaatagttagaagggacttggcatgggccagctccgtgcatggcattttcacccccagagcttcctaatcctgttttcacacaggaagtttctaggtctttctagaacagctaggaatagtagctgactcccgcccaaggcccaaccttcaaaccctgagctcttcaggctgcatcctctggtgagctatagaggagaacgtggctcctaaactctagccatcctgtgggaggaaatagacttctttgggctgtggcttgcagaaccaactacactttttttccctctattgtttaaattttatttaataatttgtgtgtttttctgtctttattttctatatttcacgtgttccttcactccctagaaactgcactttctttgaaaccataggtaatgaatcttactaggagaggcatggggatagagacagttctgggagtgtgacctgtaagcctcctgtagggcagtgccaggccttgattgcccacgttctctccgttccttcttccttcatacatttgatcacacagcctacacccagccccgagtgtgcatcacggtaaaagagctgagggctctcttcagggagcagcccatttaggtctcttttgttgttgttagggagaatacacatctttcttggaagctgggagtgtgttctcatttcatgtccattcagacaaagcaccgttaggcaccatgaaatatacagtgacaggacagagacctggctgcaaggtattttatgtccattaggttcaggagactggactttgtacacagaaatgcagagtgaagtggccttgccgcacggacatgttgcgatttcattctggaaacaagttagacctatgtgataatgttagggttcctggagcaagctggatgacccac

SEQ ID NO: 245363 - DNA, 1061 bp, Homo Sapiens
gaggatccccaagcttgattgcctatacatccagttctattttactttccttaaatttttaaaattgggaattattttgaagacaaataaaaataatataacgaaagtaaaatctaacaaattccaaccttaaaaaaagaacaaacaacacaagtacaaacaaaccaaacccagaaccaatgagtggaagcttcctgtttacctatcttcaacacctttcatctttctactttccaacaggtagctactaaccaaaatttaacgtatatcattcttgtgtcaacagagcaaggcttatggccagaaatgaatgaaattcataatgaaggtattctgaggaaatatgatcttactctcaaagtctcaacaataccctgggtgataacaactggctctcaaggaacaagatagctcccaagcaactccagtgcccaggaaagatggtgaagagatctttgcagacaatctatcagttactggggcagaaaaatcattgtgactagtcatcttcatacgatagcttaaaccaacagacagaatttatagtgtagcgaagggcagtctaatgcagtagttacttggatccactcttgctgttttgtgaccctgggcaatcaagcttaagcttgattgccagttgactcacaggagtcaagctcaaatctgtctcctggtgcagtaattttattagaacaggtttagcgggtagattctgggattactaggtgattggtggaaggaaaggggaggtctagaaagtccttggcagtacccagttatctcttcatgactcctcatgggtcccatgttcaaatttgggaggagttaatatgaagcatgtggtggcaattcaggctgtgatgacgctccttcagagtgaactctagttggctatattggttgcaactgatttcagccagttttgttatcttacaagcagaaggagtttcagtgtttcagaaagttgtttcttatctgctatcttgcaaactcaagactttctgttagttactggtttaagtttttggggcatggttttactaacaacttcagtccctggg

SEQ ID NO: 245364 - DNA, 955 bp, Homo Sapiens
aagcttgttgcctcagagggagggagggaggatcatcaggcaggagacgatccaggagttctgatgctgctgctagatttctctcccctgcctcatcttccatgcctcatcttccccttgtgtgttaccttcactctcatctctgagattagacatccttcacacccagagaattcggccaggcttaccttgtggtagctgagagccctagagaaaaaaaaccttctctctccctgggctgaattagaaagtcccagggaagaactctgattggccaggcctgtttcctgtgccctcccctgtgacttagtagaggtggggcctgatgctgtgattgacagcctggttaatcggctaaactcagtaggcgtgtcccatgcaccacaaggaattggggaggaacaattcccaaaggaaggaggttgctgttagcagaagaaaggcaaaacaacctgtgtccacatcatccctcctgccacctctggccctgtgctttcactgcactctgcacacacccccagcagaccccacccgagcttccagggatgatttgggtacttgggtatgggtgactgtccctgccactggacgatgaagtcttaaagggccaagactctggtcaccttggctctcccagccctctgctctgtccctgatcataaactacttttgacgaacgaagaaaacgaaggatcaaggaatagaaggggttgtgtaaggggccaaccaggatgaaaatcttcatctaggctcttccaaccctaccctgcagcctcctccctcaacccacaatcagcaacatatcctacaaaaacatgttgacaaggaaaccatcacccacccctcaggaggcaagagatggccccagctcagtgcccctgtgaggaaagctggacctacattcaaaaccagcttctgtcaaagacacattctgccatcgtgggcaatcaagctt

SEQ ID NO: 245365 - DNA, 345 bp, Homo Sapiens
ctgattgcctcaccctttcttttgagtgtcctttacttttctgtcaaaacttgctctttcctgatttccctgtttttcctgccaagcctcaggagaagcttttcccacatgctgcttatctttgggccttagtgccgagacgtggggggtggtgcttccttcttacttcctatttctttcaaaccattctccctccctccctcctgcgtaaaacaccagctttggatctcacatcaccagagccactcactactcctgagctatttctctgtgattttatctcctaccttattgtctctttctttccagtatcactgcttcctttagttcttggcaatcaagctt

SEQ ID NO: 245366 - DNA, 288 bp, Homo Sapiens
agctcggtacccagcttgattgccctccaaatatacccaatatggtttcagcactgtcatttaactcagcatccccttgtctggaatgcctcttccttctccacttcttctcaactgcctctttgcctactaaaattctaccttcctctaaggccaatgccaaagattatcactttcccagactcttcttaattgactggccccacaagcatgatctcctttttcagcaagctcctgctctttcagcacctgcagtcagccttctctattgcttattcgcagcatgcc

SEQ ID NO: 245367 - DNA, 921 bp, Homo Sapiens
  misc_feature (712)..(727): n is a, c, g, or t
gaagaaattgatgttgatgggaaatttatccgcttgaagaacacttctgaacaggatcaaccaatgggaggctgggagatgatcataaaaattggagacacatcagtcagttataaatatacctcaagatatgtgctgaaggcaggccagactgttacaatttgggctgcaaacgctggtgtcacagccagccccccaactgacctcatctggaagaaccagaactcgtggggcactggcgaagatgtgaaggttatattgaaaaattctcagggagaggaggttgctcaaagaagtacagtctttaaaacaaccatacctgaagaagaggaggaggaggaagaagcagctggagtggttgttgaggaagaacttttccaccagcagggaaccccaagagcatccaatagaagctgtgcaattatgtaaaattttcaactgtcttcctcaaaataaagaagtatggtaatccttacctgtatacagtgcagagccttctcagaagcacagaatatttttatatttcctttatgtgaatttttaagctgcaaatctgatggccttaatttcctttttgacactgaaagttttgtaaaagaaatcatgtccatacactttgttgcaagatgtgaattattgacactgaacttaataactgtgtactgttcggaaggggttcctcaaattttttgactttaatacgtatgtgtgnnnnnnnnnnnnnnnnaaagttcttatgaggaggggagggtaaataaaccactgtgcgtcttggtgtaatttgaagattgccccatctagactagcaatctcttcattattctctgctatatataaaacggtgctgtgagggaggggaaaagcatttttcaatatattgaacttttgtactgaatttttttgtaataggcaatcaagctt

SEQ ID NO: 245368 - DNA, 268 bp, Homo Sapiens
gcttacaaatgacctgcttcacggatgtggaatcctaatttcttctgggaaccttctgtgacaccttcaccaggaacatcaacatgtatttccctgtctgccgtatttggttttcttcccatctcggggacccttttctcttactgtaaaattgtttcctccattctgagggtttcatcatcaggtgggaagtataaaccttcaccacctgtgggtctcacctgtcagttgtttgctgattttatggaacaggcgggcaatcaagctt

SEQ ID NO: 245369 - DNA, 454 bp, Homo Sapiens
  misc_feature (134)..(134): n is a, c, g, or t
  misc_feature (211)..(237): n is a, c, g, or t
cggcacgaggtctgtcagtaaactctttaagcttggtgccgcaaagagtctttaaatgggggctgatttcaagtaacctaaaagactgtgttatcagaggaagaggtcccaaatttggagtaaagatgggaganaataaatatgtgctatttccttggcgagttgggggaatttgccaccttacagagtttgtatcactgaattagctgcnnnnnnnnnnnnnnnnnnnnnnnnnnngccagggctatggagtgggggttgtttgtcaaactgattttcaataattggatttaattttttttaacattgaaaagtgcactgaaaaatggtaaattcttaaatgtgtgtgagattgtcagaatcaacaaaactaggttggtttaaacatatctctgggtacatcaaggggcattgatacaaaccagttttaaagactgtttataaaggggagagc

SEQ ID NO: 245370 - DNA, 220 bp, Homo Sapiens
gaagtttcccgaaggtagtttatttggcaaatcccacacaaactattagtagtccttatacgaagacaatttaattttgggattattactaagcaaattactcacaaatactgagttactgaaatggaaaatatttttatctccccccagtgtaactactgacaagaatgtagatagtgtacttaggtgtatgacagatggaatgactttgggtgaagca

SEQ ID NO: 245371 - DNA, 367 bp, Homo Sapiens
agattgtagtgagctgagattagtaccactgccctgcagccttgggagacgagagtgagacccccgtctaaaaaaaaggtccctgcttaccccactgccttggggaaccccctctgtcccccacacagtctccgtatatgcctgagtctgtgtttggtcttcctcgtctctccacagcaggtctgccccgtgggttgttggccgcggtcggatgctcagccgcttgagaatgctgtctcctgcctgggtgcgtctggctcccctctgcgcgtcctgtttcgtgttatttttttagagtttgtgcatttctctgtgtactttggtacacaaatgcttctgttgaagttaatacgtggcaatcaagctt

SEQ ID NO: 245372 - DNA, 635 bp, Homo Sapiens
attgacactggcatgtacttattaggtatccagtggaaccacatgggcagcgtgttagctgtggcaggcttccagaaggcagccatgcaggacaaagatgtgaacattgtgcagttttacactccgtttggtgagcatctgggtactttgaaagttcctggaaaggaaatatctgcactatcttgggaaggaggtggactgaaaattgcactagctgttgattcctttatatattttgcaaacattcgacctaattataagtggggttattgctccaacactgtagtttatgcatataccagacctgatcgtccagaatattgtgttgtcttctgggatacgtaaaacaatgaaaaatatgttaaatatgtgaagggtctcatttctattactacctgtggagatttctgcattttggctacaaaagctgatgaaaatcatcctcaggtaggtgtttcttgatatcttaagacatagctgggctaactgcttgggttatagttttctaccttttcaagcatggcctctacactggcaagtacatcaaaacattgggtctgttggcactattggtctagaccgattttggaaaactctgtgactccattgatgctgtgtcctgattctttcttcgt

SEQ ID NO: 245373 - DNA, 395 bp, Homo Sapiens
cgcccagctgtttgcatcattttaagggacacgaattatgtctttctggggttaattaagaggagctgccttgtgggactataaaaacgtagacatagaagaagcttctaagcatcagtttaatctcctcattggagaagatgagaaaacatggacagaggggtgaccttggtttgccccaaatcacacagcaaaggggttgaagagctgggatcagacatgtcctgggtctctttcccttaagggtcgtgtaactcagagacctttgtgcttcaacttctaaccaaaaggtgaccgaaaacaggggtctgttgtctcatttgatttcttgttggcctctaataatttccacccgatcttaccacatttggcaatcaagcttgggtaccgagctc

SEQ ID NO: 245374 - DNA, 529 bp, Homo Sapiens
agatggctgcacagcatgtgctcacggtctcaagatgaccaccacagctatgcctcatcatctcaagatcactgctgcagctccaggcatcacagtctctcacagattgtgttcagcgacaggaaggaagaggacaggcaagagagtttctctcttttgaggtgctctttatatcaaggagggggaacagccccttggagacttcttaagtcttattcaccataaatgagtcccttgtcaacctccatttgtaagggaggctgggagcagaagttggtggaatttacagcctctattatgggaggtgggttctattaggagcaaaccacgtggtagataataccatctctcacaggaaatatacatcttgctgtgtagtttaaccacccaccaaactggtcaggaacacctgctgagggttacggtttatgcttagggatgctggaagaaaagcttcacatagtgaagtacccaggagagaggcagtacccatgagccagagattaaaaaccagtgaagaggccaggca

SEQ ID NO: 245375 - DNA, 455 bp, Homo Sapiens
  misc_feature (374)..(397): n is a, c, g, or t
gctcgctgactccatgtaacctgctgaatgggaatactatgtctctgcagtttctgatgggaacagggctggttttcaggaagagctcactgagcatatgatcctccaaggaaaccaagtaaccaagtctcctcaggcttcagcttccctgtctgtgaaccaaggatctggagggaatccttccactgcagcactccagtggcctatgaaatatctgttcccgacctcaagtatgtccttgattgccttctggttaagaaaagctgatagtgtttcaagagccaccaacatggtcagtcagctctttagccactcaaaattcttctttcaaccacagctggattacagttactctgaacatgtttgaaatcacnnnnnnnnnnnnnnnnnnnnnnnnaacgggcaaccaagctgggggatcctcaaaagtcaaccggaaggcttgaaagttggga

SEQ ID NO: 245376 - DNA, 478 bp, Homo Sapiens
aagcttgattgcctaggttgaattttttctcctgggttttctatgcagtgggtattttcaggtagaggctagaaagctttagcctctttcccaaggcttgctgaattgtaggagttttgtcttagaacgctttttctagacactttaagaactttaagaagattcaaacttattacccaaatttcctgtaggctttgttttgtcagtttttgcttctgtcttgcctggaggcctgacacctcctgtcttccaggtaaattgacttcccttgtacatcttaccagaaagatatttaccctaacttgttacacaaactattgccacagtacctgtggatttttaagttaactaacatgggtatttctctttaaaggttttgtgcacagaccaaacaaatcaccctcagtcttcccagcagtcagatgtggtaactgagactaggacggataatataggttgtgaggtggcaatcaagctt

SEQ ID NO: 245377 - DNA, 442 bp, Homo Sapiens
ggcgaagatagagagattgaatcagaggccaagctgcatgctgcactttacgagaggaagctcctgtctctggaggtgcgaaaacgtagacgacggagtagcagattgagggcaatgaggccaaaatacccagtgattacccaaccagctgaaatgaatgttaaaactgagacagagagtgaagaggaggaagaagtcgcattagataatgaagatgaagaacaggaggcttcccaggaggagtctgcaggatttcttagagaaaatcaagccaaatatacaccctcattgacagctttggtagaaaatacacccaaagaaaattccatgaaagttcgtgaatggaataataaaggtggacactgctgcaaacttgagactcaggagctagagcctaaatttaacctgatgcagattcttcaagataatggcaatcaagctt

SEQ ID NO: 245378 - DNA, 864 bp, Homo Sapiens
gggcgtgttctatcgggcagtgctgcagcccttgactctggctccagggtgggcttcctgggggcagcggcaaggaggcagttctggatgtgcaggcacagatgtaggggaacaggcaagcgggcacagggccctgggcttacaagcagtgacccctgcacccagctagatggggcaccccctctctgggagctgagggcatcagctggagcctcaggctgggaccagccccaactttgccattggtgactctgggccattccaggcctcagtttccccagctgtaaggtgaggcattaggcaggagggggtggccccagccagtgtcctagtagcctggtgtctccattagggagacctgagaagctgccaggagaggctctgctagcgcaaggcagggccggcccagcagctgacaaggaacatgctgaatatagaggacagaggagttaagaagacgcctgccggccaggccagagaggggcagctctaagggggtacagcggcctgtggtgctgtaggcccagaaagggtggggatcagcccaagtcacagagcatggccctggtgggcggcgaggggtgcgagtggacaaggacacccctgcagagtcccacccccactctattccctccaacaagggaacgcccagcaggaagcctgctgtctttccaggagcccctgtgccacctagtctgacccctctcagccacaaggctaccctcccgtccagcctgactggaggtagaggaggaggaggaggcaaggccgactgcagtggggagcccgggtgccccgtcctctgtcagcaaatgcctcccttccatctgcctctagccccggcctctgaccacccaggctctg

SEQ ID NO: 245379 - DNA, 452 bp, Homo Sapiens
aaatataagctacggttcagcagcttttaaaatttcatgtttattcatatttttcaaaatatatgtacattaaaaaaggaagatttacaacaggaaagattgccttacatgccacaccaattcccatgaattcatgatgggatcacacatgattatgatctaattcaagcccatcttctcaagtccatttcccagccatactttaggctacagaagggatcccaggagaccaaagtggaatgaataagaaaccaacatcttttgcctctggcagtactcaaggggccagaagatgtacttccaaaactttaagacaattaaaatgtcaagtgccacagggaagagaaatgataaccagaaatttgtatttctagctagtactatttaacacaacttcacaatactaaaacaaatacaaataagaaagggttaggtagttgggcttcatttac

SEQ ID NO: 245380 - DNA, 460 bp, Homo Sapiens
tacccaagcttgattgccgaagtggaaaatgatgagatgcctgctgacttgccttcattagctgctgattttgttgaaagtaaggatgtttgcaaaaactatgctgaggcaaaggatgtcttcctgggcatgtttttgtatgaatatgcaagaaggcatcctgattactctgtcgtgctgctgctgagacttgccaagacatatgaaaccactctagagaagtgctgtgccgctgcagatcctcatgaatgctatgccaaagtgttcgatgaatttaaacctcttgtggaagagcctcagaatttaatcaaacaaaattgtgagctttttgagcagcttggagagtaccaattccagaatgcgctattagttcgttacaccaagaaagtaccccaagtgtcaactccaactcttgtagaggtctcaagaaacctaggaaagtggcatcagcttggccggc

SEQ ID NO: 245381 - DNA, 462 bp, Homo Sapiens
aagcttgattgccaatacatgttgtattttttatcacacagctaaagtctgtaggttaacgttggctgctacttttgagtctataacatctagaccagtgttggtgaatcttttggcctttccccaatgcttgatatgaagatcaccactgctggaggcataatgtacaaggcaggttatagggatggaacttgatggtgacagctaagtctgtcttttttcttaggatataaaggttttcctaggatacatttaagtgttttgcttctcttgggctgaggcaggtcattgtggcctctaccagtttcagcagatgatgatgttacagcactattcacaatagcaaagaccatggaatctacctagatgctcatcaacagtagactgcataaagtatatgtggtacatatacatacatggtatactatgcagccacttaaaaagcatgagatcatgtccttg

SEQ ID NO: 245382 - DNA, 472 bp, Homo Sapiens
tccagctgattgctaaaacacaaggaggggtgtgaccctggaagtgagggtagctgggcaacagtgccaccgcagccctcggccagggtctgccacctcccttctctctagcggagagctgtctccatggcaaccacatcagctcaggccaggggctcctgttcccagccgggtgacagcaccacctcggcagcctgtcaggatggcaacggcagatcttgatgatgggactgaggctctggcagaagaattgctcagggaccctcgtctccatagaaaccatgtcaggaaagagacggaggagggagaggataaacagcaaataataaacacaggctcccgcctcctgtgcacaagcctgagacaccacagggcacatgaggagagctagaccagcctcactgacaccagctgcaaaaggatgtgaaccagtgtttcttgagcacctactctgtaccaggcaatcaagctt

SEQ ID NO: 245383 - DNA, 659 bp, Homo Sapiens
ctatatatagacgcagacaagggtggctttcataaacttactgcctatctgaggtctgaagtggtctttaaaattcaatgagcctgaactcaaaatgaggagacacataggtgcacctggtatataggttaaaatctgggagtgaggggacatggaccaaagtaattattagtatttgatatggatgtgatcaattatagctatctttaaagttgattcttttagaggtgagaaatttgaatagaacaataattgggaagaaattgagaaaggactctacaaatgctcactaaatgtacctgaggaaactgttcacttagttatttctaatttaaggtagctgttaatttccctattttggagcataggaaaatttaagacatactgtttcatcaatatgaccatctcttgattttatctgtcttgcctccatttctttttttctagtggtagcacctcagttaacttttagagaattaactcatctgcaattgtatagagctttggtgagattgtcagctacttcccttaactttttaataaggatgagacccaaactaagctaattagatgaattctttgaaataatgcaaagaaaatgattgaggtttattcacattgaagatgagaagctaaagtgttctctatctcttgtctga

SEQ ID NO: 245384 - DNA, 917 bp, Homo Sapiens
  misc_feature (64)..(64): n is a, c, g, or t
catgctgttcagagcatcccaatgtatccagcagacgaagacaagagctcccagggcatgggancaacatgtgcaaaggccctagggtaggtctgagcctggaaggaggagcgggtgtgggcacgaggctggagagaggccctgggcaaccttttaggagatccctagaaggggtggcctcatccagcttgctacttgtgaagctccctcaggctacactatgcgtctgtgaaagtggcattgctgccaaggtgctgggggtacctgtctccccaaggctgatcccccctcttgccctcagggccaaattctcccagatggctctgccactgaataagcattcagaagttgatcatgcacaggcccatttcattagtgctttgaaagaaaatacccttctctaagggccacccacccatggcacctacagcgtgcagatggtatgagatgaaatcctttgtcttgatcaagatcctggctctgacccttcagacaagagtccctgttgtcaagcccaggtggatgtgcaaccactgcagcttcatgatacatagcagtatgtccagcctctggtggaggaaaagcatcgtaactgcttgcacttggtgatgccttcccctcatgcacagctgtgtattcagccaaccacagactgtataggaacacctactgtttctttgtggagcttacagttcagtaaggaggacaattaggaagtggccgccatgctgtgaggatgctcaagcagcgcctgaggcctcgtggccaggagcccgtcgcttatcacaggaagtccgagtcccggcactcagcacacgcgggacgtgagacgccgacgtgaagctcctccccttgatgcaccaggacgtggactttcttttcctacttctggctggatacttgggattaatggaaga

SEQ ID NO: 245385 - DNA, 185 bp, Homo Sapiens
cgatcagaggatcccgtggtcgagtcactgtactatcttcttttctaatctgccaaatttagcttctctcttcccaaacttacccaatgtgatcaatattcaccatttttttatttcacatagcctaggtatcacacatttcctttgcccacaatcactagaattcaccggaatttccacaggat

SEQ ID NO: 245386 - DNA, 524 bp, Homo Sapiens
gagctcggtacccgtgaagcggcttgtgtatgtgttgggggaggggcgcacacactcttacatgtgtctaaaatatttctggagggaggataccttctggaaggtgaactagaaggctagtatggatgggagatttattcttcactccgtttttgtactgcttggattttaaaattttttaaggagtgtgtgtattaaataattactgtttctaaacttttaaaaaccaatgtaaatcctatcctcactactccactgcctcattgaaggtggagaaatgtatcccccatggtggcgccctctgcactgccagccttccaacaggaacggcagtggcattgcctgaccctcctcactttgccaagcgcccccactcacatcagtctttctcatttaagcctcataccacctgtggaatgggtgctgtctcatctgatgtgaatgagcctgaggctcagggcgaatgcctggccaaggtacagccagtgagtgggagagtgagggctcatacacaagccgcttca

SEQ ID NO: 245387 - DNA, 292 bp, Homo Sapiens
tgaagtgatctagagtatcccgttggtcgatcactgtacttatgaataaggacaagccctatttttgtttccacataaagatcagctactgaattggtgaatttcctgacagacaatgctatctaaccatagttcacgttaggggaagcatttttccatcagtttctttaaaattggattgtctggtgagttttgatattaaacattatgtagctaagttataattttgtagcatttctttttaatttttcaatctatattcacaggcccatacttcagtcagtccaatcat

SEQ ID NO: 245388 - DNA, 531 bp, Homo Sapiens
actgtagtgaccatacaagttgattatggttgtctggatggcagataccaatagcaacattgtcatatgcagtttgcctccaaatctagatacaagaaagacatcggaatctgagatgctgccctagagaggacagttaaaggaaggttcagtggtcctcagttttgcagtgctctagctcctgtcagaagcaagagggaaacattcctaatttagttccaagattcctacagattattatcaagtagtagtattttatgactagagatcacaggcacaagttgtaactaactaacatgacaagataagctatagtaaaaatatacattggactcagttcttcaaggtttcatcaccaacgtaaggaatgaagttggaaccacaggcagatctgaaaaagaaccaaatagagctcctaaaaatgagaaatacttattgaaataagaaaaaagccctcagacatgttgaatattttattagactcagctgaagagacaagtgaactcaactatcacctggtcctgaagtata

SEQ ID NO: 245389 - DNA, 527 bp, Homo Sapiens
tcactgtgactacatcctgggcgacaaatcgagacccatcttaataatataaaaaaagaaaacagaagtatactaaagacataacaaggtggtgtctgagaagccaggagaagagattcttaataagtagggaatggtcggtgtgtcctgtattttaagggggtgaggcttattgataactgaaaaaggcctttggatagtaaggccttgacaattaagtcagtagtattcttcaaggtacaattgcaattgagtaaagaccggaattagattgtaaagtaagaagaaagaggtgatgagagaaaacccccttcttaactgtccccacccatcttgatctcattgtttcattactttcaatagcacctatattttcaggtcacacattatgttgcttaataagctgcctagtgtctactgttttcttctacaagaatatatgcttctgaaaagtcagatattttatattgttactgaattttcctctctgacacagtacagtgatcgaccaacggatcctgctgacg

SEQ ID NO: 245390 - DNA, 393 bp, Homo Sapiens
  misc_feature (164)..(180): n is a, c, g, or t
cttggtcgatcactgtactgtatctctgtatgtgattgatttctcctacaccactctcgccatctccatgaaatcctgtaagacttagaatttactctctgtgaagtacagttgatctctgaacaatagtttggactctgtgggtctattatatgcagatttcnnnnnnnnnnnnnnnnnagagatagggactcgcattgtttcccaggctggacaacaggatcgagaccccgttgcccttgaatacgaatatgctcctcggaatgttacctgctctcactgtcctgtatctctgtatgtgattgattctcctacaccactctcgccatctccatgaaatcctgtaagacttagaaattactctctgtgaagtacagtgatcgaccaacggga

SEQ ID NO: 245391 - DNA, 256 bp, Homo Sapiens
gttatggaactgttaagacttgtgcactttatcccatgtatattataactgaattaaaaaataaacaatgtgcatgtggatgtaagatagtgaagctcaataatagccttggattaaaaaaaagaagaaagcagaaattatgtagcatgaaaggatggatagatgtagccaaatatttatatggagtcccgtatgactatcccatggaagaccatggggaagcttagtacagtgatcgaccaacgggatcctctga

SEQ ID NO: 245392 - DNA, 228 bp, Homo Sapiens
  misc_feature (152)..(175): n is a, c, g, or t
ttggtcgatcactgtactggtttttcttcacttgtcaacaaaatggaaatggtatttaaaatggaaaatggcaggagtactaaaagtcctaatagatgatagggcattacaatcagtattttagttgtggtagtaacaccgtggtcatacgnnnnnnnnnnnnnnnnnnnnnnnnggaaagggagtctcgctctgtggatcaggctggagatacagtgatcgaccaag

SEQ ID NO: 245393 - DNA, 182 bp, Homo Sapiens
ttggtcgatcactgtacttgtcgcattttggaataaggtaattctgtcttcatagaatgagtatggaagagtttcctccttttcacttttttggggaacagtttgtaaataattagtataagttcctctttaaatgttttgaacaattcagcagtataagcattggatcctcaatttttatt

SEQ ID NO: 245394 - DNA, 333 bp, Homo Sapiens
ttggtcgatcactgtactctagcctgtgtgacagagcaaaattctatcttaagaaaaacaaattctggtgaataagtctcttttaactaatcctgtctaaaatggatgatggctaataaaacaatatggcgtggctggaactctagctctagggtggtctccaaagaggacactcaagcattctctgagcagcacggggctgtgtcctggtagcagcctgaaggggtgacagtggagcacagtgtttattttcatttctcaattttgacatatttactggaaaaattaatccctagccacctcacatgacagtacagtgatcgccacatagta

SEQ ID NO: 245395 - DNA, 140 bp, Homo Sapiens
tcccgttggtcgatcactgtactatgtagccattataaaccaggttgtaggagaatacttaatgacaaaggacaaggatcaggctgttagggtgacacaagcaaattataaaataacttatagtatgattccaagtttgg

SEQ ID NO: 245396 - DNA, 509 bp, Homo Sapiens
ggtacccgtgatcggtaacttggttgagctgaatatatgttttaaactttgacataaacaactcaacctgttgcctctcacttccctccatcactgtggcttttaaaactcatgtattttgactcaagtgaaaaaaacacaaaaatccctcatcccagctaggttttgccccctgccctataagagagctatttccccctttctttcctttgaattcttctccaacaccatcccttcattcatactgccctgtgatacacttgaagctgtgttgattggacagacgttcatcagctaacttacctttacttggcaagatggtaaaatagtaacttagtgatgttactaaagtctcgaccattcacctttccatactgaaggaaaggtaaaaaggtttcttctatgggaaattatgcttgacttgcatactctagtttgatgaggataaaaagaaacatgtaattgcagtggtgtttacaaccaagttaccgatcacgggatccaatgaa

SEQ ID NO: 245397 - DNA, 444 bp, Homo Sapiens
caataaattgttggtcattgattgtagatcctcatctcccttcttataaccaccttagttccctccctctcttctcttccctctttttctcattaccacctctagagagcagtgaaattcctagattgatatgtaagttgcttgtttctaaggtgacttatagcattaaagaatcttctgtgctatggaaaaatttccttccccttccatttagtgtctttgctgaaataatgttttggcatctgtatctttccctcaattcccttgagcatttatgttcttgttcacctggctgatttctaaaaatataatatgcttactcagatattttatctttatgctctgaaaaatggtgccgaattagacacaaagtgacctactatcccatctgtcaaaatcactcacacaacatcaatgtccaacaatttattggggtaccgagct

SEQ ID NO: 245398 - DNA, 262 bp, Homo Sapiens
tcgtctagaggatccctcaataaattgttggtcattgattattaatagttaattatccagttatctggactttttccaaaagagtttatctataaagagcatctactctatgaaatgtagaaataaactcaaaggatagtaaatcagtattcagtctgtaaatattacctcactgtgtccatgacatttgtgaacttagtaaccaaatttaaggatttaatgtgtttgcttgttgttaacatcaatgaccaacaatttattg

SEQ ID NO: 245399 - DNA, 557 bp, Homo Sapiens
  misc_feature (41)..(41): n is a, c, g, or t
  misc_feature (53)..(53): n is a, c, g, or t
  misc_feature (62)..(62): n is a, c, g, or t
  misc_feature (65)..(65): n is a, c, g, or t
  misc_feature (70)..(70): n is a, c, g, or t
  misc_feature (73)..(73): n is a, c, g, or t
  misc_feature (92)..(92): n is a, c, g, or t
  misc_feature (132)..(132): n is a, c, g, or t
ccccccccggttgggtcaattttaatttgggcaagctccantttaggacttantttattctnagnttggngcnccattttcctggatttcanggtctcctcctggttttggtcatattttaattttggctgnataccattaggtaatttcatatgtgagagttaattttctttattgttgcatgtgtgaaaatgttatatcctatgcttgcctgctgatctggcagagtatgcaattaattttccttcaatacttcagtgacttttaatttttctttttctagaatccagtattgccaatgagaagtgttccaagatgattctcaatcttttgtagatgaaatttttatttcctgtcagagagctttctaggatcgtttattgttattatgaaattgcaccgaatatgaatacgttttaaaatttgttcatttcattgggttctcacagacctgtttccatttgaagattgttttaggattattttcttgtattatttcatggttaattccccgtttttttctccttgaatttctgttaattggatgttggattgat

SEQ ID NO: 245400 - DNA, 284 bp, Homo Sapiens
ccccaggccccagagaagaaggagttgaggaaggcagagagcagaggaagaggcagatggagaccgagggcagctgcagagacagtggatggaatggccaggaagactgggcagtctaccctgaccacaatgttgggaatgggtccatttgttatcctggaagggttgctcaggaggaaacaggctagttcccaggaggagggtctcatactgctcccctccttccctaggggtggaaatgggagtgtagaattattctggacatggctgtggtttacagagat

SEQ ID NO: 245401 - DNA, 214 bp, Homo Sapiens
aggccccaagggagatggctgcatttgaaattttctgtaacaccctaatgcttagcccattaaagctcagcttgctgctccagaagactgggtaacccagagacatttcgccatcaacctaacttttgtctacctctttcaagcagcagttgacctcttgcctgtggagagctgtggaccaagggccattccagcagcctcccagccagttcag

SEQ ID NO: 245402 - DNA, 527 bp, Homo Sapiens
  misc_feature (30)..(31): n is a, c, g, or t
gccctagtcctaggcgacttgaataaagtnngaggtcaaacatgggccttcggcattgggtttctagggaatatggctcagtagggcctgccccttcaagggcagcaagaacgaagcaggatgttgtcactcccgtctgaataaagctccatgagttgggttggaaaagttgaacatttatcttgctttcttcttcccacctctttccctggggtccccaggggtgtcttgcctttgttaacccccatcggagacctgagggtctgggggtggttgggcctgcctttctgctgttcccagctgttcccctgctgacatccctaggagtggtggaatgccaggctcctgtcctgtggcctgggggcctggggcatcattgggcctgccttcagactgaggttgctctatgttctcactgcctgaggacagtgtcccgccaccacctgccttcctgaggaccacactcaggctcggcttctcttccccagctgtggcttcccatggtaccctgctgcttatgccacctg

SEQ ID NO: 245403 - DNA, 221 bp, Homo Sapiens
ctaatttttgcaatttggcaaacatccagccagggacagagatgacactctaccattttgtagatgaccataacctctatatgcagtactcttggggcttcccaacatgtgatttggtggtgagggaagcatctgcctcccttccctctaaaaaaagtctgaataggccaaaggcagatcacagaccagttggtggtccggccaattttcagtaattccta

SEQ ID NO: 245404 - DNA, 385 bp, Homo Sapiens
  misc_feature (39)..(39): n is a, c, g, or t
cccctttggccccacttttgagttaaaaaataatgtccntgtttcaaaaagagaaacttcatttttttaataaaataagcaatctaaggcatttaacagctagtaaatattaaagctaaaatttgaaaatgtcttgttattccaaatccagtgctttcctccctattttgtagctataatcaaagctattcttcaagcatattaattatacagttgataaaatagggtaaggaaaaaagattaaagggagctattggatctatctgatataggtgccaaagagagagctgatgccaagagatagggaaaagggaatggcagggatgggatggggaaaggaactgtctggatatgttatgtaaatgtctttgtaaagacctattgt

SEQ ID NO: 245405 - DNA, 362 bp, Homo Sapiens
cgactcgagttatgtacccgttagcagcgcaccatctcttgcaggctgaacctgaccctgggtggactccctgctctctgccagcccctttctcacccctgggtccccacggcccctggctctctcccctctgctagaatctcgctgagggattggtggggagggggtggtcacgcactgggtggagatctggtgccccctggaggccggacaggaagggccagggcggacaaggtctttgagaactcggtggcatcccgctcctgatggcctgggtcccaccgcccctcccccagccttcctgacagcagaggagattatatgctgcgctgctacgggtaccagctcggttgtatcatgta

SEQ ID NO: 245406 - DNA, 260 bp, Homo Sapiens
agacgattgggggagaaaaagaaaataacaggaattaggaccacaggatctacgcagtcgaacttcaacttttatgttaagagttttgtgatgaacttcaaaaacaataattctaagtggaagacctataaaggaattgtgaataatgaagaaaaggtgtttcagggtaactctaactttcgggacccagtgcaaaacaatttcatccctcccatcgtggccagatatgtgcgggttgtcccccagacatggcaccagag

SEQ ID NO: 245407 - DNA, 675 bp, Homo Sapiens
cgcagctcttccgttgcccggagcaggatttcccgtttgacggcagctccctgtacgtggggatggatgtcagcccctctgagcccccatgggaactcctgccgatcttcccagatcttcaggtgaagtctgagccatcttccccctgctcttcctcctccctcagctccgagtcatcgcgtctctccacagagccatccagcgaggctcttggggtaggggaggtgctccatgtgaagacagagtccttggcacccccactgtgtctcctgggagatgacccaacatcctcatttgaaaccgtccagatcaacgttatccccacctctgatgattcctcagatgtccagaccaagatagaacctgtctctccatgttcttccgtcaactctgaggcctccctgctctcagccgactcctccagccaggcttttataggagaggaggtcctggaagtgaagacagagtccctgtccccttcaggatgcctcctgtgggatgtcccagccccctcacttggagctgtccagatcagcatgggcccatcccttgatggctcctcaggcaaagccctgcccacccggaagccgcacactgcagcccaaacctgtagtgctaaccactgtcccaatgccatccagagctgcgtctgctgaggaggaggatccgctagaa

SEQ ID NO: 245408 - DNA, 661 bp, Homo Sapiens
gctggcatctcacagagcatcctaagggacaggactctgtctcacttccaggcctcctctcctatccaagcctggctggaggagtcgtctgtgagtccttcagcagacgcagctctttgatatacctcaagttcaatggtggcttttcaagaaagaagaagtgcatgctaccacattaagtaaaataatttaattgaaagtcataccaccatcttagtatcttcagtatcaagtacgaaacagtttatacctccttggggagaaggacacatgaccctgacatccttaagcacttgtattatccagctcactcctcacaggctaactctgtgctcaccaagcagccttcccattatattacccttcggcatctgaattttctacatgaagaggacatgcccatatggaaaggcaggtggtggggcctttgctgatgttaataaactcacattctagtttattccccaggctcttgtgagcacactcagcatgaatgctgctcctagagctcaagtcattttctgtgctctaacaaatccgaacttcttagtccctcaagcaaaggattagacctggtatgcagggccttactgtgtgctgccatgtgggatctgctggtatgagtgagctgcgtctgctgaggaggagatcctctagacca

SEQ ID NO: 245409 - DNA, 256 bp, Homo Sapiens
gtgatctcgaggatcccctcctcagcagacgcagctccctctcttttgtagcagttgtagagcatgtctgtcctatgtgtctggatgttcgagctctccttttagctcgttcatttcccagtgaggaagctgaggccgtaaggtggtaagttctgcttgctggaggctccctgttggagcctctttgcgcacccagcagggtccctgtgcagctgggggagtgcactggcagagctgcgtctgcggaggaggggtc

SEQ ID NO: 245410 - DNA, 269 bp, Homo Sapiens
tcttgtttcctgcacttcatcctgctgtgtgctatcggataaaatctctaagagctacattacagattttttcaacaggaagtatcacagtaacagggcccaatgtaaaggctgttgctactgctgtggaacagatttacccatttgtgtttgaaagcaggaaagaaattttataattcaccacttaattggttagcatctctaactgagcaccttttaaacctgctgcacattggactcaaaaggaaacaagcccgggcagaatctag

SEQ ID NO: 245411 - DNA, 138 bp, Homo Sapiens
accatattggccaggccagaccagcctggacaatagagtgagaccctatatagggatctcactatatagagcaatacagcggggtcacccgacctcgggtgatccgctcgttcccctcccgaagtgcaggaaacaaga

SEQ ID NO: 245412 - DNA, 509 bp, Homo Sapiens
ttcctgcacttcagcctaggtgacaaagagcaagaccctgtctcaaaaataaaaattaaataatagcattgcagggctttgaaagctgaactgatattggaaccacagctcagaagacaggttgcagcatgcagcctgaatctaattacgtcatctatctgctaaaacaaaagtttcagtatttgtaagatttaaacaagattgaaggtttcaaaacgtaattttgcattgttcaaaatggatataattcaaaattggcatataaaggggtaggaaaatctcaactcttataggaaaagacagcagtgctgagatgacatagatgttgcaattatttgacaaaagactgaaatattcagccggcaactgaaaacactccacaggcaatcccaaatactcttaaaaccattagaaaaagtaagtttcagcaaagaaatagaagtgcaggaaacaagacctgcacttccagaatgtgataacaacgatagtagataatttcatgacttgga

SEQ ID NO: 245413 - DNA, 455 bp, Homo Sapiens
  misc_feature (122)..(397): n is a, c, g, or t
tcttgtttcctgcacttccacacacacccctagaggatattctgagaaaagaggggggatgttttggcagtgacttgtgatgaagagggttgcggttggagaccagaagggcctgaaagcannnnnnnnnnnnnnnnnnnnnnnnnnnnnnnnnnnnnnnnnnnnnnnnnnnnnnnnnnnnnnnnnnnnnnnnnnnnnnnnnnnnnnnnnnnnnnnnnnnnnnnnnnnnnnnnnnnnnnnnnnnnnnnnnnnnnnnnnnnnnnnnnnnnnnnnnnnnnnnnnnnnnnnnnnnnnnnnnnnnnnnnnnnnnnnnnnnnnnnnnnnnnnnnnnnnnnnnnnnnnnnnnnnnnnnnnnnnnnnnnnnnnnnnnnnnnnnnnnnnnnnnnnnnnnnnnnnntcaggggtctcttgaatgaatgaatgaatgaatgatttttaaaaatcaatcaatcaat

SEQ ID NO: 245414 - DNA, 405 bp, Homo Sapiens
  misc_feature (45)..(149): n is a, c, g, or t
  misc_feature (166)..(298): n is a, c, g, or t
cttaactatattttatttttttgagatagcgtcttgccttgtcannnnnnnnnnnnnnnnnnnnnnnnnnnnnnnnnnnnnnnnnnnnnnnnnnnnnnnnnnnnnnnnnnnnnnnnnnnnnnnnnnnnnnnnnnnnnnnnnnnnnnnnnataccaccacacccagnnnnnnnnnnnnnnnnnnnnnnnnnnnnnnnnnnnnnnnnnnnnnnnnnnnnnnnnnnnnnnnnnnnnnnnnnnnnnnnnnnnnnnnnnnnnnnnnnnnnnnnnnnnnnnnnnnnnnnnnnnnnnnnnnnnnncccccctgcttaactttaaaagtacaggctaataaacattaaggaagagaatgtccagatgagtacaaataatgcaaggtaatcagtgccctattaagagttgccca

SEQ ID NO: 245415 - DNA, 624 bp, Homo Sapiens
aggaagaagcttctgaatatagagcatctgaaattgatcaagttgttcctgcagcacagtcttcacctataaactgtgagaagagaggaaacttgttaccatttgtgggactgaataatctcggcaatacttgctatcttaatagtatacttcaggtattatatttttgtcccggttttaaatctggagtaaagcacttatttaatattatttcaaggaagaaagaagctctaaaggatgaagccaatcaaaaagacaagggaaattgcaaagaaggttctttggcaagttatgaattgatatgcagtttacagtccttaatcatttcggttgagcagctccaggctagttttctcttaaatccagagaaatatactgatgaacttgccactcagccaaggcgactgcttaacacactgagggaactcaaccctatgtatgaaggatatctacagcatgatgcacaggaagtattacaatgtattttgggaaacattcaagaaacatgccaactcctaaaaaaagaagaagtgaaaaatgtggcagaattacctactaaggtagaagaaatacctcatccgaaagaggatgaatggtaataacagcattgagtatccgtgaggg

SEQ ID NO: 245416 - DNA, 757 bp, Homo Sapiens
cccggttcttctgctcggtcacccacctgggtattgaagccctataaaaaccctttttacttaccttaatatagtctggcgttgcgtggacctcacagtgttctttcacactttttatgtaacttaggaactgaaataccactcatgcatttgttctaaagtgccaaagttctgtctaacttattaacacgtctagacccataactccataacttttactgaaataacacaaattcagtttaggttccttctctaaatcctgacatttatttgcactatgacatttatttgtagaaattgcaattttcaaaaacatttttaaaagttagcgttagtaacaagttagtaattagtattagaggcagtagttaggaatagatacgggtttgaaagctatctccactgtatctgtctagtatagcattaatgtgttcaacaaatggtaattactactaagaccacctcaaaaatatattcccattatacttccattttgctaaaactaatttaaaaatcaaattgttcaacgcctttgataaacagaagcctatcttttgaaataaaaaatttaatttcattaaatcaaggattgcgcaggtactgaaaattatccaatactctcaaaaagttaccagaattttagcaataggcagtttttacatgactaagcctagagataaaaaatgtgtcctatgtacatagtttattatctaaatgaaactgcactgttagataaatcttgaggtatcgagccacc

SEQ ID NO: 245417 - DNA, 653 bp, Homo Sapiens
acccctcacgatacctcaagatgactttttagaagtcttttctttatcctaaaacatcctccaaccgaaggcatgggaagctatcctatactctgaccttgcctatattttaaatggcaggggccccaagctaagaatcagcaggcagtggcatctacagcttctggtctgtagtggcgtagaagcaggaaaatcaatgctccaaagcaacaatgtccagctttcctgccagtgagctgggcttgagggagtgaatgggactctttctgccttttctttttctcaaaatacgactgcattaactgggtgtatgcacacacaaacatgttcaaactagggcactcatacctagctagaacctactcagggaaagaaatatgtatttccacagtaccctgatcacccagtaaaagctaatatttattgaataattactatgcaaattatggtaagcaaattgtagtgtgaatacatgatatgagaatatcacttaattcacacagcaaccttcacaatggggttccttttggtacagtctgaaaagagaatgattatctgcgcagggtctcagagctagtgtggtagaataagaaattaaacctaagtagttgctaaacaatatacattctatctatcctattgaggtaatccgt

SEQ ID NO: 245418 - DNA, 362 bp, Homo Sapiens
  misc_feature (201)..(209): n is a, c, g, or t
  misc_feature (232)..(299): n is a, c, g, or t
tatgaggaaaatttgcaagctagtctctctcgggggaaaaatgaattaaattaacaaagcttagagttcagaggagaaataatccccaaaacattcattcatttttatttgaaatgtttattcagtatgttagaaaaatattgcttcgtcgaatacttattaagtgcttactatatatacaccaagtatttttatgggtannnnnnnnnaactaaaaaaattaaaactattnnnnnnnnnnnnnnnnnnnnnnnnnnnnnnnnnnnnnnnnnnnnnnnnnnnnnnnnnnnnnnnnnnnnatatttatttatttagagacagagtcttgctctgttggccaggcttgaggtaatccgtgaggg

SEQ ID NO: 245419 - DNA, 471 bp, Homo Sapiens
ctcacggattacctcaactggatcatctcccagtatcaaattaccttctgcagctgacctgccatagtcacagccaaacctccagcctcatcacgaatccgagatcttagatcctgaagtccccactctcccaggctcgtctcgtaccatgactgctgctgaaccaacttgctctgtaatttcctgcctgctaatccttagcctttaccccatcacccaaactcttggtctccagaatctgcttctcttccagtgtgggccccatggtcagtcatccccatgttctcattagcatcttcattttctctcactccctttatctaggctcacttgccagccttcgacctacatccttgcacccatctattatgggtagaattgtgttccctaaaaaaggtaagttgtatccctaatccccagtcccttagaatctgaccttagttggcaataagtttgtactgagtaatccgt

SEQ ID NO: 245420 - DNA, 376 bp, Homo Sapiens
ccctcacggattactcaatctccaagtatgttgaaatttttctatcattttgctattaatttttagttaaagtcctcatgtttgagaacttattttgtatgattactgttattttaatttcacacatgtatgtccaatggccaagaatgttctctatcttggagagcattccctgtgaggttgagaagatgtatattttgctattggaacgataattctataaatgtcagttggatcaagttactgaaataggggctgaaatctctatctataataataaatgtgtatgtttctccttgaggtaatccgtgagggccctcacggattacctcaagaaattgttgccaagatgaatgtctcagggggtttcttgaat

SEQ ID NO: 245421 - DNA, 499 bp, Homo Sapiens
ttttagtcacagaatcactgtgaaatctggcctttaataaggccatactaagttttctacaaatacctgttgaatggcagtctcctacatttctatgtgctcaagtagtactaccattacctttagttagaagagaaataagcatttggaattctctaggacattaggaaatacgattaaattaggaggtatcagaacagattctataattcgaattttaagaaatctacttgttagcccgatatatcactttgtcatttatcacttctcaatagagcctttctatagcattagttaagtgttacatggacaaataagttttttattgtggctatacatttgaaaaatgctgttacttaaagttaaggaggtttctttatttctggactttactatgcactgttaatctttgggtagcagcacgcagatgcaatatttctcaaatttagttgggcatgatcctatttatccataagcatcttgaggtaatccgtgaggg

SEQ ID NO: 245422 - DNA, 627 bp, Homo Sapiens
  misc_feature (293)..(332): n is a, c, g, or t
cccgtcacgattacctcaagctgttaggccacaaggctagggtttggggggatgtggtagcaaaatgtcaggataattgatttgattggctaattcttgtgttctcagaaggtaccaaaagagactagctattattcaagctgggctccctgaaactagattgggaaaatagtatgagtttttaattttgttagagccattttcagctaaattattgatatgaggctaatgaagatcctacaactatgtactttgattaatggcaagagctgcctattttggactcctagaannnnnnnnnnnnnnnnnnnnnnnnnnnnnnnnnnnnnnnncattccacacctgagactgcattagttggttgaggtaatccgtgagggccctcacggattacctcaagtgatttagagaatattttgtttttcttcactattatgtctaatatatatatgatatctaataagctttctgttctgtgtatatatattagatatctaacaaatatatatctaacagattatattatatatatacatgatgggcacaacctttaatgaacaagaagattctcatattaaaactttgttataccttatgtgccttcatcatcattactttatcgggtgc

SEQ ID NO: 245423 - DNA, 275 bp, Homo Sapiens
tgcggacccctcacggatactcagagggtcaagagataacctcttcaccaaatctgttagaaatagattagacagtagtctgggtgcagtggcccacttctgtgatcacttgaggccaagagcttgaggtcagtttggacaatatagtaaaaccttgtttctgttttaaaaaacaaacaaacaatttgagagtctttctgagctacctgtggctcaggtagctgcccaataagcacacaagaaatacatacatgggcattgtgctcataggtacc

SEQ ID NO: 245424 - DNA, 326 bp, Homo Sapiens
ccctcacggattacctcaagtgacccaaccacccggcatccagccccaacctgcaagaacctccccgttgctctgcccaagagtctgcccagctgcttacactttcccatgctcgccacactttcatgcctcctgggccctgcctgtgctgttcctgctacttggatcgccctttatctctcacccacccagtcaactcctgcacatccactcaaaagcccattcaagtacttcgtcgccttgcaagatagaggtgatcacagccccttgtggcacctcatcctctggacatacccaccgttgagttatccgtgaggggaccgacg

SEQ ID NO: 245425 - DNA, 416 bp, Homo Sapiens
ccctcacggattacctcaacatactcacaagggaaccaatgaggaattgcagagcaggaagcacaccagagtgcctgaagcttagtgagccagggtaggggaaggagaagttggagagaccaatcagagccacatggtgtgggaccttatgggccactaagaagtttggcattgactccaggttattaacgggtagctgtttgttttaagcagggcaatgtcgtggccaaattcatgtttgaaaagtaccctttgacggccaggtggagatttaattgtcagtcagggtagaagcagggaaactaacaaggagattgggggtgtaaccagttgagagatgacaacatcctggactctggtggaggcagaatgttggggagaagtagtcagactgagtaatccgtgaggggtaccga

SEQ ID NO: 245426 - DNA, 465 bp, Homo Sapiens
aaagcacagacaggagacagtggactacatggtaaagcagcgggaagattttgaaccctttgtagaagatgacattccttttgagaagcatgtggccagtttggcaaagcctggtacttttgctggcaatgatgcgattgtagcctttgcaagaaatcatcagttgaatgtagtgattcatcaacttaatgcccctttgtggcagattcgtggtacagagaaaagcagcgtgagggagttacacatcgcatatcggtatggagagcaatacgacagtgttgcggaggatcaatgacaaactcagaggcacctgcacatctccagacggatgtgagtgaggcctcggatttctcccgtattccccgcgcctacaggaaacagattgagagctgtatatctggcgctaataccagtaatgtgtgttgtagaaagtggcattgagaatctgtgggcctgattccgcgc

SEQ ID NO: 245427 - DNA, 579 bp, Homo Sapiens
  misc_feature (96)..(207): n is a, c, g, or t
  misc_feature (227)..(256): n is a, c, g, or t
gctatgaatttctttgatctgtggtttcacatctttcattattttttgaaaaattctcagccactaacttacagtatttcccttccatgttttgcnnnnnnnnnnnnnnnnnnnnnnnnnnnnnnnnnnnnnnnnnnnnnnnnnnnnnnnnnnnnnnnnnnnnnnnnnnnnnnnnnnnnnnnnnnnnnnnnnnnnnnnnnnnnnnnnttctttctattgaactagcnnnnnnnnnnnnnnnnnnnnnnnnnnnnnnaaaggcatttttcttatttcaactactatgtttcatatatccatcatttctctttcttccttacagttttcatcattctgatgaaatttaaaatctgtttttggccaggcacagtggctcacgcctgtaatcccagtgatcaagagatagtcactgaataaatgactacatagtatagtatttgtgtatacatttacaaattattactttctcatagcaaagaagactcaacaggtgcaatcctccaaactccagacacacgtactgtcaagaaacaggggatgtaggtgggcgtgctggctcgatggtgttgagtaatccgt

SEQ ID NO: 245428 - DNA, 280 bp, Homo Sapiens
  misc_feature (183)..(198): n is a, c, g, or t
gtgtgagccaccgttgcccggctgaagatttttcttaattgcaataaatattcagcattttttctaatgaaaatgaattttgtttaccagtaaaagtatgcattttaaaagactttcagatttatgctttttacgttaagctgctaaactaaaagtaaatggaagaaaccaagtctagtaggnnnnnnnnnnnnnnnngtgggggtggatgggggaggttagttacacttaaaatatcttctccagagactgtatgctccttttctagactgtaagctct

SEQ ID NO: 245429 - DNA, 549 bp, Homo Sapiens
  misc_feature (74)..(74): n is a, c, g, or t
acaaaccagttcttaataatgttcaaagttggacccatagagacatgctaagcactacatcatgctaagaagancagttattactcagctggccatacttcagtccattctacttttacaccaaggaacaaaatgggctaggagatttttttaaaaatacaaatgtccagtaccttgtccgaggacttgttcactgatttgccccaaccccaaggtaatggttatctactttgcaacctatggagatcctgatagctcccatacaaagtgaggtacactgttgccaatttggaggcaggaagccatcaaactatacgtagtttaattcagatgaacacctatcgatattcaaaaggcaaaacaaaaaaactaattccagggacattagaccttggtgaaatgccaaatggaaaatggtgctttaaaaggtagtctcttaccatataaggaataagtataacattagcttgtgatttctcattatcgaagggtttcagatcagacgagatagaacagtgtcaaattattagaagtagacgaaaggttatc

SEQ ID NO: 245430 - DNA, 1017 bp, Homo Sapiens
gtcaacgatgaggaggtgcccgggcgctgggatagctctagacgtaagtataatggaaaagatgaggtctgcctgactttatatggcgatggtgctgctaaccaggtaattatgtctcttaacttcccaaaaacagtcttattttcaaagtctttaatatttacagttgaatttctaaagaagtagcatattgcttattaggtgaaatagcaagtcctatggctagctcaaatttggttgacttatggccagattagagattgacctcttagcgttgtttcacaagagacttacggggcacattcctgtgaaggagctcacctttgctctacatcagtgcttggcaaaggccctgtggtaaaggacctccccacaacctattgcaaaacaatacagacccattctcttggatgtccgggctggcagtgtcaaattcggataatagcgtctgagtcctaactcagtttctatgcttctcttgttaccgagtaatccccagtctgtggccagcactctgtgaagccctgttctagaggctgattcttaggtgctggttcactctggctatccagtgggcctgatagatttcatattgatcttttttccagtgtgttccttactgctagcatggccccaaagaaacaagtagtagttggtttgtcaccttccttagttgcaagagtatgatgcctgctacttctcctccaccacccaccccgctttccctcaccacccaaagctcggttttagaagaggaggctttctgtgctttatgaaagctttctgtgccaggcagagcagcagctgttagagatgatgaagcctggagaaagaagccaaatgaaaccccttttcgtaactacttccagggccagatattcgaagcttacaacatggcagctttgtggaaattaccttgtattttcatctgtgagaataatcgctatggaatgggaacgtctgttgagagagcggcagccagcactgattactacaagagaggcgatttcattcctg

SEQ ID NO: 245431 - DNA, 225 bp, Homo Sapiens
acaactcatacactagcacctggggatgagggatcaaagacagaaacgccctaagcaagaagtatgaatgccttagaactaactctaatagagcccgggcactggaatggctaaagagatcacctgactagatggttacagataaaggtggggtaccttactcaagaccacaccagaaattaactacacaacaggatcggaacctggcgtctcgcttcccagcct

SEQ ID NO: 245432 - DNA, 502 bp, Homo Sapiens
  misc_feature (391)..(391): n is a, c, g, or t
  misc_feature (394)..(395): n is a, c, g, or t
  misc_feature (400)..(401): n is a, c, g, or t
  misc_feature (445)..(445): n is a, c, g, or t
  misc_feature (457)..(457): n is a, c, g, or t
  misc_feature (464)..(464): n is a, c, g, or t
ctctgtgccaattaactttcccaatctgcatgcaccccatgtcccatgcccagtgcagacaagctggtgacactaacactggcagctttgaccaggactccatgaacgagcttggtccagatcagctttcctagctccagaccacagctctcatctggagtccagatcctgccgcaaacacttgtaagtggtaatagatttcctttactttgtctctcagccctccctactgtctggtgcattcccatctatgggcctccaggagcatgtgctctcccgtatgccattccctggggatgcaaccatcagctccagcccatatgacagtaacctggtctgtcctgtcctgggaccattactacacccacgcacttcagccaaaccagaattntannattgnntcagatgtttacaaccggcttgcctggggcaaaggaccctggancttggccccagnagctganaccaagaaacagaatgctgacccgcatggtgtgacaat

SEQ ID NO: 245433 - DNA, 367 bp, Homo Sapiens
ccgcggttatgtcttacgacagcaaagtaaaacaaaacaaaatgtgttatcacctgaaaaagagaagcagatgtcagagccactagatcaaaaaaaattaggtcagatcataatgaagaagatgagaaggcctgtgtgctacaagtagtctggaatggacttgaagaattgaacaatgccatcaaatataccaaaaatgtagaagttctccatcttgggaaagtctggattccagatgacctgaggaagagactaaatatagaaatgcatgccgtagtcaggataactccagtggaagttacccctaaaattccaagatctctaaagttacaacctagagagaatttaccgtaagacataaccgcgg

SEQ ID NO: 245434 - DNA, 166 bp, Homo Sapiens
cttgggccccagattaagatgtcaaatgtcaaggatggcaataccactcgcagaaatagggaagatggtgatttaaagagcttgaagtagcaatgaggcaaatggaaatgtcattttccatagagttgtgacatcttaatctggcccagcctcttggtccgctatg

SEQ ID NO: 245435 - DNA, 500 bp, Homo Sapiens
  misc_feature (149)..(274): n is a, c, g, or t
  misc_feature (367)..(375): n is a, c, g, or t
atagtctccaaagatatattaaagtaaaactgaacagaactaataagaaaaatggtcaaatccaattcatagtgagatatttaaatacacctctgttagtaactggtagaacaagcagaaaaaaacaatcagtagagagatagacttgnnnnnnnnnnnnnnnnnnnnnnnnnnnnnnnnnnnnnnnnnnnnnnnnnnnnnnnnnnnnnnnnnnnnnnnnnnnnnnnnnnnnnnnnnnnnnnnnnnnnnnnnnnnnnnnnnnnnnnnnnnnnnngtctctggccatgagctcaacatgtattttctttgaattttaaaaatctgttttgctgtagtctatttcttgtgtctaactgtgcttagtggnnnnnnnnncctttggttaatatgaatttcaggaggcatgatctattacttctcatgtaaatactaaccaaaatcgaagtggtatagttgtactaatagcagataaaatggatttgaaggtaggaagcatcccc

SEQ ID NO: 245436 - DNA, 456 bp, Homo Sapiens
tcattaagaatctcctaccaagagtagtcactgtgcatggacagcctgcggcaggaaggtcaaggtgatgtgaagggcagtattctaatcttaagcagctctgtgcagctcatgtatgcacactaatgtggtctggaaaattttcatttcgatgtattactcttcttttttattatttttcctatgtctcttcatgtttcttttatcgacaaaaacatactcccacattcctcttcccaaatcttaaaagaaacagagacagatacacaggaccctgccacatcacttacatttcctctagttaccatttgcaacactgatttccacacaaaactcaccactagtacacctgacaccaacacatacagttgtgttctatgaccttagttacctctagctgtaagacaggctgcaaagggatatacacaggtcctaattgtagttcaagttcaggta

SEQ ID NO: 245437 - DNA, 527 bp, Homo Sapiens
gactttttctgattctaagattattttaactgtaagtaggagaagacatctgaaatttaactatgatcagaaattcagattacaaaaactttgtttgctgtgctgtttgtaataaaataattccaccagccccttttggaaaaaccttcaaacggatccatgaatacaagccacttaagacacgcttttacactcacaaagacatactaggtaagtgactttatcgttttcctttgttctaatgcttcatagccttatgtgtcattctttctgttacatagacttttatcagcttttttctcttcagagttgcttgtccctacagggatatttggggagaatatgggttggaatacagcttctccacttacagttgtatgtattgggcagggtatttagcctctcaatctgtttccttatgtggaaataaatatactaatacctatcttacaggttgttatgagactttaatgaagtatttgtatctattataaatcctggcacatacagtcaagtgtgatgttcca

SEQ ID NO: 245438 - DNA, 183 bp, Homo Sapiens
atggaaggtctttgaacaggttttgccctacaagggggaagaaaaacgaggtagcagttggagagaatacaagatgaagacagtttattagaaggcagtgatgttacagaatatttgcgtaagacataacccggggggataactctagagtcagacttcaggcatcaagcgtgcatgccgtac

SEQ ID NO: 245439 - DNA, 448 bp, Homo Sapiens
cgcatgtgccgctcccagcgcatgtgccgctcctccagggctgtgatgatgtcctgcagcttctcaatgatgttcttgtagataaatcctcttttgactaacaggtctatgctggcccattaggatccacaggaatgaacaggaatcccttcgggaatttttcaaggcttacagggtatatttctcattgcttccgtaaaaatgtaaagctgttctttctgcagtcttttgcccgaagctatcggtcttttggggtttagcaaccaccctgaaaacctggacactcatttgaattgttgcatcttcaccttgtgaatattctgcgcctctccctgcaggttcaggagaagaggtccaaaggcaccacctctacttgatcgcagtgaaacttcccaccacagcccctccagggagccacagcgttcattgctcactcacaaatagtaca

SEQ ID NO: 245440 - DNA, 593 bp, Homo Sapiens
gccattctctttcccggggcacttggccctatcagagggacctgaaatgctgtccaaatggtggcagaaatgcagcgacattgcatgcagcagagtctttgcttcgaaagatggggcgccatgtttcagagaacatttatcttagtcccacgttcaggtgagaagacctcaaaggtaccctctgtccagaataaacattggaacaatctctcaattggcttttgtcactacacataatgtaatctcccttctttcagctcccccaacagtgagcatgcttcccaaaaaattacaacatcaaaaccaggaatgtccccacatctactattaccaggcttgcaattggttcaattttcccataaaaacatgtttgtccaaaagaagggaaactgtgaatttattccatgcatgtaataaactctgcaagaagtttaacccacataggtttgcggcactgcaaaattgttcatgggtctatgtagcaaatgattctctgccttgacaatcacgtatacatatcaagatttctatcataatgataatgagattgatgacttcttgttttcctccaataaagacaattaatcaccttc

SEQ ID NO: 245441 - DNA, 630 bp, Homo Sapiens
gacagttttaaagaaacgatttcatcttgccctggatattcagtaggagagaaaagattattggatatagatactaaaatatccaggcgtcatgaggaccttggtctgaaatcctagtactagagtaggtgagtgttaatgaccagaaaaaaatagtaattatccatgacactgtatacaatgttacagtgtaaaaatcacacccagaaccactgccctctgaagcaactgtattatacccatggtcagaaaagttaatcaagtcactcttcacaaatgccccattgctggagcatagaggctgttcaaagtggagcatggaggctcctgctgattgggagcctgataagtgttgcctggcagaggcagatacagggaaagccagcacttgggactgggaagcactgggcattttctacccaggcccatgggatctgttgcctcagagactgactcgcctttcctgagcattagacatccatcacctgggattagtctgagtagttgagcaatttgttaacagattagagatatacatcttttctccagtggacttggaatctgatggcctggaattgaatcctaatgtggctttaacactctcttggtatgtgatccaagaagatgagg

SEQ ID NO: 245442 - DNA, 593 bp, Homo Sapiens
caggtcttttcccctcaaataattctctctctgttgctaaattcctgctagcttgagagagcagacacccattgttttgtatttgttatacacttaacttcgattcatgctttgattaaatgtttctatttctgccctccctgtttcctacacatacctgtggcaagtcagaatttacttcagcaaactgaaggggaagagtctgtatctgagattttccctccagatattaaaaaatatggctgtttacaagttaagtgctcactgataaccattacaatggtacttaggcatggatatgcctgatactcacattagttactatttactgagcacttgctctgtgctaggtaggtccttcatatacaatctctaattcttctacaaccctgaaagaccagggctcagaacctgcacaggttacaccagtaatgagtggctgagatctgagatttgcaacaagctctaactgcaaagctcatgctccttctactttaacacactgcttccttcccatatggaactacttattccccagttgtcccttttcatgtcaaaggcagcacctcttcccactttgaggggaaaagacc

SEQ ID NO: 245443 - DNA, 416 bp, Homo Sapiens
cagggtcttttcccctcaaaggcttgtctcacaagtgcaattacctggctctgggtccaggaaagccaggtctcagcatacagaatacattcacactgtgtcttccagcaacccaccagacctctgcatttcccaaaccacagtacttctcaaaccagcacaccttggcagtgctagggggcagtgcacagaagccagatttggcaagagagaaaagggaaaatatttaagtgtcaatgtaaagccacagtacactgcatgattttattcagctcataaaagggttatttctaggagaagtaaggaattctgcaaacatataagacaaaatcagaatgaaatgattattcaaagaaacagaaggggtgcaaaaaaagagatgtctcctaagtctttttgaggggaagtcctggacc

SEQ ID NO: 245444 - DNA, 675 bp, Homo Sapiens
  misc_feature (594)..(630): n is a, c, g, or t
tccctagaacttattttctgatatatggatccatgaaggcaaggactatatataattttttgtgtttcctacacctagcacaaagcttggaatataatagggttcagccaccttaaatgcttgccaggagggcaaacgtatactcatgaaataaaggaaaatgagtatgtattcaataaatgtttgctgaaagaatactgaccctgagactcgaaggctacttaacccttacttatcatcaaatactcataataaagccagcaagcatgcttttatttcctgaaggacttaaataattttgctttccttttactcctgcctccagagtcaagtaataaaacctgtcagcatttaggcacttaatatgctgctgaatttgaactacaatgtacctcattcacattgaaaaacatttttgtgccccaaagcatagtagcatagatgctgtccatagtcacggtgattgattgctttgttcctgcaagtcaaacagatccatgagcctgagccttgcccatttcaatggtcagtaggaaaagaaagcatttgatagactgcactccagcctggatggcagagcgagactccgtctcnnnnnnnnnnnnnnnnnnnnnnnnnnnnnnnnnnnnnggggagaataacagtatctacattttagagtaatttagattgtgg

SEQ ID NO: 245445 - DNA, 627 bp, Homo Sapiens
tctaaaacattccctaaattattttctccccaccttctctcttctactccatcagcaactctaattcctgaaccacatcttccccataacacatgcacattagcacctctttcatctataccagcccatcttacacctttagaccttctctacctccctacctcttttttcttcctccaaaatccatttcaaggagaatgctaacagcagcaggctgagccaccatccccaacaaatcccctcccttgtttgcttactccagaatctggaatgcgggcagggccctttaaggctcatcacagggtgagtacattgacactgtatattcatcaaaaacaggtaaacaaaccccctgctccaaatcctaatcaagacctcctttatactctgtgggtgacttagcacatttagttttcagtatgtggtgagtatttttgggcaaagaacctccaaggtgaacaagctagcaggattctggcaagggggatttgctccgattaaatatttgctgttccaaagtccaccccattttggggacacgaaaacatacatcacatacaaattccacaccacagggtgaaaggaacgtgctagcaatggatgagtggaaccgggtcctctagagtc

SEQ ID NO: 245446 - DNA, 645 bp, Homo Sapiens
  misc_feature (44)..(44): n is a, c, g, or t
aacccaagggaaaggaaaataagtaccttaagtttcaagtcaanccctgtaggaatatggtttaagctgtgccccccaccctaaaatatcatccttgaaattgtaatcccctataatcccccacatcaagggagagatcaggtggaggtaattggatccttgggggcggttcccccatgctgttcttgtgatagttctcacgagatctgatgattttataagtttgatagttcctcctgtgttcattctccttcctgccaccttgtgaagatgccttggttcctcttcactgtctgccatgattgtaagtttcctgaggcctccccagcaatgtggaactgtgagtcaattaaacctctttcctttataaattacccagtctcaggtatttattcatagcagtgtgagagacggactaatacaacctgtaaggagagtggtccgctggtttcctctccagcctcatcgcctcgtattcttatgcaccgatgacttctctatgtcttgaagtacacactgagtctccctactattcctaagatagctcagggcacgctcctacccacaggggcgctctatgacgtgctcttcctctctatatcgtaatgccctctccccgagacacctgcttgactagcaccccca

SEQ ID NO: 245447 - DNA, 464 bp, Homo Sapiens
  misc_feature (20)..(20): n is a, c, g, or t
  misc_feature (33)..(33): n is a, c, g, or t
  misc_feature (67)..(67): n is a, c, g, or t
  misc_feature (79)..(79): n is a, c, g, or t
  misc_feature (89)..(89): n is a, c, g, or t
  misc_feature (95)..(95): n is a, c, g, or t
  misc_feature (110)..(110): n is a, c, g, or t
  misc_feature (125)..(125): n is a, c, g, or t
  misc_feature (156)..(156): n is a, c, g, or t
gggccccaccaaaaaggccnaaaaaaccctaancccaaacccggaaagggggaaaaagggttgggcnccggggcttaancccaaaaccnaacctngaaatggaaaccccnaaaaacccccagtgntgaaaacgggaactagtgggaggtgattggnatcatgggggtggtttccccccatgctattctcgtgatagggagtgagttctcatgagatccgatggttttttaagtgttaatacacactcgctctctcttgcctgctgccaagtaagactgcttccctttccaccatgattgtaagtttcctgaggcttccctagccatgtggatctgtgagtcaattaaacctcttttctttataaattgcgcagtcttgggtatttctttatagcattgtgaaaatggactaatataattggcaactaccagtgctttaaaatattttaaaaagtttttgaatct

SEQ ID NO: 245448 - DNA, 665 bp, Homo Sapiens
ctcgcattcaggtataactattaatcctaaatcattctctctccaagttgttgtccacaggagaacccatattaaaggggctccaagggtccaaagaaggtgtaattttagaacccaaaatagatataaaattgatgtcttacactgcaatgaactgaaacatatccattatccccaaaatctacccatttgtagataaccatgaggataaaaacacgagtcacctttaaaagtcgctagggcatcaatattattctggaagtaaaggaaagaatcttgcattattctgactcttacatgaactgtcatcagttgtaaccttaccactgatgagggatagctattcttctttatagaaaagttccagataataaatgaataaagaatgacaccattaaccaattatcattttgctacctctggaaaaaaaattatccaaggctgctaaaaccattaggtggatcaggctggtcatctcacaatggagacaaccaaacacgtgtctcccgatacagtgcaacaaaaactaacagaaccccatgttgtcaaaataaaccaccaacccataaattatctgaccagcctctagatcgaattccagtttacaggaaagagacataggaacatcttaatactactatgggaacaatcagcaatggatgatg

SEQ ID NO: 245449 - DNA, 610 bp, Homo Sapiens
gtccgtaagaaatataatatttgttccccaggcaatccagaatcaaaccaatatgcatattaacaaaataccgactgattagaaattttgcatcattagtccatggcatcattaagataatttctagaaaaaaatcctacaaatcatgaaataataaagcattttaaaatcacacactatgatgaaggttttccccaatctgcagctacctcctttcaaccaggctttccaagagtgtagagtctgctgtggaaaagtgtccaagtcacggctggtgcacactgccaggccctgcctgtacagaccttttctacttagctcttctcaggaagctagagataggatgcatctcttcacctgctgatggttagcctcttcagtccaatcagagattaaacatgcaatctacatgcatttcagcagagcagtgtgtttcctctggcacctcaaggaaacatgtctcaaatgcaaacaattgggagaaggaacgaggaaccaagggcctcaggatattttcaattcaatataattcaacgcactttattataaaccaggctatgtacacaggaccatgccaggcactttagggacacaataataagctagatgt

SEQ ID NO: 245450 - DNA, 258 bp, Homo Sapiens
tgctgggattacaggcgtgagccattgcgccaagagcaagcttctgatgtaggggctgcggggggcttcccaggccaggcaggttgctgtctcagcgccagcgtgtagcctcctcccaggatccggagcaggagggtggctgtcttttgcgttcaatccgctgggctgctgtggggttcccgcagagctgctccaaggggccgagagaagaaaggacgctgcccccaaggacagacgggcaagctggagtcaggagaa

SEQ ID NO: 245451 - DNA, 721 bp, Homo Sapiens
tcccatgctgtctcaggatacaagacaaccagtcagagtactcggtggttcagaggaggaggatgaagacttcgatgaacgtcctgaagggcgtagacagtcaaagaggcagctccggagtgagaaagataagccactgcctccactgctgacccgagtcgggggcaacattgaggtgctgggcttcaacacccgtcagcggaaggctttcctcaatgctgtgatgcgctgggggatgccaccacaggatgccttcaccacacagtggctggtgcgggacctgaggggcaagactgagaaggagtttaaggcctatgtgtctttgttcatgcgccatctgtgtgagcctggggcagacggctctgaaacctttgccgatggggtccctcgggagggactgagtcgccagcaggtgttgacccgcattggagtcatgtctctcgtcaaaaagaaggtgcaggagtttgagcacatcaatgggcgttggtcaatgccggaactgatgcctgaccccagcgccgattctaagcgctcccccagagcctcctctcctaccaaaacgtctcccaccactcctgaggcttctgctaccaacagtccctgcacctctaaacctgctactccagctccaagtgagaaaggagaaggcataaggacacctcttgagaaggaggaagctgaaaaccaggaggaaagccagaggagacgcgtcaaaatccgg

SEQ ID NO: 245452 - DNA, 587 bp, Homo Sapiens
aataacaattttgtgataattttattattggcaaattaatacatcaacactctacatcattgactataataataccttctggctacctctgtatcaaccaaattctgtaggtgcaaacatataccagggaattcttactggcaaaatgatcaatctggagtgtgcatccgctgtgaatggagcaaattgccctatacccattgataacctagctttcttagtttgtagatgtaggaaacaaaatagtgacagagagagaagggggtccacagggacatggtatatttatcagcagtggaaaaaaagtgcatagatcatttagtccaagaacttaaaactaaatagagccataatttactttggagagtcattttaatttgtctttggtaccaaggagaagacggaaccaaaaacaaactctccaagtatattcacacattcaacaaaatttttgcatgccttctatgtcgtaggcatttttagttcctggggatttggacatggctaagtcagagaaggccattgctcaccatgaacactgtataccagaaggcgattaagacgcgtactcctacatttcaagcata

SEQ ID NO: 245453 - DNA, 382 bp, Homo Sapiens
gtcggtaccgtgcagaatacactcaaacttcaacaaaaatgagcacgcttcctaccgcccctcagataatgtaagctcatccaccaagaagcctgcaccatgttttgaggttgagtgacatgttcgaaacctgtccataaagtaattttgtgaaagaaggagcaagagaacattcctctgcagcacttcactaccaaatgagcattagctacttttcagaattgaaggagaaaatgcattatgtggactgaaccgacttttctaaagctctgaacaaaagcttttctttccttttgcaacaagacaaagcaaagccacattttgcattagacagatgacggctgctcgaagaacaatgtcagaaactcgatgaatgtgttga

SEQ ID NO: 245454 - DNA, 662 bp, Homo Sapiens
gagcatcagtcgaaggtgacaggcttcttgcttagtcattttacccatctctgtgtagatgatgtttttttccatgttccatttttttgttcatcaatgccatctccccaacagcatttcaaaaataaaatttccaagtcctttttttaaatgtggttccagtcaaatgatttacccacaccccaaataatattatttacatccagtattaatagctgcatatcagtaattcttagagatcttctgatccatatttaacaatttaaatgatggctaacattattgccaggcaaatgcctgaaccaatagtttgtggactagttgccagccagatgacagccaggtatacacagggtaagaacataattaagtttctgccctagtctcttcaattgcagaaggcagacaacactctttctcaccttccagggaagtagattagcagattaacaaaatgatgtaaatcacataagctttacatcccccttccccttctaatacctatttaggaacactttaaaatttttcctttaggcatctagtctttctgtggtttagccacatgctctcccctttttggctttctccttctgtaaaataagtaaggtgaaagagcagattaggagtttttctttttcttacagctttcctgtgtttgagtt

SEQ ID NO: 245455 - DNA, 483 bp, Homo Sapiens
  misc_feature (77)..(90): n is a, c, g, or t
  misc_feature (309)..(325): n is a, c, g, or t
gtgtcagcagccttcccaagtccggggacctccattgtttcgcccccccggggtaccagggcccaacttcctttccnnnnnnnnnnnnnngtttaaaagttagttgtttttttggtggtgtaccacttttgattcccttcttctttccttctctatatgttaaggtttttttcttagtgggatattcccgtctagtggctcacactccatagtctcagcacctttgggaggccgaggtgggagaatcacattgagggccacgccgttttagacccgcctgggccaaatcatggtgagacccgttttttnnnnnnnnnnnnnnnnntatccctttgtctttggctttcaacaatttgactgtaatgtgtcttgatgtggatctctttgtttatcctgcttggagtttaactgttgaacatgtatattcgtgtcttttctcagatttgagaagtttttggccatatttcattgagtgtgattcgt

SEQ ID NO: 245456 - DNA, 118 bp, Homo Sapiens
gagatggagttttgctcttgttacccaggctggacaaacaaatgaggtttcctggacttgggaggctgctgtagcaagataactagatgatgacttagaagatctggatgtgacgtgt

SEQ ID NO: 245457 - DNA, 554 bp, Homo Sapiens
gcggaagaatcaacgtcaagacacacgatattattaccagaataatgcttgacaaatatctgggcaccctatgacccagtgaagttgacacataaaattaatcactgcaatatctttctgacatctatccatttttctgagtactcaaacacataacctaccatttgcattttgctttttcttggaggcctcctacccttagtcttccaccctcctactccagtctggactagttgtgttctaggctgggagcatagctagcatcctctattgtggtggcccctgtctaccacatcctgctttcttggttactgaaagcacatcctctaatagcttctcaagaaagggtgcgagggaagtattgttttagcttctgcatatctaaaatgtgttgattgcaccctagacttgacataattaaaccagttttggaaatcagtgttggaaatcatttgtttcttagagttctgaaggtattccaccattgtcttccagcattctgcttgtggtaagaccaatgccatcctgatgctctttgttattgcgtgtgcccg

SEQ ID NO: 245458 - DNA, 831 bp, Homo Sapiens
catgtaactaggagcatcatgtgatatggcaacgtctgtgagctgctctgatgtatttagcagtaagccgtcttgagccacatgacaggcactgccgcgaccagggacacaggctatctcataaagtactagcatgaagaatacagcagtgggactaagaaagaataaccctgaattgttcagtgtcagccaggagtatgtgagttttctgcaggagttgaattcctagggcaagagtttaaaattttcagaaattagtgggaatatcaaagtaaaagaaaatactcattcaatttctacatgtcattatgataaagaagagaaggatacagtagcctagatatagtcaggacagaacttttttgtttcagaaactttttgtaaatgatgtctgtcttattgtaaaaaattatccccagtatctttgcccaagacttgagtaataattttgtttgaatctcctatttttaaatttgtttcagtatactaccttaaaggcactaacttatgctctactcagttaggcctctttgtcccttttcctagagctcgtgggccagagtctctaatctcaccctcacaggcaacggggagttctagagcacacaagagggccgtactctggaagcatctatggttcctggcaatagattatgaccaggatgacgtatcggtctccgatacgtcgtacaccaacacattcagcaacctcactattctcgagcagccagaaaatgctatggactccttagggtaaagtgctggaaggcatatgagtcagtgacatgagttcttttagagtaatcagagctcattgagttgttggtcacg

SEQ ID NO: 245459 - DNA, 665 bp, Homo Sapiens
tagaagagtaatttgtgtcactcgaagtacatgttaaatgtagtgagtcttaccacatctgagtaattgtagagagttttgggggtttttgtatgtgttgcatgttttattaataatagatgtttcttcccttacacctgctaagttagaatcttttctgagattcttaagcatcttcaaaagttttaaatgactataatgggcccttctatacccacagagtaacagtgtaccaacagaatccacatattcatctcagtatcactcaatgaggatgaccagacactatgtttctcatgacatgatgcaataccacaacatcaactataaaggattcttaccaaaaaaaagaggaagaaagaaaagattcgacctgaattgaatcaagccttcggttctaactaccagtttgcacgggaatagtggggatataggatcaagttaaacaccagcacaagagagccatcagtcaaatccagaatgtggaacattatacaggacaaatgacctggtttctccaataaatcagtggcataaaaaagcaaagggaagggatatctgaagcagttaaaactgttataaaagagtcactaagcgaagatttttgagactatcaggcaatgtcacgattatattactggaattgttaatactcttttgcgtgt

SEQ ID NO: 245460 - DNA, 622 bp, Homo Sapiens
atgataaatattactgatacatactttcttatgtatcacttttcgtattttcttgaataaaattacttctaccttcatttggtctttataatccactgtccacagcatcttcctttaaaccaatagtcccagaagagaccctctgaaattctaggactggatattaaaatgcctgaacctgttatctaaatcctttttaagaaacttaatgttccagctcttgaactacactgtggaacagtaatttgtgcccaatttagtggaagataatgaggctcactgtaaacactacattgtcctgcaaagtaattctgatgagagtttactgacttctagagccattctctttaaccgtctgcaggtctaaggattaactatatttgtgatttgtaatcaaactgagttgtacaacactgcctgtgtttgtctggccaagacatttgcttcacttttaaaatgcacgttatctttggagaggtgcattattctactcgatgcaccctaaatctcattgtttaaaaccttactgatctaataccatctacacaaacaaatgttgtagttgcagaacttagtttatagacactaagaatgtgtatttcttcaatagccgtatgtggat

SEQ ID NO: 245461 - DNA, 378 bp, Homo Sapiens
  misc_feature (173)..(215): n is a, c, g, or t
acagtccacgcataatatgtcagtgtatgacaaactgccaaactgtatccagagatggcgtactatattatattcccaccagcaataagtgacctagtttttctaaatcctcaccagcatgtggtattgtcaaagtgatcttttcatctaaatgcatatatatacatatatannnnnnnnnnnnnnnnnnnnnnnnnnnnnnnnnnnnnnnnnnnatactatacgagacagggtctcactcacttgcccgggttgtagtgtagagacatacacactacgctcagtgcagtactcttttcaacgctctcttgtcctttttataagtgagtatactactgccccactacacccgacgcgtggcaaggggggactcctcta

SEQ ID NO: 245462 - DNA, 224 bp, Homo Sapiens
gagcggacagtgcacgctcggtatgtcatctccagctctaaccatttggtcccgacactggctctccctctaccttctgtccttgtctgccactggtctcccgtgctctggggtctctgcactgctggctgcctcccgcttctctcccctctccctctgccgtcctgtctcctttgcccagtctctccttgtttctcttctcctccttccttctctccacctcc

SEQ ID NO: 245463 - DNA, 651 bp, Homo Sapiens
tccccattacacgctcggttagtactcctgacatgatgtgatgacggtggcactttacctctctggtcttcctcccagaaatacataacccagcttaatcatgaggaaaacatcagataaaccataattgagggagttttcatgaaatacttgaccagaactcaaaactgtcaaggtcagtaaaaacaatgaaaacctgagaaatgtcacagccaagggagcctagaaacatgacagctaaacataatgtggtatcttgaaggggatcctggaacaggaaaatgacattagataaaaactaaggaaaccgcgtacatacatacatgctgacagcattattcatgacagccaaaaaatggaacaaacccaaatgtctgtcagtgatgaacagataagacaaatatggtctgtccatgcaatggagtattattcagccataaaaaggaatgaagcactgatatgtgttacaacatgggtgaatcttgaaaatattatgctcagtgaaagcagccagaaaacatgggctgcatgttgcgtcgttccatttataagaaaggaccagaataggcaagtccatagagacagtaagttagattagtagttgcagcatagggagagaactgtctcgtgttgtacataccggcgtgcagt

SEQ ID NO: 245464 - DNA, 380 bp, Homo Sapiens
atactagctctgaaacttttcccctggctggcttggctgcctctccctgccgggcaggggccagaagcctgggtgtcaggcagacccgagcctggctctgcacagcagggcattacgcgccccacgcatcctcttccatccccaggcacagatcaaaggcgcagcccaggaggcgggagcccctgcacactttccacctctgctgggcttagcctcttggctggttggtctgtggagtgcctgaagtgaccagctttttgtaagtagctgcagctgaggacagccaccctttcttcgtctctgctgagcgaaggctacacggcccttcctccttgcagctgtttcaccttctaccttgcgtggagccaggcttttgcacc

SEQ ID NO: 245465 - DNA, 380 bp, Homo Sapiens
ggaaaagagctcttaaattgaccattgatttcaaaactccagttaaaactggctagaatgctaactttgcctccaagataaatcatagtgtagagttacttctaaatcttacttattaacccaaatcaacataatgacaacatctatcacttctggaataggacaagtttctattagatccttgcaagcttccactgttccctgactaattagttaaaacttcatcaagaccaaattacaaggaaaaaaacttacggtttccaaatacttctaagaaatcaccagctcttccctctggaacaacacactcagtgatgacccaatagttcaggatgcatcacattaggccaagatccactgttagaccaatcatgatgccg

SEQ ID NO: 245466 - DNA, 570 bp, Homo Sapiens
  misc_feature (327)..(372): n is a, c, g, or t
attcggctcggtaccctcgattcgacggtttctctctctgcttcagttttgataaatttttgcttatggtcattatacttcatagtgaaataatagacccttcctcctagggttgagaagaaaacaagaatattcaatatcaacatttctattcaacatcgtagtggaggtttaaacaagtgtaatatgggagaaagataaagattaaaaagaaataaaaccatctttatttgcagatgacatgattacatagtagaaaatccaagagattctactattagaatgaataaacgaatttggaaaagttgctgggaacaagttcatttnnnnnnnnnnnnnnnnnnnnnnnnnnnnnnnnnnnnnnnnnnnnnncccactgtgcctggcacaaaataggcatataatcaatgtttgttgagtgaacgaatgaataaagctagtctgtccttgtcaaagtagcaagaaaagcctcagcctctcttgggaagacagcctgcttccctgagctcaagttgagcttcagtctcaactgaggagaaggaggggagacccagaatccactcgcacatg

SEQ ID NO: 245467 - DNA, 676 bp, Homo Sapiens
gacaacacctcacaaaagaaacgcagagatgttaaatcaactgcacattaaaagcagggatgctttctttacctagaacgagttttagatggagttgtagaaaattttattatgttaagagaaattcgtgacatcccaggaactctaaatggtttatatctctggctgtgccaaagactttttgtaagaaaacaatttgcaaaggttcagcctattttgaatgtgattcttgcagcctgccgacctttgaccataacggaattatatcacgcagtatggaccaaaaacatgtcgttaactttggaagattttcaacgcaagttagatatcctctccaaacttcttgttgatggactaggaaatacttaaatactgtttcattatagttttgccgagtggcttctggatgtgaaacactgtactcagaagtatttatgtaatgcagcagaaggacacagaatgttggctatgagttatacctgtcaagccaagaatttaacaccattggaagcacaagaatttgcattgcacttaattaactcaaacttacaattagagacagcggagttagctctgtggatgatatggaatggtacacctgtcagagattccctttctactttgatactctaggtacatgaagtgctacatgctgtgttcagctggggctcattct

SEQ ID NO: 245468 - DNA, 896 bp, Homo Sapiens
tcctggccatcactgtcagtgtatgcttgtctgggcaatgatgcggctgccattcgtgatgccttcctgacccgattgcagagcaaaattgaggacatgcgcatcaaagtcatgattctagagttcctcactgttgcagtagagacccagccaggcctcatcgaactgtttctgaacctggaagttaaggatggcagtgatggctcaaaggaattcagccttgggatgtggagctgtctccatgcagtgctggagctgattgattcccaacagcaagatcgatactggtgcccacccctgctgcatcgtgccgccattgcctttttgcatgctctgtggcaggatcggagggacagtgccatgctggtcctccgaaccaaacccaagttttgggaaaatttaaccagtccgctgtttggaaccctttctcctccctctgaaacatcagagcccagcatcctggaaacctgtgccctaatcatgaagataatttgcttggagatatactatgtagtaaagggttcattagaccagtcattaaaggatacactgaagtaattttccatcgagtaacgctttgccctactggtcagggtatgtccaagtcattggcagttcacgtggccgaaacagaagggagcagttgcacctccttgttagagtaccagatgctggtgtccgcctggaggatgcttctcatcattgccaccactcatgcagatataatgcacctgactgactctgtggtgcgtcgccagctctttcttgacgtgcttgatggaacctagcattactcctagttccagcctcagtgactccttccccttggcatccagtgaagtgcactctgctgcttatcctactccggcagtgtaagagaggtagtattctgtgga

SEQ ID NO: 245469 - DNA, 501 bp, Homo Sapiens
acgcagagagcgagcagttgctcttcatcatcaggcacaggtttaatgagggtgtccaccctgcctttgccctggagaaacctggaaaatgtactttgcacctggggatagagcccccggattctgtaaggcacaagtgatccttggctttcagaatttgcaagaacagcgatttgaattttgggggggtctgctgttcattcctttaggtgctatacattattcaaaaagtctcccgcgcatttgcactaatgatggctgcatgcatagctatcagcatgtgagcaaaatcgacaagaaaaccttgactttacagagcagtgtgtgagtaaacagaatgaaaacaacaacctccactctttagtttatataagtttgagttctttcctaaattaaaagatctacacttgagttgggaaccgaaagagagaaatggacttccatctgttttactggtaagggaaatcctctgatggacagtcagagtgaaggaaggtggtg

SEQ ID NO: 245470 - DNA, 360 bp, Homo Sapiens
gcgatctcgtcatagtggagtgatgagtgatgagagatgagacgggagagtatgagtgagcagcagtgaggctggctgtgcggctggcggagtgaggaagcagaggaaggtgaagagggaaagcagagagagaaatgccgagaggatggagagcatcctgcaggcactggaggatattcagctggatctggaggcagtgaacatcaaggcaggcaaagccttcctgcgtctcaagcgcaagttcatccagatgcgaagacccttcctggagcgcagagacctcatcatccagcatatcccaggcttctgggtcaaagcattcctcaaccaccccagaatttcaattttgatcaaccgacg

SEQ ID NO: 245471 - DNA, 238 bp, Homo Sapiens
  misc_feature (50)..(50): n is a, c, g, or t
taaaagcagcagactgtacctttgctactgagcacagagagcttcttctncctgagatctcttcctcctgcttgggtccggccccagctcctgctccagcaagtatgaccatcctccaaaagaaatgaaggctacaaaaatgctcacatcttattaaacctgctctttgatttctcttgggatggaagcactcttctaaattgcatcatgtatattgcagatagtgcccaccttccca

SEQ ID NO: 245472 - DNA, 134 bp, Homo Sapiens
  misc_feature (134)..(134): n is a, c, g, or t
aatccccagcgcccagagctgcctctgtccccgggaggtaccgcatacccattagctgggtgaaaagtcaagcctgggttggaaattagtgttgcgattctcttcccaatcatgatgccgacagtggcccgggn

SEQ ID NO: 245473 - DNA, 799 bp, Homo Sapiens
  misc_feature (30)..(31): n is a, c, g, or t
  misc_feature (37)..(37): n is a, c, g, or t
acttcaacctgctgggtttttcttcccctnngtattngtgtaaggagcactgcactcccataaaaggttttaaaatacaaaatgtacaagaacacacaatttccaagtgctgtaaacataactgagaaccagttcctttactaaacatccattttataaaacacaaggtttcaatttgagcccatctgagccttaaagatccattctgaataccaaaaacagggcttcacagccaggcccagaagaggtctggtgataatggctggccctgtgtggggatagtttacacccgggcagcagcaccacacatgaacccaaagacatgttctttttaaagctgttttcagccatgtttctctgtgcatctccagtaagcagaaggctacccattccattcctcaacccaagagctagcacagttagagtaggagggggtgcgtactagcacgtgcccagttgctcagtgctgctagtagaaattgatttgcatagtccaatggatgtgtgctttaacaccactatgttgcacaaaaatttaagtctttatctacaaagccaaaaaatattgactcttaacaccaaagcttttacaaagctgatataaaactgcttacatagtatacaaagctctattttaaaatttaatgtttattttaaataggaaagcatttctagtgctacaggcatcaaggtatttagaaggcatcaaaatttggtgcatagcaactctggatcatagaggcttttaattcttgagggcacaaagggtattgaaaggggaactcttgcaataacctcc

SEQ ID NO: 245474 - DNA, 408 bp, Homo Sapiens
gttatggtaaggggatttttgtataagtcaattagttgttgaatcattttctcatctgtaaattgaaaatggcactctcccctgagataatgcatgttacttgccatggaaatataagggtcaggattctatgaattaatttttaagtagcttagtatcattcaatagtattctaaaataccaggttacttatactacctattcatgtatgacatttgtgttagtataccttctattcatcaaaggggctatgagctagacctgcagattaacacgcagatgtggccttaaaaaaaatatcagctaatctgggatccagagaagtaggtgaaatttgaacaatgaaaatacattaacagcttctaaagatttatagcagtattatgaccagcatgcagtgatagacgt

SEQ ID NO: 245475 - DNA, 498 bp, Homo Sapiens
gtccttcgactcgcgcgatagttttgcctctcccagaatgtcatataattgcaatcatacaacatagaaagccttattcagaatggtttgcacttaacaataagcatttagggttccatatatgtcttttaatgacttgatgtctaattcttttttatcatatacctgaggactacattctacaaccctgctataattgcttattaatgtcagcaggtttttgttatttagaattttctacaaagacaatcatgttatttgagaacaaagacagttgtatttcctccttccaaatttatgtgcattttatttccttttttttgggtatcactgcattagatagcacttccagtacaatgctgaaaagcagtggtgttccttgccatgttcctgatcttagtaggaaagcatttagttggaaacatcaaggatgatgctagatgtagggttttttgtagtagttctttatcaaattgagtaagttctcctgtattcctt

SEQ ID NO: 245476 - DNA, 762 bp, Homo Sapiens
ttacattagggggcagtgacattatatcatactgatgagactatgagctttatgaagttctatttgggttaaaaagcacaatttctcctgaccagaaatgatctctgagtgctaaatatttcatgtcgatggaataacgcaaatgattaagcaacaccccataaaatggggcagacccagggaggaatatatatccaaactgactcatcccagtgagctcaccgcacatgaattacaaatggagcagggtgcattaagcccctctgctggcagaagggaggctgctgcctgccatgcgcctgtgctgagaatggcaggtccccagggagaggagaggccacccccttctctgtctcttccatcacaggagtgaaagcctcagcgcatgagctgattctgtgcagtgctcgacatacagatgagaacactgaggcccgagggacagcctttgacctggtcaccgtgctcaggaggaggtggttacccgcgggcctgagggtgctgactttttagaatgggcgagggcagctgtgtcccagtgaccagaacgattactgccttaaaaagtcatgaaaatgatcgtgaactgtaccccacacacgagcgcgcgtctgcccccacaagactgtggagacgcccccagcttccgccgccagctcgcggggcaggaggggtgagagcgactctggccaggccccagggacggggaccgggtctcgtggcctgaccgggagagcccaggcactcacgtggcaggagcgc

SEQ ID NO: 245477 - DNA, 607 bp, Homo Sapiens
  misc_feature (114)..(148): n is a, c, g, or t
agttagtcgagactcccttccttcgtagctcctttaatatgtgtcctatttttatctgcagtagccccataaaatctctttaagagaatgagtttggtctctgtagaggtacannnnnnnnnnnnnnnnnnnnnnnnnnnnnnnnnnngtaacaactttggttccattatctacttggtcttctaaatttacgatgaaggagcagttctctttctcaggttgcaatagcctatcgcttgtcatttgcctctaaattcttttgcctcctttgatcaacaataagaggatatttggcttcatcagataaagcataaaacagagaacataatttacctttgtgtaatatctttggtaattttagaaaaaaggtacaaagaaagaatataaattaagcttcgaaaggctctcgaactacaaaaaactacagtcctatataaataaatgacaggaaagtgggtgcagagctgaagtgtggaggggttctaaggactgaggttgtactgacctgtaaccatcacatttctgcataccatgtttgggacccccccaaagcccaggtcctacatgatatcttctatgagttattgtgatactgggatggtgatat

SEQ ID NO: 245478 - DNA, 830 bp, Homo Sapiens
gacattcaacttgaggctcctgttagttaagctatcttctttcacttgaagcaggtttgagaggcctaggccagaatttaaattccttttatgaatagatttccctttcttcctgaccccaaggtcagaggagactatatattccatggctgcctctaagactaggaataggaatatctgaaaacagcatttctaagggtggtaaccacaggtcgattttaatacgagtcctttttcttgtagaggtaagtataatcttcctgacaaggtagtcctcttttcacggcacagacaatgggctttctgtttatgaggggtgagaagtgatgtttgttactatgttctccagcaagtaaacattcctctgctcacctcccaacaagactaacagtctttttagaagtaaatatattcaagacaaacgagaaaatcctggctacccaagtcgagtatatacaggaatacaaatcggttaaccagcagctgtttctcagagttgtgactcactgagcaccacttgtcctggaggctggatgatggaggacatctggttataggtactgtagcagggataggtgcccacgggaggataggaactacagcagatcgctgttttcagaccggggaggagtatctcattgtgaaaccgactctagagtggttctatttggtcttcagtgttttagcctcattagttcatatttggcatgcagcttgtggtgagtactgttctaggactggccaaaaatgggcaaaatgtatcactccaaacactactgattcagctgttttcatgtcttaaaatgcccacactcgtcatcgagagcata

SEQ ID NO: 245479 - DNA, 711 bp, Homo Sapiens
gtacttgcgctggatataggaggcactcgaagggctctcgctgcccaattcgggaactattctgaggaactcttcccccatccccaaaggtcaatgatgaagtcgacttttgaaaaaatgggaatccatagtggatatatgaaaataaatgaaggagaagggagggatgactggcaaatgaggaaggagtgctgggctgcagaaacgtcgcttggcagtcatcataaagattgaatcaggccagaatcagcaacatttgctgaacctggtcggggaatggggaagagtctcatgaggaacaggatatgtacatggagacagtgtgtctccagagatttcttattagttgaaaagaaaaaaacagtaaccatgctatggagaaagtggacacacctcgactaggtgtgccaggtactcatttattgcctcttaactccaaatttccctgaccttgcccttccttgtcacactgaagagggggctctgaaaactcctttaccctttgccagcctgacccacagtgggctatgaaggggctaacaaggctagaggaggaagatggcctttttcttctgtctcctttcgtcctgcacgggtcccagcagcattccccaccgtgacagctctctgctcctgtggcttggcgggggggcacctccagtaagttgttctccagcatgggacagcagcatatccagcgacaagtagcgg

SEQ ID NO: 245480 - DNA, 622 bp, Homo Sapiens
atatgagagcttgagccttcatctcattggtgtatcaaggccaagcccttgtttccctgcttggcaaggaaacctttaacggaggtattagccttaacaggagcttggattaagtgccatggtctaaaaaccactaattcattcagtgggcccaagacacggtatgctgaggtcttagttattttgaagttcaagttaccataagaaactatgaactctcactttcaaagttgtatcctgtgaaatgtgacgcaggagagcaaaccaacttccatcccgcatgctctccagtatcagaaggaaacactcggacattttcccttggaccgagaagaaaaacatcctctcttaaatctaacttggagacttgctgttctttgagcttgaactctgtacacaatagggacattgaaaccataaccatgcaaccttagcaggtggtcacctagtcaatggtgagaataaacaccccttctacagaccattctcttctctataataggcagtaacctattcaaagctcagcacaattttctcctttaggcaacagaaagagttagtgaatgagtgttggcagattgacagcccttcataatggctcactatatcccagcgacagtat

SEQ ID NO: 245481 - DNA, 869 bp, Homo Sapiens
  misc_feature (717)..(735): n is a, c, g, or t
ggtagactgtacaaccacaccagggcgggctgatcaaatacagtaagaagtgtccggattggcaaaccagcgggtccctcttctagatgttatcagagagatactgttagagagaggttgctagatgttaatagaggctgctgttagattccagctccctcctcccctggtcccttttctcccctcatgccttaagattgacccactgttgccaaagcttccacttttaaaagagaagctttttaaaatatagactctcctgatttttaaatgttttcagttaagtttttaaaggaacattcataggccaaaccaaatacctgtgggccgtatgtggcccccggggccagcagtttgcagctccttggttataggtgcctctaacccattgcacaagctccctcaggcatttcatgtctttcctttccattccccctgggcctagcagggagctggcatgtcacagtgggtgctccctaattattggttattgacttgaatgctagactgagcaagcacctccctgctcacagggtgttaacatttttccctcagaactgtttgtatgtaatgctattctgaattgcttcagttccttacatactttagtgatagtctgtatgtgcctggaaaagtcatcattccttagattctagacaactctgttcttctgttcttttcctttttcctttctctctccgtcccctcaacatatgnnnnnnnnnnnnnnnnnnngccagttcttttgtatctggccggttaacacagggcttcataacatggggtcggctgttattaagcaacagtggtttccggtagctcactgactttgccctctctgctggtagccattgctgatttccatcctg

SEQ ID NO: 245482 - DNA, 803 bp, Homo Sapiens
  misc_feature (175)..(185): n is a, c, g, or t
  misc_feature (684)..(731): n is a, c, g, or t
ccaccatatatgtgtattacagtggcatgagccactgtcctggccaaatttcttttcttgttgcgaaggcagacttttcatacaatactgaatagaagtgatagtagattactttatttctgattttcaaaggaatgctttccgtttctctctgttgaagataattgcgtattgnnnnnnnnnnnaaatagtaacttttatcaggttaaggaaggtttcttctatttctatttaaaaggattttttaaaatcttgaattcatatgtttttatctaatgcattttctacatcagttgaaatggttgtatgaactcttttaatatgggtgaattatatttatagattttatgttaaaatatccttgtatatcttggataaactcaactggatcatgatttatctttttttatatgctagattcaatttgttgatactttgttatgatttttgaatatatattattgtgtaaaagtgagcctgtgattttctttcttgtaatgtttctgtccagttttggtgcctggttttgctctctccttagaatgagctgggaactagtcactcttgttttctcacctataatagcatctgggtccagtgttttttatgtgggacaaatttgaacttgtggtcaacctctttaattgtaaggatattcaggtcttttgttcttcctgggctagnnnnnnnnnnnnnnnnnnnnnnnnnnnnnnnnnnnnnnnnnnnnnnnngcctataattatggatatctgttttttatctgctacttctgtaatacacagctaatggagccgagctccatc

SEQ ID NO: 245483 - DNA, 379 bp, Homo Sapiens
ttttaaaaataatcaatattgtcccagtcctccattttacagatatggaagttgtgattaaaatgtgattaatgtcacagaaatactgggaaagccaagcttctaacagtcattccagggtcattgccagggtgtcaaatcctatgtcactgcacagtattactataacaacaaagtgtccctttcctgacttcctattccccattcttgatccagcatctttgggatccacttccaggcattttctctggggtcctgctggcttaagtcaggcagatcctgcagcgcctttgccatatgatcctccccttctcttacagacactgtacttacccagttggattatactgaaacttagtcctcatactgtctggtatcg

SEQ ID NO: 245484 - DNA, 457 bp, Homo Sapiens
cacatgtatatatgtgtatatttttcttatctagtgtatatcgcttttcttatataatagaaatgctcccttgaaaaatatttgaaaagtatgaatggacagcctactatgtgcaattgctatgtaatatggtcatttacacaccacacaccctatccttaataggaagtcaatttcttaaggatgggatccacacatgacacttaatattttgtcttgtgtacgtggtagcagaagaaaatattttctgagaaaactaaatgagatttgggttctaattcgccttccatcacttcttagccatgtgaccatgaaaagacagttaaaactttgggtcacaagtctatcatctgtaatccaggaaaactgtgctgggttttctgggcctatgattaaagggagggccagccatgtcctagagtttctggtgaccctcttccaaagtagcaagacactt

SEQ ID NO: 245485 - DNA, 547 bp, Homo Sapiens
tgagccactgcgccggccccacatttaagtcttttaagtagcctgctgttaattctgtcgtagtcttttctataaaacaatactgatccaatttgtgataaactcacccactctcatcgcagaatatatatttctcccgttcgtcttccttctttggcccactttatctgtctacctccttcattttgtttctccaggaaggactgatgtaaatgggattttcagaaactccctccagcatgcccctctctgcatctggaatacaggggtcagaggatctactctgtctagggtccttcctctccctggcaggtcttatggtagtgtacactgtggtttgcctctatcagtctgtccttcatttctgtgaccagatctccaacaggacatgttctaaagaagtgtggtagaaactagcccatttcaaactttgcaccgtgatttttctacacgccaccccactggggcttttgtgatcagttttataataaagagtggatctagattgaaccttagttttgctacagtgttcattcagtcatccata

SEQ ID NO: 245486 - DNA, 756 bp, Homo Sapiens
  misc_feature (401)..(401): n is a, c, g, or t
tgacgcttaagacccccgctgtcattacagctctagtgtcgtgactgggatgagttcccgtgtctgcacaaaatgggctcctgttttgaggcaatgcagttacatgaactctaggcaactctcctaactggtttaggacatgtgaggactatctacctctcctgtagcaaagaacacaggcatctgcagcagtaacgaggactgctgggcagttgtagcttaccctctccccataagaagttcatcctggctttgagctgatctcaacagggaaaacagtatggctgaaatagggttcttcactctcttgtctatggtgctatcctgggtttctgtgttccacgaggattttgcaattttcctggtgctctccagtgtacttccgcattcatgcatagtgnaaaatacagttgtttattcattgttttggtccctttttgctggggaagatgaataccaggacaaagtctagacagctatcttgctgacatgccagttcacaagttttttcagttgtgtgtaatttgtgacaatcttgttcagattaaaataaacttaatttcaataagtatataaaaattttgcatttgtatagctctatttccttctgcctcctttatgtctataattgacaaaatttactgtaagtctgataggataatcgtctagtaattatgtagaccagtctgatagtaacatatacatatgcagtagatataattaaaaatatactagacatgcaatgccgcatgatga

SEQ ID NO: 245487 - DNA, 327 bp, Homo Sapiens
atgagccactgcggccggccccccacttattgttgaatgtgtagcagcagcttcccaaaagccagcatcgtttttaggtgaaaaatgggcctagaaaatcaacgcctttgccagatctggtggtgaccatgcagaggtgggcgtaaggaagccatggatctgaacaaaacctcagttgttcgtattagagccaattatcagattcagtgggatgcaaatctatggagagcgtgtgttcaatatgaaaatttaaaaaaatcttgaacttttagaatgtggtcttatctagtccttaaaaattaggaaatttttagtgcatgtagcagc

SEQ ID NO: 245488 - DNA, 160 bp, Homo Sapiens
gttgtcgtgtgagcaaagacaaacataaattgaaaaacatcctgatgtttagaaagtttcttttggttacgtaggtatgagaatacgacaaagagttctaagacttagaaaagacaattttgtggtgtcattccatcctgagacagattgggggcgggtg

SEQ ID NO: 245489 - DNA, 175 bp, Homo Sapiens
gtagagcagatgaggagttagaaattatacaaagattttaaaaagctaaggcagctacaaactatagagaataataccaggaaaatatggcattatatacaggaagaagtccatgcttctaaaatggcatcctgttgagtttttagctctatagtaagttgtacaatctagtgtg

SEQ ID NO: 245490 - DNA, 181 bp, Homo Sapiens
atgtgatgttgagaatcctggagcagtagatttctttgtctttggcctgcggactagaaagagggcagcagtagtatgctggagcttccctgggataccagccacatggtttcttttcattagatctgatttttgtttctcactgtgatatataaactcagacccaaacattcagccgtca

SEQ ID NO: 245491 - DNA, 295 bp, Homo Sapiens
ccttgttggtcacaatttctgttatttttatctgaattccccaccaaataatttttccatatgacagtcacaaattctttaacgatggaatgtcgatgatttgatgtcacttgctatacaggtagcacttgaccttgtggcacaagactgggcccatgtggtggtccctgagaccttctccatgctgggcctcagaggctatcagtgtaggaattcctgaggcactggcagctacttcatctagcatgtctttatacatttatgtcttttaaaaattttcaaagttgaaatttag

SEQ ID NO: 245492 - DNA, 454 bp, Homo Sapiens
tggaccctgtatactcaatattataactcaaattgtttcttctcgcctagaagcaatcaaacttcaaatggtgctgtaaactgaaccacacgccattcttccaaggatccttagatcgaccccagaaggagccttagctgctgttccccattcgatgccccttttcagcaggaagtagccagaaagagtcatcgccccaaaccccctaacagcagttagtgtggcatctccacaggggggaatgttgtaggaaaaggggtccttgggaagtttttgtttgttaaagcacctctggaaaagtttcttgcaaagccctggctctcagagccaggccagcaaccattgatatgcaaatgcaggccattagaaactgggcccacccaaacatggagattccccgggccttcttgccctttccccacaggttctgcaacatggcgcacccccacatatc

SEQ ID NO: 245493 - DNA, 473 bp, Homo Sapiens
cctaaatggctgtagggccagtgaccagagatgctgtgcttgacagggtgccaggagtggtcataagaggctgagaggtcttcagaatggtagttgtgaaagttggagacatttgtgctaacgttggtgcttgtggctggaagggtttgctctgtggaggactctgttaagcgatggaggccaaggagagtttgttgttacagctttggtggactctgtgggcagagacaccaggcttggtgactttgattctgtaatgactttctcttggtgtggggtgctctggctcttaaggtctgcagtttgactactatggagcattgtcatgaatgatgtcattgttgatgtctgaaatgaagtcacaggagtctcccttgccctgggcaggacaggggtagaagatgactgtggcaaggttgtttgtgagacagaaagtggggcagatgtagatgtcgttaaggatactggtaaag

SEQ ID NO: 245494 - DNA, 275 bp, Homo Sapiens
  misc_feature (139)..(220): n is a, c, g, or t
agaagagggtttttaaagcttatttgggactgccaggagtggcaaccatgtattagggtaaaggttgcttcactcttcactgatcacttgtcttaaggacttcaggcttacggaaactacagtagtcggaaagcaaggnnnnnnnnnnnnnnnnnnnnnnnnnnnnnnnnnnnnnnnnnnnnnnnnnnnnnnnnnnnnnnnnnnnnnnnnnnnnnnnnnnggattaggaatctgacacggcttagctagatcttctgagtgagtgtctcataaga

SEQ ID NO: 245495 - DNA, 586 bp, Homo Sapiens
ttcaggatggaggtctcattagtgccccactggtcaagaccttggaaaaggaagaggaaaaggacctcgtcatgtacagcaagtgccagcggctcttccgctctccgtccatgccctgcagcgtgatccggcccatcctcaagaggctggagcggccccaggacagggacacgcccgtgcagaataagcggaggcggagcgtgacccctcctgaggagcagcaggaggctgaggaacctaaagcccgcgtcctccgctcaaaatcactgtgtcacgatgagatcgagaacctcctggacagtgaccaccgagagctgattggagattactctaaggccttcctcctacagacagtagacggaaagcaccaagacctcaagtacatctcaccagaaacgatggtggccctattgacgggcaagttcagcaacatcgtggataagtttgtgattgtagactgcagatacccctatgaatatgaaggcgggcacatcaagactgcggtgaacttgcctctggaacgcgacgccgagagcttcctactgaagagccccatcgcgccactgtagcctggacaagagccatc

SEQ ID NO: 245496 - DNA, 631 bp, Homo Sapiens
ggtgtgcctgctttaaggacctgctatcaggaaatctacatgtgtgcacagagagagaaaagtagaacagttctttgcatttggctctacttactaacaacccctctagaatacattggtgatttcatttaaagagattgtatgcatttgtggctttcctgatttctgagtctgtgtttggaggtgttactgagatgtgccagtgtgcagaatccttgctggggtttctacagtccccaacgtgaacagtattaagcaagaggtggactcgagcaatccaggagcccagactgagcaaataagtactttccagcctgtgtttcaggagaggactgtgctggatcatgcttgccctccacagggaatacagcatccttacagcttgcatgcaatcaacctcttttgtaaatggaaaataaagtctgttacccaaaggccatgctgatcccctgctccctgctttcatttatgtttgctgacctgtggagaccagtctttctgacacacagtgaagctcaacttgcctcctggctgcttcggcaggtggatccaatttacgaccgctccagatgtgactgtaaagaaggcggaaaatatgttgtccaaatgccatcgctgaagcacagcatgg

SEQ ID NO: 245497 - DNA, 481 bp, Homo Sapiens
ggactgttcccccaaatcccatccttctccttccaacttggctgaaacccacctggagacgcagttcacgtccaggctcttccactgtggaatcttgggcaagtcagtaacgagcctcagtttcctcacctgcaaaacgggtacagcattcctgtatgatagctcacgccgttgttgtgaaaaccacatagacttggtcaattctcggtcctactctgccctcccgtctcagccctcgtgttgccattgcctctctcggatcctccaatcctcacgtccttcacctggtctctggccctggttcttattttctctcaattccctactgcctgtttcttactttgaacctggaggcagcctgcagccccatcccatctcctgccctctcctgatctaactccctgctgcatctcttgctctcattccttagacgtcctccccttttgaccccgttccttcatccatccgaagaacagcatct

SEQ ID NO: 245498 - DNA, 504 bp, Homo Sapiens
ttcccttttgagcaaattcttaaatgaatagctccaatatttttataagaaaaacttaaagtttggaccttccatttactcacataatgtttatattgttaattaactcatctcccggacatgctaaagcataaaacctataaaagtgcactcagaatggaagtggtttgttgatctaacatgactttctgaacaggtagggccatgtgggctgtgctctgttgtctaaagcaaacctgctgggacagtttggagttctctacctcttctgaaatcagtcagtggtggagtctggagagaaggaaaatgacccattaacctggctacaatcttgacagacaagcagtaacaaatagctccgagttgccatttgtgtcacatccctgaaagaagcatcgaggcttacccagatggctacaggtgccaattcttgactgagttgtggcaggtagagagtagagttagctgtgctgcctttaggggaaagagcttcttatggatcca

SEQ ID NO: 245499 - DNA, 665 bp, Homo Sapiens
  misc_feature (645)..(645): n is a, c, g, or t
acatagtatgatacaactaatatctaatgtaaacttacgtgtttactataagcctcattcaagatgaggaggtactaatgctggttatttccttgaagctttatgtggacctataaataaaaatccaatctcctgctaataggtatgcatattgtgagaaaaacgttaggagctggtagtaaaaaatgagattctatgccaaaataacttctcttcatatttgcctaggcatttcttgacctttacccacttacgcaaggagaaggaaatcataatgatgtcatgtgatcaaaggaaaccatggaagggttcacgctgatagctgatagcttttacagtgctcattcctaacagtggatttacttatggaatcgccacttatatatgtttcagttttgcttttgaacatatttgaattttcatcaggaatagtatatcataaagatgatacagagaaacgctttgcatgttctaacaaagggttccctcaagagaatgaaataatcaagttgtatcttttcttagaaaacttgaaaatccagtgtttcttccaaactgaaaatgaaattgcatcaaaagcaatgctaagtgtgttcacatcaggaggacttgctcccagcttgggaatcatgaatagtacatatnatggcatcttccactttaat

SEQ ID NO: 245500 - DNA, 394 bp, Homo Sapiens
ctggttgacatgagtattgatggatttgactcttcaaggcttctgacaaagcttggttggttagaggaaaaatgtagtgaaaacctacaggcaacaccatggcttgccctaaccctctcgtcttcctgttctagcttttcccatatatcaggttgcagacatgctgaattcccaccctcctggagccaagctgccaatttctcattcctgtaaccagtggttttgtgtagataaaaggcccagaaggaagatggtcgctgagcagggagccttcggagttagaccttctttagccagggccagtggacactcatctcatgaatcaatactcatgtaacagtccaggggataccgagactacgaaattcgataatcattggatcatagctgattt

SEQ ID NO: 245501 - DNA, 372 bp, Homo Sapiens
  misc_feature (97)..(231): n is a, c, g, or t
aggatttttatatatttatggtccaagttgggaagccattagagggtttagggaaatagacacatgatctgacttatgtgtgtacttatcttatgtnnnnnnnnnnnnnnnnnnnnnnnnnnnnnnnnnnnnnnnnnnnnnnnnnnnnnnnnnnnnnnnnnnnnnnnnnnnnnnnnnnnnnnnnnnnnnnnnnnnnnnnnnnnnnnnnnnnnnnnnnnnnnnnnnnnnnnntaattccctcttgttattgtacttacacatgctcgaactagactagtaaatcccattctccctcagtagttcatgaacgttgttacagttctctcccttctcatgcagcatcaaagtgtcttctcaataacatttccatgc

SEQ ID NO: 245502 - DNA, 151 bp, Homo Sapiens
  misc_feature (27)..(27): n is a, c, g, or t
aggattagagttaatgaagggcaaagnggtagcagtcaaattggtggtgcctctccagcatcattcctaccgcctactttctcactggtagacttggaatggactcattacagagatgtcctgtgattggccgaataccaccaatccatag

SEQ ID NO: 245503 - DNA, 262 bp, Homo Sapiens
  misc_feature (116)..(116): n is a, c, g, or t
taatgcctaatcagtatagagtctgctttcatgacttctttggcaatgcaattcccttttagaagtggtagacatctgatctgtttgtttccaggttcgtttgcatgtgcaagtanatgggagcccaaactctcctaaacgaaatgctcaaacttgattttacttctctgcctcctcatcaccacaggcttctcatttcatttcgggttagcccacctggtctttgttaccgcgctgagtgttaatcggcctacagtggaga

SEQ ID NO: 245504 - DNA, 278 bp, Homo Sapiens
tacataaaagactgttaaagattttcatataaatcgttttagaaagaatcgtgagtttgagttctcttatcttttaaataaaacattaatgctaatcttatcagccgttgtgaagattaaataatttacacaaattctcatggccagcaagtgctaaaattaggacttaattatacataatctcatagataactctgcacacctaggggaatcctttaagaattaaacattgatgcatggactgatatgcatagataggaggggtacccgagctcgaa

SEQ ID NO: 245505 - DNA, 413 bp, Homo Sapiens
  misc_feature (34)..(34): n is a, c, g, or t
  misc_feature (65)..(65): n is a, c, g, or t
  misc_feature (67)..(67): n is a, c, g, or t
  misc_feature (95)..(114): n is a, c, g, or t
tatagttctaggctttgtgaatagagagttctgnagttacagtaccaagcaaaaccctcagaagngntgcctctcttccaagtttcaatcctccnnnnnnnnnnnnnnnnnnnngtcatgggattccagtaatcctcagacagtgtcctacccactatctgctcacattctccacctagcagcttccaagcaactccaggaaatgacttccactggtagttccacctacaccctcaggcatgctctcagagcagcattggtgggctgctttcccatcagtggactactttcctggcaatgccagctgtgtcttcagggtactctgtctgtttctaaagaccagttcccggccagagccttctggcagctttctttaccatgaagaggctgcctccagtggaaatatcatcaag

SEQ ID NO: 245506 - DNA, 195 bp, Homo Sapiens
  misc_feature (34)..(34): n is a, c, g, or t
cccattggatggccgcctgcatttcggactctanaggatccccccaatgcatcttcttatacttgtgtaattagggaacacatctattggatatctcttctcgtatcagagaactcttgaaataagtcaggctttctaagttctgcttttattgccagagttgttgccttatacctttgaaatatagtgaagtca

SEQ ID NO: 245507 - DNA, 281 bp, Homo Sapiens
cgtgaattctaatcaatagatgaaatttgggttttccgtgaagaagacaacgactcaagaactcaccctctccattattatctagcttagactcttgtctttctcctccagcaatgcctagtagtttcctctgatcactccttaacccaagtctttgcatccgccagtctgtttattctgccatcagataatcttcctaagtgtgattagattattctcatgtttataaatgtctattaatttccatttgcatagaagatagaagtttgttttagaaagca

SEQ ID NO: 245508 - DNA, 518 bp, Homo Sapiens
  misc_feature (32)..(32): n is a, c, g, or t
attcattaggtgtttattgagtgcttgctgtnggccagacctggtgccagggatcctttgaataagaaagacacggtccccgatctcgtgctcacattctgtttgtgcactcgtgggcccacatggtgatgcgtgcagttaaacaggaagctggcggaatgagtgcctgcgtgtggacggaacagttccgcgtctcgagtacagtggtggggagatgtgtctgtgtgtgtgataaagcttcacagtttgtgtgtatctacacatgacatgtaagaatgttggtgtgtgtagaagatgatgcagcgtgctgaaggcctgcagtccaggtcatagctgtgtgcctgggttagtgtcctggttttgctcatgtccttagttactctgatgtgcccttgggggatggaggaggtagggtacacaggatctctctgtactgtttttgcaacttcttgggagtcttttattattttataatacaaagtgaaacaaagccacaggagctgtttgcaggtgatggc

SEQ ID NO: 245509 - DNA, 192 bp, Homo Sapiens
tgggtcagtgtcttcgagctgaaggacagataatggggagtagctgtcaggccctgggagtgtctgagtgtaagtggagatgggtttggggtcactgagggatgctgtgggagccatccctgtataggtacaggtcattgggagatagtctcgtgaggcctgtgagtgtctagggttgtcctgggtgcctgg

SEQ ID NO: 245510 - DNA, 1249 bp, Homo Sapiens
gggggcgaacatggcgcttgtcccctgccaggtgctgcggatggcaatcctgctgtcttactgctctatcctgtgtaactacaaggccatcgaaatgccctcacaccagacctacggagggagctggaaattcctgacgttcattgatctggttatccaggctgtcttttttggcatctgtgtgctgactgatctttccagtcttctgactcgaggaagtgggaaccaggagcaagagaggcagctcaagaagctcatctctctccgggactggatgttagctgtgttggcctttcctgttggggtttttgttgtagcagtgttctggatcatttatgcctatgacagagagatgatatacccgaagctgctggataattttatcccagggtggctgaatcacggaatgcacacgacggttctagccctttatattaatcgagatgaggacatcgcaccatcagtatcccagcaggagcagcggacttaccgccatatgtaccttctctgttggctatatattatgggtgtgctgggtgcatcatgtaactggcatgtgggtgtaccctttcctggaacacattggcccaggagccagaatcatcttctttgggtctacaaccatcttaatgaacttcctgtacctgctgggagaagttctgaacaactatatctgggatacacagaaaagtatggaagaagagaaagaaaagcctaaattggaatgagatccaagtctaaacgcaagagctagattgagccgccattgaagactccttcccctcgggcattggcagtgggggagaaaaggcttcaaaggaacttggtggcatcagcacccccctcccccaatgaggacaccttttatatataaatatgtataaacatagaatacagttgtttccaaaagaactccaccctcactgttgtgtaaaagaattcttcccccacagtcatttaactgataataacatttttttccttttctagcttctaaaacccagaattgggaccttgcaatttttatttttggccattggaacttcccttctaatccaccaacgcaacacccagcttattggcactttcccaccggtaaaaaagcgagaaacccacaataaaagggcctgtgtgggccggccttgcggccctttgaaaagagtttttttaaacccatttcggtttgggcgcggcgcgggcccctttaagggttaaggtgacacctgggcacatatctgtgttttccatg

SEQ ID NO: 245511 - DNA, 557 bp, Homo Sapiens
ggctgtaacactttcggtttattggctgcggtgccctggtgtggctgaccggccactgggcatgagagaagccctgtcttgtttctccatcccctccccatcggctccccacggtggctcctgggggacatgcacagacacttgtgccccaggaaactggggtggtggaatgggggctcaaaataaaaccaaatcgaggctggagcaggggtgggaaatgaacattacaatgaaaataatgcccccggtgatacacaatacagcgtgtagagacacagggatggcgatggggtcctgctgacattccctcttgctaccaggcagggccccctaagagaggaatgatgacttcgaaatgtcttgtggaagctctgctccctggccccagccccttgctggtgggggtttgtggggaagtggcttatgccggagtccagttcccccacctcctatggacagtctcaccaggccattggccctgcaggtcctggggcctgggggagagggatggtgcgttgccttccggccacccccactatccagtctaggcgaccaag

SEQ ID NO: 245512 - DNA, 365 bp, Homo Sapiens
tatatggagaacagatcagatgggggagcaagtagaaaacaatgtagaaggacaggtgagagagctgggagacctggcagaggtggtagttactaggaaggtaaggtcagtgtggtgtgttttgtttaaagatgaggcttctggagagaatcttactcattttactgattatccataaaaaggagagatgcatgtggctaaagatagaagtgggacaacagaagggaagaggagtaaacgggagcagatacaggcaggtttgtctagtctggtcacaggatgatgagggtgttccctctgaaaactccaaggttgcagagaagttagtgagacagcgcagcttgagtgaatgggatcctctagct

SEQ ID NO: 245513 - DNA, 339 bp, Homo Sapiens
acgagtattccaaatttgatggcaagggtcatgtaggtacaacagcaaccaagaagatcgatgtctacctccctctgcactcgagccaggacagactgctgccaatgaccgtggtgacaatggccagcgccagtgtgcaggacctgatcgggctcatctgctggcagatatacaagcgaaggacgggagccgaagctcaatgacaatgtcagtgcctactgcctgcatattgctgagagatgatggggacggtggacacctgatttcccccctgctggattccaagtgagcccattcataagtttgcttcagtactttggccctgttgaagagaatctc

SEQ ID NO: 245514 - DNA, 301 bp, Homo Sapiens
tcacagctttttccttcctctcaggctctgacatgacacacacagcttctccacaaggacacctttctcaccatgtttcaactctagtactctgtgctgagcctccctgcttgctttaccatagggacctctttctcaccctgcttggaccccaacatcctacttttgacccccaacacgatccctataatggatactgttttcacacctttgggctgtgatactttgtgctgagcggccctcacatgtgagatgctgtcctgaccctgcgcacaatactagctcaacaggtggccagcgt

SEQ ID NO: 245515 - DNA, 560 bp, Homo Sapiens
gtctatttagcatctgtcccaggcagtgcttctcaatagcatgttaatagatgctaaaggacctttagttaggaggtcaactggtctacctctgtcacttagtagacaagaaggttgccctaaaatatacactaagacagtatgcattacaaaaaagccacaataaggacatagcttaggagaaatgttatgatctctcttcaccagtctccttatatgacactggttcaattcagaagtagaggtgaagatagttaatatcctaggaataaatgttaaatctcccttcccctttcctcacagtattatagtcaattctcataaggaaatggccctaagttacaacattaagcttttctattcacttctaataactgaaattccgcccaactgcctcctcacttgaattccatgtactttttttccaaataaattaaatgactttctctaagtcagatgctattaaaattcttgttgttcctcaaactctgctttcttgtagtatcaggtttattgtgacttgaatgagacttatttgtaagtggatgtattgccatacc

SEQ ID NO: 245516 - DNA, 616 bp, Homo Sapiens
aattgagtcagtatgtgtgtcaggtccttttctccactggacaggttggcagccactctccttctctcttgctcaatccttcctcctgcattccatcggagttcttgtgtcccatccaaagagctcaattcctttctgagcaattcctgttttctagtcttccatctcttcctgttgtacagacaccagttcatcagaaagagtttcccagttaattttgatgtagcccagcgtcacctcttacagtgtctggctcagaaattaattcttccttaagtctaactcaatcccccatgttcctcccctgtttctaaactctcagcaggctccccattatctcctgaactaaattctgtctcctaagcccagccttagaggtcttcctccttctggtctccagggctagatgcactgtctcccctggctgatgcagcctcatgccggggtgtgtggccttggaaaggggaatttgacttgtacctactcacccccagggtcctttatcaggcacctgttggtcccagccagcctcttcaacctcatttcctatttttccttctacccttgcctggtggctggcccagtgccctactcaccatgtctctgaatggcatca

SEQ ID NO: 245517 - DNA, 530 bp, Homo Sapiens
cagttctaatggtcctatcggaattttgaaagtgagagtagaattttaataactggaaacatgacaattctttgatacctttggaggaatctgctaacaaagtcttaaaaaaatcctagctaagtgcaagcaacctttttttccattggcaattaactcttatacatacctaaaataaaaatatattgagtcctagccatgttttagatagtgtgacatatcaaatatttgccaattgtcaagtggcagtaactgaaattttaatgaaagatatttaccggaagtaaagtgacaataggtaattttttaggtaacaattatattgtttttgaaattctagtgaatagtctcacccttaacagagattactctgaatgtcatctgagattactttttgaatgtcagccattataggtcaaagtttcatatgctttatgaattacaattttagtacccagccatgtcaagccatggaaagaataccaacacagatgtgttaaatcagttcgcaattttaaagctgtaaagaa

SEQ ID NO: 245518 - DNA, 249 bp, Homo Sapiens
ggtcggtcccaacaagtcagtctgtcttgatgagataactatggttctgtcataaattcagattacgcgagagaaatagcttttggccagtggatgtgctcttttgagaaggtcaattctgagctgaaatttcatgttggaacagtttcctctataagactcatcttgaaaggttcccgcagaagataaaatgtcatcctcacactgggcctggtctgtgcgcacttaactgggagggggcgcaggcac

SEQ ID NO: 245519 - DNA, 271 bp, Homo Sapiens
caggctggcagtacataagttacagatatgctctgaataaggtttgctttctctatttgggttattctgctcagcttctctttctgaggtcttttagcatccagcatatctataaaggaaggtggggtcctaaagggctctaggaaggggcaataaattgaaaagcattgtggagtcagagggaaaaaaaggttgtagaaaaaaggaacatttcctctagagtatgaaaaatgattttgtggtgcagctgataatgtgctcgcagggacaa

SEQ ID NO: 245520 - DNA, 302 bp, Homo Sapiens
tggtggcaatatgtagagtataaagagcgttagacaggtcacatacacagacacagtccatgccagaatacagagaatatagcatactgaatgacacgtatatacttttaaagttatcttctcacatacaatgtcagcagtttatgaagcaaaggtgagctttaatgccaaatagtagcataatgctagctgaaggagtaggaggcacatatacagtcatgcattgcttaacagaggggcatgcattctgcgagcatcgttataaggccatttcatcatagtgcaaacctcagcagtatcat

SEQ ID NO: 245521 - DNA, 230 bp, Homo Sapiens
cctagttttagaagtttcaatagcaggaaacagaaattaaagaaatcacagtttcttttcttcaaaagataactgatttgcagaaccaactcaagcaacaggaggaagactttagaaaacagctggaagatgaagaaggaagaaccgctgaaataagagaatacaacagcagaattaactgaagaaagtaaccaagtggcgtctcctctatgaagaactatataatgcaa

SEQ ID NO: 245522 - DNA, 272 bp, Homo Sapiens
cgctgcctgtgcccaaatacgaacacacactggtactggggagagacctgtgaattcaacatcgccccgagcctcgtgtatgggatcgtgggggctgtgatggcggtgctgctgctcgcattgatcatcctaatcatcttattcagcctatcccagagaaaacggcacagggaacagtatgatgtgcctcaagagtggcgaaaggacacggcacccctgtcatcttcccgaagacgtccatctgggaagacccgaatctgacgggagacgct

SEQ ID NO: 245523 - DNA, 970 bp, Homo Sapiens
aggcatcataggtcacttgcttctgcagtctctgctgtggagagctgaagccagcaataccatgcagggctacctctattgtatgtgccctctggctcattgttcatgccggttggaagtctgcaggagggagcagcgtcagggtcagggtcagagagggatgacagaagctcagaagccccagccacagtagagctgtcatctgcaccctcagctcagaagcgcctctgtgaggagaggaaacctcaggaggaggatgagccagccactaaaaggcaaagtagggaatatgaagacggcccgctgtcgcttgtcatgcccaagaaaccctcagattccacagaccttgcctttcccaagactatgtgtaacagggcatctatacccctcaaagacattcatgtgaatggccaactccctgctgcagaagagatttcaggaaaggcaacagcaaactctcttgtttcttctgagtggggaaatccttcaagaaatacagatgttgaaaagccttcaaaagaaaatgaaggcaccaaagagccttctttgctacaatatctttgtgtgcagtctcctgcaggattaaatggtttcaatgtacttttatctggcagtcaaaccccccctactgtgggcccgtcctcaggtcagctgccgtctttcagtgtcccttgcatggtcttaccatctccacctctgggcccttttcctgttctctattctcctgcaatgccgggcccggtttcttctactcttggtgctctgccaaacacaggacctgtgaatttcagcttgcctggccttggatcaatagcccagcttctcgtcggccccacagctgtggttaatccaaagtcgtccacactcccttctgcagaccctcagcttcagaatcagccctcactaaacctaagtccagtgatgtgaaggtcacacagtgtcgtccaacaacctgagtcccccgtgtgac

SEQ ID NO: 245524 - DNA, 870 bp, Homo Sapiens
gataggtgtaggaggctggagagactatggagttgatccatctcaattctcagggactttaatgcggacgtgtgaacgtttagtaaaagaaggacggttcgtaccttgtaatcccattggaattctcaccacaagctactgtgagttgctgcaaaataaagtccctttgctcggtagcagcaccgcctgcattgtggtgctggacagaaccagccaccgcttacacacagcaaacctgggcgattcaggcttcctggttgttaggggtggtgaattcgtgcaccgatcagatggagcagcagcattacttcaacactccattccagctctcaatcgctccccctagaagccgagggaagtcgtcttgagcgacagtccggatgctgctgatagcacgtctttcgatgtccagctaggagacattatcctgacggcaacagatggactctttgacagcatgcctgattatatgattcttcaggagctaaaaaagttaaagaattcaaattatgagagtatacaacagactgccagaagcattgctgagcaagctcatgagctggcctatgacccaaattatatgtcaccttttgcacagtttgcatgtgacaatggattgaatgtgagaggtggaaagccagatgacatcaccgtccttctttcaatagtggctgagtatacagactagctgaggtgtcaagtcctgcctttcctttcatcatcccaaatttcaccctgccatgtgtgctgatcctgctggcaggaccacatttctttgccacatcagctcactgctcagtcatctaaggcttcttgcaatgtcttgctgagagtcatagagatttccggggtgtaccacgactaccatgt

SEQ ID NO: 245525 - DNA, 145 bp, Homo Sapiens
tgacagagtgacatcctgtctccaaagggggagcaaatggagagaagggtgtggaaaggggctgatgggaaggggagccctcaggagctggcactttagcttagaccaggatgctgagaagaggctggtcctgccagtataatgc

SEQ ID NO: 245526 - DNA, 364 bp, Homo Sapiens
ggtacccccggagatttttaaataatcttcactgggccgtcctgtaatagaatagttgatagtggctttgtgggtcatttcctctttgtaatggattattctctagacacaatgttggttattttcacttaagtacaacctgacagttgcttcagtgaggctggcctgctgtctttctgtttcttgcctgaactcgggttgtcctgcattttgtcccgtgagcttggcacttcactgtccggaggagcgtagggccgctgcgcacctggagattttggtggggcactgcttaaatcatgcagatgagaaccagtttctggagaccttggcactagacgcccagcagagaagtgccttttttgag

SEQ ID NO: 245527 - DNA, 629 bp, Homo Sapiens
acccaccttggaagcctatatcttttagctaacgaatggttaacttggttgaagtttggggaagggagagttagaactttctctgtctttgatggctggctgagaatacagggtaaagaactgtccagtgttgtgagtggtgccttagagttgctcatagcaagaaaatcacttgggagggtggaagtggctctcagatggtcattggttacctataacttatttaaagaagaccttgagaagttgggacatatcttgtcactgaggaaattgtgccaaagaactgctgctttattaacgcatttgatcagatttgaaaagagagctctgtatacactctttttctaactccaaagaaattttgtttctagaaagattcaattaccgtaatgatgttctttggaaatgtgcctttttgcgtgtatatcttaatatggataaagttccaaggtagttcaaaggttttaataaaattttacttaccagagtgatgtgaaattgggaataccctgtgtgaatggttaactctcctttaaattggaaggtcagtgggagtggggatcttcccagtaaatcttaaatctctgtgtacgtgtatctctgacagcgaaatccctaagatgctggct

SEQ ID NO: 245528 - DNA, 560 bp, Homo Sapiens
  misc_feature (440)..(507): n is a, c, g, or t
atatgcagaaaaggtcagtttgttctctactgactggcagttccagctgacacaagatggctttgcagccacaggtaggtggaggagagctgtttcaggggaggttaaaggaagaccctgggacaactagacttcctcgattacctttagatagtgccataattagacacccgattctctgttccaaagcctgcaattatttaaataaaagtagttcaactgttctgtcactgcttagccacatttgaagaaaagtgggctgtttcttcctactgtactgccctccccaattccgtctctacacatcgtattaatcatatctatgtcattaggaaatatttgtagatctttcaaaaaggtattccctagcaggttttgccttcagctacagtatgccataataaaaatctattccctttggcccaggcgcagtggctcannnnnnnnnnnnnnnnnnnnnnnnnnnnnnnnnnnnnnnnnnnnnnnnnnnnnnnnnnnnnnnnnnnnacgggcaggatccccctctcacatatccgcctcctgccccctgaagattgttg

SEQ ID NO: 245529 - DNA, 510 bp, Homo Sapiens
tgcaggcctaattattaagggtctttccatgatcagcaaaggagctgggcactcggttagaataggaaggaagtgggaagcttctgaaataccatcctggtcttaatccataaatgcccagaggccagaagtgtgccatgctcagcatgagaaatgaataaagaggggctctgtgccagtgtagggccaaagtgggaagtaggcgccagtcctcaggtgcctggtcttcacaggtgcctgctctccacaggtgactgaccctcaggtggctggttaccccatggctggcccctgggtagctctgtccccatcgtgactttaggcatcagataagggagagatggcagtggaaggccatgagcacgtctcacacccacgacagcacagcatggaggtcaccttttgaccgacgccccctggctaagcagagagtgagtgccccctcggtagggcttgggggtcatagggggccacgatggatctgtgactctgggctcagatggttggcaa

SEQ ID NO: 245530 - DNA, 255 bp, Homo Sapiens
  misc_feature (76)..(85): n is a, c, g, or t
ccaccaacaatcttcagggaaatgcaaatcaaaaccacaatgtgataccaccttactcctgcaagaatgaccattnnnnnnnnnntagatgtttgtgtgaatgtggtgaacagggaacagttctatacttctggtgggaatgtaaactagtacagccactatggaaaacagtgtggagattcatttgagaactaaaagtagaactatcacttgatccagcatcccactacaatccctgaacatcccctaaactgc

SEQ ID NO: 245531 - DNA, 210 bp, Homo Sapiens
  misc_feature (197)..(197): n is a, c, g, or t
accgagagagatgattagtggaaggagagagagataggaggatgtgagacctaagatggattttcggaggatgggaaagatgagtctttaagtgctaaaaaaatttccaagtgactcttaatttcttctttgagcaccgtactatatgccaggcattgtaccgagatagcaccctggaacgattgctatggtggggnggatccttctagc

SEQ ID NO: 245532 - DNA, 530 bp, Homo Sapiens
ccccattattatctattgctataaccctagccagttctcttgctcttctgtattttcctatttccctgccatcatgtgctatttctgccacttctcttagactccttgtctgcaaagcccaagctagaactcactgtctatggcagaaggacatccagagcccattctggagttttgttttttccttctgccagatgctttgtgtcctgtcttccttcctcctcatatttctgtttctcatttgtgttcagttttgtgcagcattgctagccctgcttttgtgaccagaaaaggccataacatggtccaggatcatcattcttctggctctagatgggacacttgacagtgacttgaaacatttgcatattcaggaatgcatgagatttcaagagagcgtacagtatgaaatcattttctcaaaataagcagcttgcttctgaaatgttgtctttcacagaagaaacacgcctgcctctggtggctcgagcgccgccggtttaccctcaggaatcagctgatgaccatgg

SEQ ID NO: 245533 - DNA, 242 bp, Homo Sapiens
gcggtaccagcaggctgggccagattaagatgtcaagaatagatagtgggccctgaaggaaataaaagtattttaccccaaaatctattcttgacatattttgaaatggccctgcaaaaccatattttgtggaggaaaattgcatctgtggagaatctccttctgtttccaggtctttttctgatccagaagagatttaactaagagtctgacatcttaatctgggggcccaatgcctggct

SEQ ID NO: 245534 - DNA, 314 bp, Homo Sapiens
atgagcggaccagcaggctgggcccagattaagatgtcatctctcagagaggtcccctactctaaggaagcccctgctcctctctatcctatccttctattttaatttctttacagccctcctgacaacattctgcacccccacattcccatattctgtggaagctaactaactcctaagaaattctaaaacctgtttccttaattccttgctacagcacctggattccctggattgtgacgactcccctcatagctttcttcaactcccttcaacatgacatcttaatctggggcccagcctgctggtccgct

SEQ ID NO: 245535 - DNA, 333 bp, Homo Sapiens
ggccccagagttaagatggtcaggttatatctggtgattaaataagcaccgtactctactgagagtctacttatgcgaagcactgtattctaagacacttgacacggtctcacatgacatcttggcaatgacccagacaggaactgttattcccactaatttttatacagaataaacaaagctgaggagccagaggttaggtaacctgttcaaaatgacacaactagtatatgactagtcatagcttatagccggattcatctgacttcaaagcctacattcactactagtatgctatacaggtgacatcttaatctggggcccaagcctgct

SEQ ID NO: 245536 - DNA, 306 bp, Homo Sapiens
tagcggcccagcaggctgggcccgataagacgtcaagtgatgcaactaatatacatgacattttaaaagatatagtggtggtgcttaataatggttaagattattcctccttatagccatctattgcagcttctaatatatttttcaatattcctcaaattattacaatgcctgatataaaactattttttaaaaaaatcacattttctgtcattatcctttgctacttgagcatccactaacatgacctttggatatcctgtcctttcagttttttgacatcttaatctggggcccaagcctgct

SEQ ID NO: 245537 - DNA, 841 bp, Homo Sapiens
gtaggaccaggctcagagggctaggcacggagggaaggtcagaggagaaggcaggcagggcccagtgagaggggagcatgccttcccccaccctggcttgctcttggtcacagggcggttctgggcacttgaactcagggcccaatgcagaagcacaggcccagtcctggctgcaagcacaatagcctgaatgggatttcaggttaggcagggtgggaggggaggctctctggctttagttttgttttgttttccaaatcaaggtaacttgctcccttctgcctacaggccttggtcttggcttgtcctcactcagtcggaactccctaccactttcaggagagtggttttaggcccgtggggctgttctgttccaagcagtgtgagaacatggctggtagaggctctagctgtgtgcggggcctgaaggggtagtgggttctcgcccaaagagcatctgcccatttcccaccttcccttctctcaccagaagcttgcctgagctgtttggaccaaaatccgaaccccacttggctactctggcctggcttcagcttggaacgcaatacctaggcgttacagtccatcgtgtgccaggggcctctgggaaattctcttcctgatggtcctttaggtttgggcacaaaatataatttgcctctccccctctcccattttctctcttgggagcaattggtcaccagtcccttggtacctgaacatggtacctaggtctaggcccttcttccctttcccttcctctcccctaaccccagaactttggctccctttcccttctctctctggtagctccaggaggccctgtgattccaggctcccc

SEQ ID NO: 245538 - DNA, 616 bp, Homo Sapiens
aaacctctctccagaggtcgaacacgacgagaagatgacaggatctcaagacctcatccttcaacagctgaatcaaaggctccaacaccaaagtttgacttattagcctcaaattttccacctgtacctggaagttcatcaagaatgccaggtgactcgttttggagaataggatgtctgatgttgttaaaggtgtctacaaagaaaaggataatgaagagttgacaattagttgcccagtgcctgcagatgagcagacagaatgcacttctgcccagcaacttcatatgagtaccagttctccatgtgctgctgagcttactgcattaagcacatctcagcaagaaaaggatctaatagaagattcctctgttcagaaggatggtctcaatcagacaactataccagtttctcctccaagtactacaaagccatcgagggcaagtactgcttcaccatgtaataataacataaatgcagctacagctgtggctctacaggaaccccgaaagttaggttatgctgaagtgtgccagaagccccctaaagagccatcttcagttcttgtgcagccactacgggaacttcgctccaatgtgtgtctcccaccatatac

SEQ ID NO: 245539 - DNA, 435 bp, Homo Sapiens
tggtagattttttttaatctcttgattacaaagtatatttatttaattttctattatagttgatttacaatgttctagtctaatttctgctgcacagcaaagtgacccaattatacatacatatacattctttttctcacatcatcctccatcatgttccgtaagacataaccgcggccgcggttatgtcttacgcttccttgtgggctaagcaggataggatgtttctttcacattctacaagtgatggggacaaaccaccatagttatcttcgactccggaggtgggcatggccttccaccactaggggtccatgaacaggcaccacttgtggccccaatcacctcagaaggcaaaacagaggatggcattgtgagcaagcaacacctgttgttgctctcactcctgtgagaactcacaccgtagaatgaacc

SEQ ID NO: 245540 - DNA, 247 bp, Homo Sapiens
cgagctcggtaccaccgcggttagtgtcttacggcccagagcaacctggggtgatcccccgcgctctcatggacctcctgcagctcacaagggaggagggtgctgagggccggccatgggctctctctgtcactatgtcctacttagagatctaccaggaaaaggtgaggctcttttctgatcgaggaaggaagagacaaagggttaaatcagatttagttgtagaacccgtaagacataaccgcgg

SEQ ID NO: 245541 - DNA, 562 bp, Homo Sapiens
ccagccctcacatacctgtcatggcaaaggaaccgccttgtgagaccaaattgctgacctgggtcagtgcatgtgctttatggtgtggtgcatctttggagatcatcaccatattttacttttgagagtctttaaagaggaaggggagtggagggaaccctgagctaggcttcaggaggcccgcatcctacgcaggctctgccacaggggttagaccccaggtccgacgcttgaccttcctgggcctcaagtgccctcccctatcaaatgaaggggtggacagcatgacctctgggtgtctctccaactcaccagttctaaaaagggtatcagattctattgtgacttcatagtgagaatttatgatagattattttttagctattttttccatgtgtgaaccttgagtgacactaatcatgtaaagtaagagttctcttatgtattattttcggaagaggggtgtggtgactcctttatattcgtactgcactttgtttttccaaggaaatcagtgtcttttacgttgttatgatgaatcccacatggggccggtgatggt

SEQ ID NO: 245542 - DNA, 382 bp, Homo Sapiens
agtgaacacattcgtgtaaccaccatcagatgaattactaacactctctcagcagcccctgttctaatcactatcctctccttttgtcccggcagcacactccttccggacactataggttggtttggcctatttttgaattcatgttaatgaaatcatatagtatgtattcctttacatctggtttcttttgttcaacatgtttataaagtttatccacattatgtgtagcagtagtttgttcattttgataattgcatactattagcatgtttatagagtacactacaatttattctactggtttggttttgtttgttgagacagagtctctgtgcgcagggtggagtacagcgttgcagtcatagtgtttccgggggga

SEQ ID NO: 245543 - DNA, 295 bp, Homo Sapiens
  misc_feature (180)..(240): n is a, c, g, or t
tatttggtgatctttgtaaatagattaatgcttaatagagatctattctctgttgagtgagaagaaaacagaatctgattctttagtctctttctgcttttctattatgtaagacttctcaagttgtaagctaaataatgagccactggaaggttttaagcagaagagtagcacaatctnnnnnnnnnnnnnnnnnnnnnnnnnnnnnnnnnnnnnnnnnnnnnnnnnnnnnnnnnnnnnattattattttaagcaacagggtcttgctctgtcacccaggctggagtgcagtag

SEQ ID NO: 245544 - DNA, 481 bp, Homo Sapiens
caggaaaaagctatgacaagctgagcggcaatctgctatacagctttctgcctctgaggtgttcttagagtgggaagtgttgtagggaggtgtttgggggttcccaagactaccctcaacttcactgattcactggaaggatgcacagaactgttacacgtatggtgatggtttcttacaatgaaaagatgctgattaaaaccatcaaatgaaaaaagtgcatagggcagcgtccaggggaaaccaggcacaagcttccagttgtcctctccccatggagtcatgtggacaacacttctccaagcagtgcgtgacaacacacacagagtattgtcaaccaaggaccctcacttaagcctgggtgtccagagttttttggggagtctgtcacataggcatggctgagtatagtctccttaccccttccggagtcataagggtgtttccggggggaactctagaatcactatagatatcacga

SEQ ID NO: 245545 - DNA, 985 bp, Homo Sapiens
gatctagagcatccccggtaaggtggtgttatgaatatgttacagaatctctctctgctcctgatttgtaactatttcctgatctgtaaaatgataggttgacaggcggataccctttccagtcctcaaatccaatgcttgggcagaagcctttcaaagatcaggtgtcagcctctttgggagtggagaattactgggagccctttgaaacctcatgtggtcatttaatcctgcccacatctttgcagcaacattttcagccaaaagtataaagcccatgaaacgtcagcaaatacttgaaacacagataatctctaggggacaggactattgaatagagcaggtgactagagcttagagtgttggctgaacttgatatactttaaattttcatgcataacaccacacaattccggaattgtgtggtgttatggccactctgtaaaataatttgatggcttctaaatatattaaacatagaattgtcatatgacccagaaatttattcctaggtatacacccagattattggaaagaggtgttcaaacacaaattgtacacaattatttttagcagcagtatttaaaatagccaaaggctgaacacaactcaaatgtcaataaaaatattattggataaacaaaatgttatatccatgaaattgaatgttatacggttataaaaagaaataaagtaccaatacgtacatgaaccttgatagcattatgccaactgaaagaagccaggcacaaaaggccacctattgtatgattctatttagatgaaaacagaataggaaagtttatagagacagaaaacagatttgtggttgcttaggattgagtaggggatgagtctataggatgttaacagctagagaaggtggggtttctttttgaagtgatgaaaatgctctaaaattcattgtgatgatggctccacttatctgtgcataacaccacacattccggtgatcctctagatc

SEQ ID NO: 245546 - DNA, 609 bp, Homo Sapiens
tcccggcctctccggttctcccttgcggaatgatgggcgcgtcctgtctgccacgtgctgacggtcgggaagcttcagtggagaggcctaactctaatgtcgcctgcttaagcaaatcatgcttctctgtttcacgttgttgggttgacaagtttctgcctttaagataaatgagtaatagtctaatgaccagctcagccatttaaaatattttcttcctattctgttcaagaaacagtaaacttggtttcaatctttactgtattttttaaatgaattttttccttaataacagccagaataagggatagtctatgctttcaggactggctttctgcacctgatatgaatgagaccagttttattttataaagcatgtgctcttaatagcattatgttctaaagaagatatcacgtaagtttgcatcttagcatgcaaatcataattttaagcaatataaattatgaaaatactatataaatgtaatatgacttaaaatgttaaagtgtagagcttctagagatggagaacccccaccctcccgccaaccacgccagagctctacgtgagctaagacgcttggcctgcccttattactgctaacacgt

SEQ ID NO: 245547 - DNA, 420 bp, Homo Sapiens
  misc_feature (16)..(16): n is a, c, g, or t
cccataacaaatggangcttccaccttcaagggggacgtgaacccatcggaagctcaacagctaactcagtatgtggcgcccctgatggcccaacttcaacccctggctactccgaacaactcccacagttgtttactttgaacaatgggacagtctttgtggttcagtgggaccacgtttatctccaaggctgggaagacaagggcagtttcaccttccaggcagctctgcaccatgacggccgcattgtctttgcctataaagagatccctatgtctgtcccggaaatcagctcctcccagcatcctgtcaaaaccggcctatcggatgccttcatgattctcaatccatccccggatgtgccagaatctcggcgaaggagcatctcttgaatatcaccgctccccctcgttccgaat

SEQ ID NO: 245548 - DNA, 849 bp, Homo Sapiens
tttttctactgtcgagcgtattcacccttccctatgggtttgtttttatttacctctacatggctgacttgggaaaattacgtcattagtggcatcgctaccttctctttgaggcactggtacaacacacctgtgctgctttgcctttgtagctgttgaattcatggtaattttatgtataggtagaagtaaagactggtattaaaatactgaactgcttagagaacagcttggtaaataccagctgctctgagcttccctacctcctagtgtgtccatgtatagggcccttcggatttcctgcagttagcaatgaaagagttaatcactggtaccttggggttgaagggcttccaggaccatccagctttatggattgtgccaatgcctgtgctggtgcctgtgtggatgttattattccctgggttcaaaatctattcataatatcatctagtgtagttgtggtgaaatagttacatacagaaatacatattattttattaaaattacttcttaggtctcctttatgttacatttagggcatctattgtagggtatgtctcgatatgtgtctaataggttataacattcatttcatttaaaaatagagaacagctgcttcaaactgaatcagtacaaataggggatgttgtgtttgagagttgggaactactgactggtaaatcagtcggggtcccactgtttttgtcctttatcttgcttcaaattgaaatcattatctattgctattataaattaaatatatagctggcatcatctgagtagtagaaatgaaagcgtcagtaatttgtgttgtttaatagagttctccttttggatagcctacat

SEQ ID NO: 245549 - DNA, 327 bp, Homo Sapiens
tgctgccttttaaaatgtttgcattatttgcttgtaatggatgtcataccttattttgtgttcattaatcacacgtattaatgtttattaatacatctgatacatgttatttgtgtgagttcctatggcaatgataagtattggtaaacattattgctcctttctctgttgatttgttgaagccctgttatttttctttttaatgtggaattccgctcgagttttcaaaaattgagacatggctcattgggctggagatgctgatcgttttagatttctctttactaatctaatggcatagcagaggttaaataccgttggagtagt

SEQ ID NO: 245550 - DNA, 608 bp, Homo Sapiens
  misc_feature (444)..(458): n is a, c, g, or t
  misc_feature (517)..(547): n is a, c, g, or t
tccactcatccatgctttgttgctctgctgtcaagatcaaatggccctatttatgtgggtctgtttctagactctctgatcactgacccacccgtctgttcttcgccaatacgacagtcttgatttttgtggctttaaagtctgttaaaactgtgtaatgtgattcatctaactttcttgttcttttttaaaacattgttttatctatcctttttactgttttagctagctccttcaccattctgtatacattttaaaatcatcttttctaaatctaaaaagagtcctactgcaatgttttggaattttgttaatttcacagatccttctgagactggcatcttatgttcagtcttccagtctatgagcgtgctgtgtgccgtctctccacatacatagtctttttagcatacagatcctgttttgtcttgttagatttatacnnnnnnnnnnnnnnnaggagctactgtgtttttaacttcagtttccaatgttttattgtctatagaagtaagannnnnnnnnnnnnnnnnnnnnnnnnnnnnnnctttgggggaacccccccctttggcccccgggggaatggggagggcggggcacattgtggc

SEQ ID NO: 245551 - DNA, 142 bp, Homo Sapiens
acacatcgttgactttcgcccaggaccttttatcaaagggactgtcccttccccagtgaatattcttggtacctttgttgaaaatcaattggcgtaaaagcgtagattttgtttgtttgtttgttttctatctcttccattg

SEQ ID NO: 245552 - DNA, 628 bp, Homo Sapiens
gtttgagagaatagtccttgtgtcaaatggtctagataaattgaataagattaggattgagaactgacccttggatacagcatggtttctctaattctccccttctttataatgaaatacctttttttcactttttccccaggttgtagcagataccaatataagcgccatagcagctcagcttgaaaacatgtctacaggctaccaccttggttcgcccactgctgaacaccatccagaagacacagaggagcagctgcagatgacggccgattaaaacgaggggatcagattttagctgttaatggcgagaccctggaaggtgttactcatgagcaagcagtcgccattctaaaacaccagagagggactgtaaccttaactgtgctgtcatgagcctcgggcctgatcacaagatagatgttgttgtttagaatatccacaggcagatgaagttctgagtgggtatgaaaagcaccctcaactaaaatgcaccttcattcttatttcttgccctctctgctcaggagaaatggctgaggtttatgtgatcgtccacgggattctacacagtatctgacgatgtatacgacggccagtaccagcggagctgacagtgattagagga

SEQ ID NO: 245553 - DNA, 993 bp, Homo Sapiens
gggagaagcaaaaaacttccatctgtcgaactaatgtattgggcttaatggaaaaacattttaaagtaccacctaagaaaggaggtcttaaatggaactacgggccaagaattaaaaacaccgggttttgtgtttgccaaacccccccaacgggataattaagttcagggatagcttcctgctaaagttctaacgtcaagcctgaactgtttctgcccctattcaccttacagaatcagagcaattaaggcaagggacacccttctttaggccctcacttctgaatcttccttctaagctaagaggtcagagcagaacgaggaaatgttgtgctatttggccagaaggagatggtaagaacagccctagtaacttcatttactcctgaggctctgtgcccacaaactgattctaagagcccttcctgtatatatgcgaattagctctaagtacagaccttttggtgtgaattgtggagtttatggcacatacagggtaggctgaatggttctaggccaggaagcaagagttcacaaatgcggtgtcttcaatgaaataaggtaagtaccttgaagcaaggagtaaccacctgactaatgcatccacatgagagactcaaatctaacacttggcaaattacaatctgggatactgaggtccccacttttagtgaaagccaaggccctaggtcaaaatgctaaaaagtcttttactaactatcctaggacagctaaggtcattttgggaagaagagagaaacactattcacccctcccttcaagttttaatagacacaggaatctgggctctgaaaagtcacaacacctttcccaagatgatgagcaactgcaacaactggccaaatgtgttagcagcagaaaagctgggcattacctgtgtgagaggcgctcagcatgggcagtgaatggccgtgagcagcgcaccagctacctagcctccacaccggaagggtgctgctgctctgcaggtccg

SEQ ID NO: 245554 - DNA, 596 bp, Homo Sapiens
gtcaatgctggtgggttctgcagaggtggcacggccaggacggttctccgtgtctctgaaatgtgcctttgcacttctgtcaggttgacagggacaggcagtgtctctctggtgtgagcgtctgtgggtgtgaaagggccagcgagtgtgcggctgtgactggtcgggatcgggcctggatgcatggccttttgagtgagcacaggtgtgtgcgaccatgtcacctgtctttctagtgtctccgttgcttcctgtgccttggccttccggccatgtggtatctgctagggagcagtggtcccaaagtgacgtgagaggctctacgctgttgtgaaaatgaccaagaaggaggcttcacaagtcacgagatggcagttttggagccagaagtgctctccgtgcacactacctggacgacaagaggaagtaacctcaagaatagaattccttttggggaagaaagagctggccttcaggaaaagcatcccggaggaggaagaagaagtgttatatgtcctaaagtaaggtttcagcaagcaagggacaccgaatagcagctccggcagcttgtgctagcggcctgcagagtaatccag

SEQ ID NO: 245555 - DNA, 687 bp, Homo Sapiens
  misc_feature (191)..(199): n is a, c, g, or t
ttttgagtggggaaacatattttggacctatgcctctacacacaattcaacttgataactggactttaggaaacttacagttagatgtaataacaaaaagaagtctatgcgtatcactttttgtgccattctaagtatttttggtttcttgtctccttatttcctctttaccattttggaggggaagctannnnnnnnnccttgatctttcccagtgatatggattgaatctggttggtcatttccaccaggaatcagaggcagctgttaccaggtttcggccttccagttgatccctccactgtccaggctgtctcaggaggaggtgaatcagagctagtctgtcacctttccaatctaagccgaagccacaggtgcctgacaggttccctcctaacaactatttgaccaagagaggcaatcagggggttgtatactgcactggattcgccagagaagggaaaatttaattagtgaaaaggaaagaacactaggaaacatttgagaacctgcctctatcccagaatgtgctggagatttgacactcaaatcagtgtttagtcttctgcttggcaccatagcttaacctgcagtttcttcaaaatgcccaatgccttgtttcctattaccttagattgcaaaccagtctagggaagtctatgagaaagtagcatttaattaaagttt

SEQ ID NO: 245556 - DNA, 189 bp, Homo Sapiens
atagaggaggattttgatttttgtaagaaatgtttgaggtgaacctcacagacacagaaagagccggaagagggacaagccaaggatgattccaatgtttctggcttgagttatctcaagttgagttatcctggtattgctgatggtaataccattcagcaatcgaggaataagagagggcctaagact

SEQ ID NO: 245557 - DNA, 687 bp, Homo Sapiens
gttatgttttccgatagctgcatgagatatctctccacatactcagtcgcagagcatgcagtgaaaaacataatcagagtggccagagaagcttttcaagcctcacctgcaccctggctgggtgtcacatccaggaggcaagtggcaatggcacgcgctggccacggtttggcttctccttctgtgcctgctgtcttgcttcctgagtctgaggaaggatatccacgtccattgtgtaagaccgtgatttctcacaagttatatctttctccggagtcaggactttggtgaaccatttaaccccactgggcctcagttttctcatgtgaagatgggggtaaaaatctctggtcaactgacctcactttgtaagactaaaataggacgtatataaaaagtgcttttggccaggcgtggtggctcatgtctgtaatcccagcactttgggagtaaattttattctagttaagggaagccagtggaaatagaatacctttaataaagcttcaaatttgggagaatgaattacaaaataaatgtatgttatacaaaattgtcccactagcacaaaatttggcctcagaagaacaactgaagtatgcccacggttttatagatgaagagcaccttggaacaaaaggtgtaagttttctacataaccgaggcgtgcaatgggatcctcagagt

SEQ ID NO: 245558 - DNA, 618 bp, Homo Sapiens
atggtgccattgatgctgtggagacacagaaggacctcctgggagccagtgggctcatgctgctgcttccccccaaaatgaagagtgaggacatggcagaggaggacgtgtactggctgtcggccttgcttgcagctcaagcagctcctgcaggctaagcccttccagcctgcgcttcctctggtggttcttgtgcctagcccaggaggggacgccgttgagaaggaagtagaagatggtctgatgctacaggacttggtttcagctaagctgatttcagattacactgttaccgagatccctgataccattaatgatctacaaggttcaactaaggttttgcaagcagtgcagtggctggtttcccactgcccccattcccttgacctctgctgccagactctcattcagtacgtcgaagacgggattggccatgagtttagtggccgctttttccatgacagaagagagaggcgtctgggcggtcttgcttctcaggagcctggcgccatcattgagctgtttaacagtgtgctgcagttcctggcttctgtggtgtcctctgaacagctgtgtgacctgtcctggcctgtcactgagtttgctgaggcagggggc

SEQ ID NO: 245559 - DNA, 881 bp, Homo Sapiens
  misc_feature (60)..(122): n is a, c, g, or t
tcgtaaccgacgcgtttctcctatttaagtcctgactggcataaatcctttgaactcagnnnnnnnnnnnnnnnnnnnnnnnnnnnnnnnnnnnnnnnnnnnnnnnnnnnnnnnnnnnnnnncacctacctgctgggttttctttgtatgtcagcatggagtttttcccaaagaaagggaatatggatggagagagagaggttatgaacaggttatgttacagaggttattgcctttgaaactgggccctcatcattctagacttgcttgctttgttataaattagaagaaaccagagggagatgtgccaagtaaacattcgaatgactgtttagaatatggttttcttaattagcagtcatggggaaaacatgcatttttaatttggaaaaaacctgacagttaacatggttctgtttaccttgattagtgaagtaatttgctgcagtgttacagaggagcagaatcacttgggtctcaaaatagactgaaaatttaactccccaaaccaaatttaacaaacagaattggttattagagatttataggcaaaaatatcagtttggaaattaaccttggctactggccaccttagctaggttttctccacagatctgttttctccacagatctgagtacttaacacttcccagatgattggagaatattctgggctgttggggatgacaggaaaatgtgagggggagtagcctaggtaagggtgatgatgaaattgttctatctgctgtcaaataatcttttcctgtttgcaatgtttttattttttctgagtccctttgggaaccaggtgctaacaagaagctgttatgtgtgggatttcggagccttactttaacgatagagaaaccgtcgaattcgag

SEQ ID NO: 245560 - DNA, 608 bp, Homo Sapiens
tcgaattcgacggtttctctggcagatgggtgattgggtggggagaggatgatgccacttgcccgggggcttcttgccaggaactgaagaatcaccaggaggaagaacaacaatcggaggaaaaactccagccacataagaagttaaatgtgccgcaaccaccagtggcgaaattgtggacatcacaggagcaaccgctcgacttcaaagggtaccgcatctcgagactggctactctctggtcatagcagatagtgtgtgaattgccacaggcacaggtgtggccagggccacagccaccacaatcacagccaccacctcagccaacacaaccaagtgctcaagcccgttgtactcagcacacctccaaatgcaatctccaggattcccaaaggccaggtcaccagcctacttcggcggggatctactaagctggagggcaatctctgtatcaacaacagattccagggtgggcagaaaatccttacagactctggactggagcctgggagtgggaggtggtaaggagaggagcccttttgcttccatcccggccctgtagtgtagaatccatatctaccagcctaacctctctgaatctcacaagt

SEQ ID NO: 245561 - DNA, 310 bp, Homo Sapiens
tcgaatcgacggtttctcatttcagatattttatctggctggtgtaatattgtacatacctaggctatggcctgcttttgccacttaagacgtttcccatgtctttacaagttttcataaaacagaattcaaaaaatggctaagcagctagactactgtgtaagtatatacaataggtttcttaaacattcccaaatagtggatgatccgattgtttccaattttaccatcttataaataatgcttatcaataaatgtaggcacctttatgtgtcagtctgtccttctatcgacttgggataagtttctc

SEQ ID NO: 245562 - DNA, 940 bp, Homo Sapiens
ctcgaattcgacggtttctcaatatgacagtagcaagcctagaatatcaagcttatagaaaagtagaggtgatattaaactttaaaactgtgttaaatattaaaatacagctccaagaatataaagaaaaaatatattatttgctattacttctctccgttttatctgagagttctttttattccaaagaagattgaggctaatggttcagaggaagagaaagaagagtcataaataaaaactacttcacctaattctaaacatgtgataagtacaacggactcataccttaaactttttctttcaaaacctactgagatgagtattgttaaaaatttttcctaaaaaatgtctacagagacttattaacttccaactgattctatggtatcttttgagacaaatgttataataattgttctcctgcagatccttttcatattccaaaagtatgaacatatattattatttcttcatctttctatttgcttcagaaatttcatgtgttcttagtatgaagccagacacttgagattttctttaattccttcttaagatcaagacaactaggagaaaattaaaactcacatacttcagtgatcagctcctaactggctttaaataatccacccaacatttgcactgacaaagaacaatgaatttattgttatgttttaaaaaggaacaaaaaattgaacaatgggaaaaattggggctggtttacatatttaaaaggctgcatatatcattggagattcttaaaataaaattattaaaccttcttactcagtttgttccccccatcaagcatgtagataacagaaagaaagcacagctgttcctatttaggaatccacagtgtagaatttccattatttatcctgataggaaagcaaagatttaaaaatgaaaacttttagaacttgtcctggctggggag

SEQ ID NO: 245563 - DNA, 664 bp, Homo Sapiens
ctgacgtcaacccaatcaactatttttaaacctacagaaaaggagttcccttaatttgcttatagttgatgttatgccctggctggttccagtctgcatacccctcctcactccatagttacggcctcttgaaaagtcttgcggtctcagtcttatcaacttttcttgaacagatattgccctttcttagcaggtttgatggagctgcaatccactaccctattagctcattggtggattgtgcctgctgcaagtttgggttttattttatgacttcaaataactagacttctcttttatattaaaggctcttggccccacattctgaaaagtagatctttctactctatctcagctgttcctttaggatcctacatgagatgtaggatgagactttatctgacttaaagtttctctcccaaggattgaaattcagcccctgaaattcagtctgcttcccaggactttgattgatgctcctgggcttttctgtgacatgagtcttcctcctcatgcttcaagaagcctctcttgtctgcttttggacttctgtctctatttctagaaggttgtcctttatttgttaccatacttgcaagcagagtgttttctgactgggctccctgtctcgtcgcctttctgtactcgagggctggtctagttc

SEQ ID NO: 245564 - DNA, 631 bp, Homo Sapiens
gatacgattcgagctcgtaccccaggtcttttcccctcaaacatgcagaaagtcatactttaacagggcaaatactacttgtctttgatgttttttgtgtacgtttgtatgtgagagatgaagttacctttatttttttcctatacttgactgtgcttcattttaataaaggataatttgatctgagtgttctgagcatcagactaattctgaagcatatttgctagaggagctactttgcttttcacaatggggtggagaggattctttcacttgtcccattaaccctcttctagtctagatgagatgaaatctgttaatgtgtgtgtagaagaaaacgtatgttcttctactcagcattgcccttttccacctcctcacttcacctccgagtagcttgtttatcaagaatgaatgaatgtctttgtcttaaattttgcccatgtgttaaaagatgtaattctcagaatgggagagaaatgactatctttgttcctactcttttatataattatccttttagggaaagacttggtcaactctaatatatctagaaggaagactatatctggtgtagactaatatgagatgttttagaagagttaacctgaacactttgaggggaaaatca

SEQ ID NO: 245565 - DNA, 536 bp, Homo Sapiens
cgagctcggtaccccagggtctgttcccctcaaacttaatgtttatacacaggtattgtttactaggttaatgacatttaactcccctctcttctgtaggtgagagaaaataagtaagtcttgatctgtttcttaccaaagagagacagacctatgatggaaaatgatcacgtctctgaattttttctttaacgttatagttccttattacagatagtaagcatatgggaatttctgagctataacatgttgagaagttagaaattaaaactaacacaacaaaaggcgctgaatcaaaagatctttgcttttatttggctcagaatgtttttggcttttctgctaaagatggcagaaattactctacacagacctgatttttctttattgcagaccattcttgtgggcttaaccctgagacttttatccccattagtgaatcttggagggaatacttgcttatttatgacttaggtatttccccccaaactttaatattcttgagcactgagaatacttttgagggaaagatcctg

SEQ ID NO: 245566 - DNA, 1483 bp, Homo Sapiens
  misc_feature (423)..(447): n is a, c, g, or t
  misc_feature (452)..(509): n is a, c, g, or t
cccagctctccagtcagcagggggaccgttctgaagtgttgtcatgtgctgggattcagaacttgaacaagttgataaagtcctggggtgaaagtgaaacggagcagctctctgggttattgccagtgcacggatggtcagtgccctggaaaggaacacatggttagcttcaagttctcagaggcctctctttggcttttagcaccataaggcattttccaacttcaaagcaacaattctctgtcaataatgccccaggcctaaatgttgcatgttctcactcgtatgtgggagctgtgaaagtagatttcatgaagatatccaaggaaggaagttcagcaggaataaggaagtcttcacagctattgattgggtgaccaattctatcatcttttctgcagcaggacttcctctgggacggcnnnnnnnnnnnnnnnnnnnnnnnnngagannnnnnnnnnnnnnnnnnnnnnnnnnnnnnnnnnnnnnnnnnnnnnnnnnnnnnnnnnaagcagtcctcccctgggactgttttaagttggccttcttttcccccaaatgagctacaacatgacaggaaaaaaggaacatgtgcttttgggttgttctggtgaacagataactctaaggagggccctgtttgcctgaaaaggaagtgtgaaaccagaggattgcctccaatatccttttctattttaaatcactttttatagtgatgaaaacacttacgagaaaaacagacactgcctactggatcacatgcgttgtcagagagggcactctacgcttttagaggtagaccattgtgtggtatctctgtagggtaaggctctgtgcccatgcaggtttaggatgggtggcgcttccttcgccttctcaaaacaaacaccagatcaaaccccaaagcccaggaatttctcctatatagttttccttcttcattttttcttttctaaacaaattttcacattgtaaacaaagcgtcctattttgtatttgagttttgcctttttcttcctagggaactataagagagtttctgtgaccattaagaggactccattttcaccgctgaaatagaattattggccttatagtcttgctggcaaattgttagaaaaaaagtttatttacagtattttgcttttccataccaattctagtgagaagttcacattcttaaattcccagtcagcaactgcatttctcccctccaatgtcctctccatgacttatctctgaagtttcgagccaatgtttaaaatgtacactatttacaaatgaagtgtccaaatgccatattcccagctctccagtcagcagggggaccttctgaagtgttgtcatgtgctgggattcagaacttgaacaagttgataaagtcctggggtgaaagtgaaacggagcagctctctgggttattggcagtgcacggatggtcagtgcccttccaggaaaggatgtgacagtgtttgcagagctg

SEQ ID NO: 245567 - DNA, 987 bp, Homo Sapiens
  misc_feature (675)..(867): n is a, c, g, or t
tctttcctcaaattactctctaatataatacacatatttggcctcatcattaaaaaaagtttttttaactaaacacattactaggctcaagctagtatgagtgtacaagtaaaacaggaaacaaatattcctttataaacactaattccagaagacttcacacccacattctaaaatctaattagattaatttcccagggcattcatgtattcttagtagctttcaatttttaagtgtcaaaataaagccttatttttaaatgtgggtggtgttgatgaaacaagtatgagtaatacttgcaggaaacataatattagctttagctgcttagtgggtgatacttgaatagtccttcaaagaagcactttccatgtctcaccaatgtaaagcatgagttgtaatgtgttcacatagtaagtatagacacttataaaactcttttatgtgcttaaagtacagttttgcctaccaaaatggcaatttacacaaattttcaggattctgtctaatgtacaaagtgagggcaacaaaactgatatctaaatatcaactgcaaaatctccaggcctcccacggtttgttttcttttaatatccactaaacagaaaagacatgtgcaaaatttgttctcatggagaagtaaggatggcaaaactaagttgattttgtttctnnnnnnnnnnnnnnnnnnnnnnnnnnnnnnnnnnnnnnnnnnnnnnnnnnnnnnnnnnnnnnnnnnnnnnnnnnnnnnnnnnnnnnnnnnnnnnnnnnnnnnnnnnnnnnnnnnnnnnnnnnnnnnnnnnnnnnnnnnnnnnnnnnnnnnnnnnnnnnnnnnnnnnnnnnnnnnnnnnnnnnnnnnnnnnnnnttttacctgtgatttttagaaccatgccaggcatataatatacattcaactgttgaatatgttgaccctgatcgtggtgtgcactttcaagaggcagccgtttgaggggaaagaccctag

SEQ ID NO: 245568 - DNA, 703 bp, Homo Sapiens
agtaattcaaactgtagggccctttcttaccttctattttatttttgagctgggttttggctggctcccactccagaggtctctctcacaagatttggtgctgatgatctatttatagaactgtggttctgttgccatggtaacatgctggaggccagggcggctggggagctatttctggactggtgctgtaatgtaagattgattgggcaagttagtatatcctctaagccagactaactctgaactagtaaaaaggaagaggggaacagaaaacttaggcagtttctttaaataaacttttctctctttatgattttcttttctcgttagcccgctttaaaacaattccaatctctacatgcccctccctccaaaaaaataactggttttaacattaattttccatattaattaccccaatctttcaaaagtaaattttcctgtgtgtctagtcaagcaacacaaacaagatgctttttttaatgaaaagcgtaatatctggagtgttctatttcatggaccaaacagaacggaagagaactttgtgtttgtttcctgttcaggatggctagggcgagaagggcccctttgtgccaacctcttttgttctctttaatcaatgagattcttaaaaagtaaaaaggaagggatacagattctcagtaactaaaacagtctcgtgtgccttgaggggaaaaga

SEQ ID NO: 245569 - DNA, 746 bp, Homo Sapiens
ctttcccctcaaatcatttagaagtttttggggttttataagacatacgacttatttactcactgaaagacttagtgcatgaaaacgctccatttgtatagatcatgaaaagtttcaaggagactcggagagaaagagaacgaggctgcttaaaacttttaaaatgtgcttcctcacccgtggactcaaacgagcgcctgcatctgtcgtgaccgggagatacctggtggaactgcctttatgttaaatttcagatactggtagtgtgcccatttcttaagctgtctatttttatttgttgagctggggtttggctggctccactccagatgtctctctcacaagatttggtgctgatgatctatttatagaactgtggttctgttgccatggtaacatgctggaggccagggcggctggggagctatttctggactggtgctgtaatgtaagattgattgggcaagttagtatatcctctaagccagactaactctgaactagtaaaaaggaagaggggaacagaaaacttaggcagtttctttaaataaacttttctctctttatgattttcttttctcgttagcccgctttaaaacaattcccatctctacatgcccttcctccaaaaaatactggttttacattattttcctatttattacccaattttcacagtaatttccgtgtgttagtcagcaccaacagatgcttttatgaaggataccggggcctctggcaccagc

SEQ ID NO: 245570 - DNA, 627 bp, Homo Sapiens
agtggtctttcccctcaaacttatggcatcagtggcaaaaagtcacagcttatcccaggcaccctggcaggttctcagagcctgcctcctccctgtttatatgcgtacagcctggtaacccccaggcatgcaaatatacaatctgtaacaacacacagcctgacaccttcccctggtcatgtccagtttaaccttgaagtggcatttgtcacactaccctggtccctgattgcaaggagcttctgaagcaagggtgaatccttcccacactcctccatggttgccctccaggttctagcccagcctatttgttagggaggatagagaaacagagcaccccctgtgctttctgaaaatagacttgctcttgtcttgagtggtgaccaaagcagttggctcttaaaaggtgggagagcagcccaaccaatccccaatccttttcttctgaaactgagcaggaagggtaaggaagtggctaggtctccttggactgagcatggacatgagtcctgtgaggactggtgtctctcctctagagctttcatctttgggatgcctgagactccgagactatcagaagggaattgagccaccccagtctaagcacaacctggcttcacttcatct

SEQ ID NO: 245571 - DNA, 707 bp, Homo Sapiens
tttacaaatagttacaatgcatgaaatgtaaatttttcatggtacaaaggtttcattttaaaactctgtaaacttttaaaatgtattcccattcctcaaatttttcatagtaattcattactagattgttgacagagatatatgtgaggtctctgtaagccttaggcttccagataccatgtggattttgtttttctttttataaacttctgtgatattctgattaaattaaacaccctcacttgctgcccaagttcctttgtgttttcaaagagtttgaggattcattactaactaaataatgcaaaatatctgctgatattgtcacattaccttccttgtactttaaggtgtaagtgttctcattgctcagttctctaatagcctatcttaacaggcacatattgccacaaaggcaatagaaatgtaaataactgtgtaaaatctcaggttgtagcactgcctgcaacatggtttaatttcacatgagatgtgtacctccgtaagacattttgtccagtttacttgagtgattactatttagtaataggagttcacgtacttaatgtttgctagggtttagcatgtattacctaataatggaagctataatttgtgagtgcacgataatttctagtttgtctacatgatttctgtggttctgcatgagtgtcccatgtatgtatttaaagagccaatgaaactgc

SEQ ID NO: 245572 - DNA, 622 bp, Homo Sapiens
gcttctgacaaggtatattatggagtcttcaagttctgtgtcaaatctagcaaatgagttcagtattacctgtttaaatttgtgaataacgcattgatgtacaccctggattccctaaaactgtcttaaccagggtcttttcccctcaaacaatactccaaaatcaatgaatctagagattctttgcaccggagtggtttccaaatcaattgacctctaagctccaaatgcattttgattctgcttctattgatctgaaataataaaggctatggaattgggatatggttctggtttctagtggagtttacctgaaaaactaggatacctttgaccatccatatttctaggaagccctctgactatccatatttctaggaaaccctttgaccatccatatgtggctacttttttatacatacagtactcatgcaaaataaacagaaaaataaaagagtaaatcccaacttccaggtgacagtttacagcatatctggcaactacgtggtagagtttagtgggcctgccagagtccttgtgtatgccccagacataggcatacacagcacagagctcaagaaagctgctcaagaaaatgacagtcttttttttctgtgtctta

SEQ ID NO: 245573 - DNA, 468 bp, Homo Sapiens
caggggtctttttcccctcaaaggctctgacacatctttctgggctaccgcaacattctccctcacataccaagtgcagatgtctacattcctcgggcccacttaatgacttttgcactctgatttacatttttagaagcatctctgtggttgctgtgaagaataaaggaaggaggcaaggcaagtgtggaagcaggctactcacttaagctgttgtaagtcatggcctaggctgttgatgaggttggactagggtgctagtgatgcaggttgtgagatttgggatcgtattagttgtctatactgtggaacaagttatcctaaacttagcttaagacagttaatgttatctcacaggggtttgagtgtcgcttagctgggtgcctcatgctcagggtctcacaaggttacagcttagatcttctcttaggctgctgtgctctcaaggtttgaggggaaaagaccctg

SEQ ID NO: 245574 - DNA, 639 bp, Homo Sapiens
cagggttctttcccctcaaattcagaatacattcatcccagagtcacaataattatgtaagcaaatggaatgcttattctttagaggtataattaaacagctgtctaatcatttgattacttatgactttgtaatgaaaattatcaaacacaacagtgagaatgtaatattcaatcccataatcaaacataacctgttaatcttttgtaaggttttacattttgataaaatgttcaataaattgtggtgctttaatttgcatgatgatgatgcaacacataaaagcaagtgatttacttgaaaggtgatcccaggaacagaaggaagcagtgaaggaagatgggaaagagcaagaaaccaataaaggctgtggagtcggtcagacctatttttgttcatacatttttggagttttgagtccagctctaaagttaccacatgtgtatggcgtattcctagtatgactatgttaactcaggataaactacggctcaggtactgcagaggctgctgcacgtagaatggaccagaaccacctggagggctgtaggataacgggttgctgggcctctccttcatgttactcactcagcagtctggtctgctttgttgcaattttcagtgttcccaagctgttgt

SEQ ID NO: 245575 - DNA, 659 bp, Homo Sapiens
caggtcttttcccctcaaatcgggccttgttgaatgtggcacagctccagctctttccaaacatgactcctgccagtccctatgctgtgagataagaatgggctacacctaagcaaagttttgtaggcagctctcccttcctttatgtgcttatgcaaccttttcagcacgttggtacctacgtgtcagggacaatgtgtgattttggtggagatgcttataatccaaagtattttcatggtggttccccaaacaacactaggctcagatttcagtttatcctcctaatattaatgttgtattcaaggatagatttttccctctcaggtgtgacttctactctttctgctccccctcccacaagcagctggattttgcaaaaactcatcaagctacaggttgtcgaggcctaaaacattcttatttctgttgagcttatgagaggtatgagcataattgtgtttttaggtagtgatgtggaatgcaaattgaattttcggaaatactgggaagtacttctgaaggaggaggtagagagaaaaaacttttcattgtgactgtgagctctcccttcttcaggttaagctaaatttagtgacacatagaaaaagttggggcttatgatattgaattcatttccaagcatatcatgggttgta

SEQ ID NO: 245576 - DNA, 606 bp, Homo Sapiens
gggacactctctgaaagccttgagctgccacataagaagtctggctaccttgagactgtgatgctagagaggccatgtgtagatactccagttgaagctcccagctgagcccagccttctccatcaaagtgccagatatgtgattgactagcccagaccagcccagataccatctaaataccacaggataagctttgttactatcacgtggaaaaaatatatctattaccccaattgagccctgtttgagtttctgacctctggaattgtgagatatatttaaaaacctgttgtttaaagccattagaaagttttgaggaagtttattatgcagcagtagataacaagaaatgaatttggcacaaggaagttgagagtgcttttgcagcaaaaatatgtggcattgacattggtactgggtagtaggcagaagctgaaagagccatgaaaagaccgatggtgaaaggttggagaacaatgaggaagatgttattagagctggagaaaatatgacacattatgtggttgtaagaagttttgtgaacctgttgactttatatcaatactttggattttttctctggtattttgaggggaagaccctgg

SEQ ID NO: 245577 - DNA, 147 bp, Homo Sapiens
tccaggtcttttcccctcaaaacatctggaacaatcacttacagtggaacaatgactgtgtttcactacattttatcactgtttatctatttgccttccccattagatcataagctacttaagggcaagaattccaggcaagtgcac

SEQ ID NO: 245578 - DNA, 108 bp, Homo Sapiens
cagtggtcttttcccctcaaaggagaaccatttgaggatgtgaaccacattgtctggcttctggcttctctcacctgttgacttaagaaaggagataaggaattatcc

SEQ ID NO: 245579 - DNA, 708 bp, Homo Sapiens
cagaggtcttcccctcaaataaaaagagtcacctgcctgccttcccccgaggctatgcagtctggaatacacggatactaaacaaaatcaacctcttcttcagctggccaattgtgaatctcccaggcacaatgactgtgtggctgcctcaaaaccgtgaaaatcattacgacaatgaagaattcacataatctatgaacagcacagcaactcacgcaactcatcggcactactcacatctccaacccccacacacctagaaacatctcctggtacacaacactgtgcagcagccctcaaacaggctggagtggagagggagggataccagtctcttaaagccaactgcttcatggcagttgagaacaaacaatactgtgcccttagacttttcaaagcctaagctagtgtgattggcagctgagtgattttgggattgcagagtatggggtcacatacctgactgcacttcagagccaagttaatacctttcattgttcactgcctccagttcccactagatcaggggctcttatcaagcacctgcatcacaatctcataggtcccctggtaaaaatgcagattcctgtggcccactgaaaataaacatctgcggagtagcctgacaaactacttttaaacactacccaggtcatctttatacacctttaagtttgaggacctctggcttaaagcgaagctctcaac

SEQ ID NO: 245580 - DNA, 601 bp, Homo Sapiens
  misc_feature (576)..(576): n is a, c, g, or t
caggggtcttttccctcaaagacaacatgaaaagattcagtgaagaaagctgggttgatcctcttaagaggttgcttattaggacactgatcctcagaactagtaaataaaccagggcagacccctgaggcttgacctgggagagctgttcagcataagaggtgggagatgcagagagggtaaggtggttccggtccctgctgaaagaagaaagactctgaagggtaaactcatcacagtagattgagaatttggtgcctgttcattcctctgggaaatgggtacttggctagatcctgaggatattatgatggacaccacaaagctctcctaggccctatggggacttcagcaaccaaaatgctttgtgatgtggtgatgtgtgccacatggtacaacggcggtgaagcatcaggagcaacagcagctttcaggaagtcacctggcatgactcagcctacagtcgagagagttataacttggtagggtttcagccaggcagtatttgccccgaaaacttcagtggcttcattctacaagctcctctccttcctgagccttctttccatagacatntagataaaaagagctgattcagtgg

SEQ ID NO: 245581 - DNA, 377 bp, Homo Sapiens
tctgtgttccccgtcaaagcaggaaatgttctaagtgtgttaataaaggtttagcgttagtcagtgtcttgtccgtgtgtcagggagtcagggtctcgtggtggttgtatgtaaaaagtcagcagccgaacccaaggtcatctagagtttttcgtccgtatgtgtagtcttctaggaattttattgttttgtgttttaaatttagttttgtgatctatttgagtaaatttttgtgaagagtttaaagcctttgtctagattcattttttgtaatgcagatttccagttgttctagcatcatttgttgtcaagactgtctttccccctgtattgcctttgcttcttgtctatgatcattgagggaaagacctggaccg

SEQ ID NO: 245582 - DNA, 377 bp, Homo Sapiens
attgagataagcacggtgtacccaccgtgcccagcccattctcctacattttcggaaacttcaaattaccacagattttcaatctctgaatggaagccaatataattcatctcttcttttctaccaaactcctgatagttcaggtgacgtggatgttacattaactctgtcaggcccccgggctgctattaagtgccctgtaacactgaggtcgctaaacctatttccctacaactaagagtttttgtctcccaaagggccaaacttgcacacagcagggacacagtggggcagttagttgcttgggaaagagaaacttaatttcttttgagagtgaggttattttaaggtggtcacaggtacgcagggtcagtcaa

SEQ ID NO: 245583 - DNA, 359 bp, Homo Sapiens
  misc_feature (114)..(122): n is a, c, g, or t
  misc_feature (152)..(254): n is a, c, g, or t
  misc_feature (267)..(277): n is a, c, g, or t
caggaggctcctttgagcctagaagttggagatcagcctaggaaacatggcgagatcagcctaggaaacatggtgagatctgcctaggaaacatggcaagaccccttttctatnnnnnnnnntgtaatttgcccggcctggtggtgtgtacnnnnnnnnnnnnnnnnnnnnnnnnnnnnnnnnnnnnnnnnnnnnnnnnnnnnnnnnnnnnnnnnnnnnnnnnnnnnnnnnnnnnnnnnnnnnnnnnnnnnnnnagacactgtctcnnnnnnnnnnngaaataaagaagcaaaagatgatgatgaccttataacagataagagagagatttttctacccaggtttcccgtctcgaacgc

SEQ ID NO: 245584 - DNA, 437 bp, Homo Sapiens
  misc_feature (426)..(426): n is a, c, g, or t
atgacagagtgagatcctctctttaaaaaaaggcagagggagatgattgaaaaaaaccactgactttcccccagataaacagaggcttggtgagaaggacttgcccagagttaggcggaattactggttgcccggagactggggtacaggttccttaactctgggccagtgctctgcctactgtacaggctgtcatttggactttgagctgctttcggtgggagggtgatatcaaaccccctttctttgactcttggccaactgtccccgcccctgccttcgagcccccatgcttggctcccacactccctggcatatttcaactctcccgggctcccgcaacacctctgctctagccccatctgcgtctctcgcttcgacaggggcgtctgggcatgtgagtgtcagtgtgtgccactccaagtngcctctcacac

SEQ ID NO: 245585 - DNA, 497 bp, Homo Sapiens
  misc_feature (33)..(33): n is a, c, g, or t
  misc_feature (39)..(39): n is a, c, g, or t
  misc_feature (338)..(439): n is a, c, g, or t
aattgaaatgtccaaaaaaacctcactaaggtnagggcnaatggtgttaccccacgacccattaaaccctgcaacccaaacttgcctcatttatgttatatttaagtaaatgggggctgcaattccttaggacatttggacattctgcaggcttggtggaacatgttctgtatggccataaatattctgtaattataattggtggtcagccctgggatgtggttattttcaggccataagcatgaaccttgtaagtgcctagctactcactttaagatggagtcactctagtcatgttttattaaaaaccagaggccagccaggcgcagtggctggtnnnnnnnnnnnnnnnnnnnnnnnnnnnnnnnnnnnnnnnnnnnnnnnnnnnnnnnnnnnnnnnnnnnnnnnnnnnnnnnnnnnnnnnnnnnnnnnnnnnnnntacaaaaattggctgggcgtggtggcaggtgcctgtaatcccagctacttgagaggct

SEQ ID NO: 245586 - DNA, 282 bp, Homo Sapiens
gagacacagtgagaccccgactaaaaggaaaaaaaggaatgtaggtaaaacaaattcaattttactatatgtgttgttgaagtgagcacataaaacaaattcaaaatgatacagttatgtttgcacagtggagcaatagtaaattggacttaaaaaactttattatgaaaaatttcaaatatattcaaaagcagagatcatagtaccatgtactattgcataacgattacccagaatgaatattattaaatcctgtcactctggttttacccaggtcctcac

SEQ ID NO: 245587 - DNA, 264 bp, Homo Sapiens
  misc_feature (8)..(8): n is a, c, g, or t
  misc_feature (17)..(17): n is a, c, g, or t
ttcccagnccccagtgnatatttgggacctattcattaggtgaaccctttcgtgggtttttcagtctcgaggcaggaagccccctgagtgctaaaaagccatcattaggaggaagggtgagaaatgcccccagctcctgatcaggggagaagctgtttccatcgcccttcctgtcgcctccccaccgcacagctgtatctactgaagcaggagctgcagcgagccaacatggtttcctcctgtgagctggaattgcaagagcag

SEQ ID NO: 245588 - DNA, 391 bp, Homo Sapiens
tcttcaggatggccccctgtcaccctcctacctgaggagctaggattggagattgcatgattgacacaccagagcaccaatgggaaaactgtttgctcaggtacatctgtgttagtaagagaggatcctttaccccaaacttacttaactagttttgcagaattaagaaacgtgaaactaattagtccctttgcttatttttgtttgggctcgcctactgcaagaccacagaagtgtacttcctctgacaattaactttttaaattcccaatgttctttaatcttgaaacgagttgtatttagccctggacaaaggctactgcttcttagtggtgtgagaggaaatctaccagagtcttttccggtccaatcatgtctcggatgatgtggc

SEQ ID NO: 245589 - DNA, 571 bp, Homo Sapiens
ggtacccgatttggatctgattcagctcaacgacctgtctgtctgcattaacagtagcctgaattatgacagtagtggctgtgctcccaaagggggttaaagtacttgagctatcccttctggaagcacagccccttttgaagacagaagatgctgactaattagcagttccagccgtgctcctcagtagccaagggaaatgcaggaaagaaatcccatcagccaatcccagaaatatcagggccctcatctttgtgtcccatggagccggagagcacagtggccgctatgaagagctggctcggatgctgatggggctggacctgctggtgttcgcccacgaccatgttggccacggacagagcgaaggggagaggatggtagtgtctgacttccacgttttcgtcagggatgtgttgcagcatgtggattccatgcagaaagactagcctgggcttcctgtcttccttctgggccactccatgggaggcgccatcgccatcctcacggccgcagagagccgggccacttcgccggcatggtactcatttcgcctctggttctaacaatc

SEQ ID NO: 245590 - DNA, 789 bp, Homo Sapiens
ttcttcaggatggtgacaaattttgcagtggtcacgcccctcactttcccatgaagaaagttctcttgctgctctggaagacagtattgttcacgctaggcggctttgaggagctgcagagcatgaaggctgagaagcgcagcatcctggggccttccccccgcttcctgaggacagcatcaaagtgattcgcaacatgagagcagcctctccaccatcatctgcttcagacttgattgagcagcagcagaaacggggccgccgagggcacaaggctctgataaagcaggacaacctagatgccttcaacgagcgggatccctacaaggctgatgactctcgagaagaggaagaggagaatgatgatgacaacagtctggagggggagacgtttcccctggaacgggatgaagtgatgcctcccccgctacagcacccacagactgacaggctgactttgccccaaagggctcccgtgggctcccaaggtcagagagaaagacgtgtgagagtgtgtccttgagtccagccgcagcaaatttataggttacactctaggcagtgacacgtacacagtggtggggctgcccaggccaatccacgtaagcatcaagactctgaaacagcacaagtacacgtgcgattgcagaggtccaggcacagatggaggaggaatacctccgctcccctctctcagggggagaagaagaagttgagcaagtcctggcagaaaccctgctaccaaggctttgctgccccagcctggcctgctggatatggatgccatgc

SEQ ID NO: 245591 - DNA, 459 bp, Homo Sapiens
attgtggggctaaaaggataaagcatttaaagctttgaattttcttgagcctggtttgggttgtttccataggttttaatatcaagtactgttgtgatggttaattttatgtcaacttgagtgggctgagggatgcccagatacctggtaaaatatttctgcaagagaccagcatttggattagcagacagagtaaagaagatccgccctcgccaacgtgggcagacatcatccaatctgtcaaggacctgaatagaacaaaaaggcggacaatgggcgaattctctctctcttcttaagctgagacatcaatcttctcctacccttagacatcagagctcctggttctcaggccttcagactccaggacttaatgccagtgtgcccctcactcccatgcccaccagttcgcaggcctttgtagtcagactgaatcacaccactagctttcctggtctc

SEQ ID NO: 245592 - DNA, 375 bp, Homo Sapiens
actctagttgatccccgcccaccagagattgatgaaattacagatttaagccacccacatcctcagttgttttccttagcatataaatacttcgtagtaagctttacaaagaactgatgcactgagagacattttttctgagcttagcaaatcaaaaacaatttttaaaagtccttatcaacaattagaacagttttgctgtcaaataaagtaggtcttttctcttttattctcaaagaaccccttaataaaggaggcactgacaggtacattacacattaataggagattttaacactgctcataactgataatctagtgaccattaactccaagttataacttggagttaatggtcactagattatcagttgt

SEQ ID NO: 245593 - DNA, 216 bp, Homo Sapiens
  misc_feature (152)..(152): n is a, c, g, or t
tactaagggaaaataaagagagcagggtaggggagaatctaaagaccatgccaggtgcacagttgaaatgggtatggtggatcatcattgtggaagtggatgatcttaaggcccccagtggcttccagactcctgaccatgactttcagggncctgaatgatgtgcctccactggccatctccacaactcccttctctactgggaacctctagagt

SEQ ID NO: 245594 - DNA, 244 bp, Homo Sapiens
ctagaggtatcccttccaaataacaataagatatatctcatctagtccactctagcaagcacgaaggctcattttttacaattctgatctgtgtacaggctgtagcctccattcttaatcatttattagttcatccattcaggtgtgtcaggctccacatcaaatgcttctttctccaccaaggaatcattgaatctcacagtggggcttgacttggcctttgtctccaagtcatagcttagtg

SEQ ID NO: 245595 - DNA, 469 bp, Homo Sapiens
accccgccacagagattaatgaaagcttatgaatatatgaaaagcaagtgtatcattttaagatatatacgtaatgtttacaatgaagtagcactatcatattcaatttttatcgtacccatttgaaactttcaaatggattttatacagacatttagattgcttccccaaatatcaaattttaaaaaactcttaaattcagtccacagatttacacaaaatgtatcatcctttcaaatctcaagagagttatgactaaactgggccctacaaattagtttatatgaatccagataacagtaacaaataaatcttcaccccaaaaaaataaactatatttaagaagtatttgattatcttttacattagagagtcctcagtagacaggcaaatcaaagaatcactgcaggcctgtgataacattcgtttaaatttgctaaattatccatgctgttcccctcctttagcc

SEQ ID NO: 245596 - DNA, 557 bp, Homo Sapiens
agctcggtacccgtagagattgatagtggtattgattgcataacaatatggacatatttaatgctgctgaactatacacaaattcagctaaaatggtaaactttatgtgtatattaccacacacatgaaagtatatgtcactgtgatggcataccactgaatttagccctgcctcactgcctcttccctgataatttttatcaggcttcctgttggtctattaggactaattgggagaaaaactcttcctgaaataaaattctatagttcagttctgttaggtacaggcagtgatgttgtattttagcaattgccatcagtagagtttgtctttgtagtctcgagggatcattattgatgtctctgggtatgctgttgccatttgttgcagttcaccagatgctggcctgcctttgccggtttaggaagagattatagcttgaagcattgtctgaatgctgctttgacctagtaaatcctgggttcaggatgagagtagtaacctttatgccagcaggaaagtgattttgtgaccagtttgttagggaggaagcccg

SEQ ID NO: 245597 - DNA, 152 bp, Homo Sapiens
aacctctgcatttttgaacgtcctttttttagggtcttaattgaccattcttccttgattcacatcatctttatgttgcccacactccagttctctgcacacttactcagttgtaatcacaatccagtcctgcttcatcaatctctgtggcg

SEQ ID NO: 245598 - DNA, 744 bp, Homo Sapiens
  misc_feature (225)..(284): n is a, c, g, or t
ggtgagaagagcaagcagcccaaagggaccttcctcattaagggctacagtgtacggatggccccccacctgcgaagagattccaagaaagaatcctgctttgaactgacctcccaggataggcgcagctatgagtttacagctactagtccagcagaagccagagactgggtggatcaaataagtttcttgttaaaggatctgagctccttaaccattccatannnnnnnnnnnnnnnnnnnnnnnnnnnnnnnnnnnnnnnnnnnnnnnnnnnnnnnnnnnntatttatgaagtcttgccagatgaagagcatgatctagaagaggatgagagtgtcactcgacgaaaaggagtagactatgccggttactaccagggcctatgggattgccatggtgaccagccagatgaactgtccttccaacggggtgacctcatccgtattctgagcaaggagtataacatgtatggctgggtgggtgggagaactgaacagcctcgttgggattgttccaaaggagtatctcaccactgcctttgaagtggaagaaagatgaaacccaggaaatatattcttccctctctcctgcctttatgaggaaactgatcatcaaaagttcccactccctacttctgccaccccaccaacgccttggactcctctctttgctgaagagacccaagtctcttgacacctcagagtgactgtaagctaccagtaagacaggtgggaagaggcacg

SEQ ID NO: 245599 - DNA, 444 bp, Homo Sapiens
gaggctgtctagaggatccctagcgaactgtgaaaggtcgaggagcagtactgggttttggagagggaaggttggaacaagggcctttgcaggctataagcttcatttactaggccaggtctttctgtgtgaatgtgctttgactttggtctgtttatatgcatggggtaaacgtgggacagcctctgcagcctcactgcctgccggacgtgggtccagggctgccagctctgggtccttggtctgttgggggtcgcaaactgaaatggccatggggctatctgggcaggcaacacagatgagtggggatgggggaccccttctgtacagagcagcctcttcttagtggccgctgacaggctgccccatgaggacgcgggcccaacattacctaatttaatcttctagaagtcagaattctgaatttttatgtcaactctcgac

SEQ ID NO: 245600 - DNA, 474 bp, Homo Sapiens
taaacttctggagaattcataccaacttatatataaccacttttgtgcctgctgatgtggactacacaaaaggttcacatgaacactggattcagtctgcaattcagaaatgtgtcagattgccgttgtaattggaagatgcttcagaaactctagaaaacttagtctatagactgctccagacattacaggtgagccaacatacaattaaaagggttcaagcggtgtttgccaaacgaattgctctaattgaagcagcagttgtgtgactttaataaggttccaggattatactgtccctttttttgctgtgacttccctttgcccttttctgatttgtcttcatccccttttccatggggcatgacttcttaagaatgagccttcctagtgatgtaggatgagatgaaacatacagtcacaaagtcatgtcttctacaatgctttctctgaaagcttttgaagaatcggggg

SEQ ID NO: 245601 - DNA, 184 bp, Homo Sapiens
cgtaccttgcctcgccctcagcagctgccacacctcttaccttccctctggtcgcacctcctcgcgcccacgcacatcaacactcaaggtcccccatttcctcactgagatctggaccccctcacacccatttcccagcagcttcctgcgtcgagaggtgtttctccaagatatcccagcgcaa

SEQ ID NO: 245602 - DNA, 237 bp, Homo Sapiens
taccgtcgccgtgtcttctcccatcataaatcaacagtctatagaaacagcaagctgacccacagctcatattttaaggacagtcttgtttgacatagattcacaactgcacaagacaaggaactatgagtgtggcccgtggggaggtcgggagacagcccggatgcctgagatgtggtgaggtgtcaccacgagagctctgctgtgccttgagataaactgactgggacgcaagta

SEQ ID NO: 245603 - DNA, 209 bp, Homo Sapiens
cttgcgtccatcaggaaggagctggaacaggtcttctgtcattcgattcaaagctggaggcagctgatgagggctccggagatgtgaagtaccacctgggcatgtatcaccgcaggatcaatcgtgtcaccgacaggaacattaccttgtccttggtggccaacccttcccaccttgaggccgctgaccccgtgctgatgggagcaaga

SEQ ID NO: 245604 - DNA, 330 bp, Homo Sapiens
tgtgagccactgcgcccggccatggctccttaatcttgatccaaattattgttacatccagaatgtgatgaatcaaaatctcgagatgggggtccagcaatctgaaatttcagtatgccagggcttttctgtatgtcaaagtgggtttgaaatagttaatttttcttctagtctgaaatgtatcgggaaaatttggaaatcctgaaggctggaaattgagataagtttttctaggatttgtgtctcttgctattggaaaactgatggtgaccaattcatgtttacaaataagatcctcatagatctcggtaaattataatttgctacaaa

SEQ ID NO: 245605 - DNA, 357 bp, Homo Sapiens
gactgcatgcttacgccttccatattttctaagttgtcaccatctgccacggtgactgcctctgtcaagcacagcgtaacatgttgcgcctccatccctcctccaggaaactctgtcattccctgagaatctcgatttatttgggctaacaacatcttctaccttgaagaaaaataaagacacttgggaacaaagaatgatacatgtgaaatgaaagttacaaagaatatttatgaaccacaaaaagctgctgaggatgtaatggtgttggaaataagatgaaatttcactcaatatgtagggtaagagtattagcccaaagtccaaggcatgcttcttataattcaacaattcaaa

SEQ ID NO: 245606 - DNA, 313 bp, Homo Sapiens
acacactcttatacttgacacttagtgctaacagacggtgtgacttccccatgtgagatcccttaagagctaggcagtgtcagattttcctgatgggcgcaagatgcagtcttgctccccatcaggctaaatagcttggggtattcccacaaaagaccatgcatacccattctgacacttttgttttctattcctgctatcttggaagcccatctctgctcatctacgttatttgaactctttagagcccagctcaaatgccctctcctgtatgactctcctctcccaaggcaggcattattaatctgatggg

SEQ ID NO: 245607 - DNA, 147 bp, Homo Sapiens
cgttcttctaagacatgagtcagagcatgttctttctcaaaacttccagcatctacatctcacccagaggataaacaaagtcaatacaaaaactctaaggcccttgaagacctggcccctttacctttctgatgggacgaagatgcg

SEQ ID NO: 245608 - DNA, 217 bp, Homo Sapiens
taacagattggataaagaaaatatggtacacatacaccatggaatagtatgcagccataagaaacaatgagatcatgtctcaggaacatggatagagctggaggctattatccttagcaaactaattcaggaacagaaaaccaaataccacaggttctcagttgtgagtgggagctaaatgatgagaactcatgaacacgatgaagggtacagacac

SEQ ID NO: 245609 - DNA, 445 bp, Homo Sapiens
gcagtaactgttttttaagtctctcgtagtgttaagttatagtgaatactgctacagcaatttctaatttttaagaattgagtaatggtgtagaacactaattaattcataatcactctaattaattgtaatctgaataaagtgtaacaattgtgtagcctttttgtataaaatagacaaatagaaaatggtccaattagtttcctttttaatatgcttaaaataagcaggtggatctatttcatgtttttgatcaaaaactatttgggatatgtatgggtagggtaaatcagtaagaggtgttatttggaaccttgttttggacagtttaccagttgccttttatcccaaagttgttgtaacctgctgtgatacgatgcttcaagagaaaatgcggttataaaaaatggttcaaaattaaacttttaattcatttccccccaac

SEQ ID NO: 245610 - DNA, 469 bp, Homo Sapiens
tatcattcttaaatatttcttctacatatatttagaatcacgttagacagtgttacaacttttctttcaaccaccaaacatatttcagaaaactctttgaaagagaagggaagtctatcgtatttacgcacatttttagatttcttatttttgttataatcattccctttctgtttagagaacttcctttagccatactgctagcatcagatttttagccaaaaaaaatttttttcattcataatgaaagggataatgacattgtcaaatgacagaaaatgggtataggattctgggttcacagttcttttctttctttacttgaaaactattgtgccacttttttctagcctcctggtttctgatgagaaatccattgtgttcttatgtgttttattcccctgtaggtaaggtttcatttttgtctctcaagactttcttgcgtttagtattcagaagttaactacga

SEQ ID NO: 245611 - DNA, 875 bp, Homo Sapiens
aaggtaaacatctacttgtactttttttcttagtcatatttgaaaaagtagaaaattgagttacaatttgattttttttccaaagatgtctgttaaatctgttgtgcttttatatgaatatttgtttttttatagtttaaaattgatcctttgggaatccagttgaagttcccaaatactttataagagtttatcagacgtctctaatttggccatgtccagtttatacagtttacaaaatatagcagatgcaagattatgggggaaatcctatattcagagtactctataaatttttgtgtatgtgtgtatgtgcgtgtgattaccagagaactactaaaaaaaccaactgctttttaaatcctattgtgtagttaaagtgtcatgccctgaccaatctaatgaattgattaatttaactgggcctttatacttaacttaaataaaaactaggcagattttgaaaaacccagactcaatcgccgcatactccctccgcccacaccataaacccacctagggcggaggataaccaatggcacaccccccccgcatttaccacctcctgcccccccacccggccctctcctatgcacagaggatgcacccccgcgcaacacgccggcgatgcggacttctcgctttaccggaccttccgcccgcccacaccccctctctcacggatcatccacatccacttactctcgctcgccaacgcacaccccactataaccggatgtacgcgcacacgttacctccatcccccaacgttcccgccggactccagccgaactacgaacaacgctgctatccccgcgcccccctcaatctcatacccttccgaaccaccaccgcctcctctccgctccatcccg

SEQ ID NO: 245612 - DNA, 194 bp, Homo Sapiens
cggctgtactgcaaaaacgggggcttcttcctgcgcatccaccccgacggccgagttgacggggtccgggagaagagcgaccctcacatcaagctacaacttcaagcagaagagagaggagttgtgtctatcaaaggagtgtgtgctacccgttacctggctatagaaggaaggggtaccgagcacgaatatcg

SEQ ID NO: 245613 - DNA, 1101 bp, Homo Sapiens
  misc_feature (888)..(888): n is a, c, g, or t
  misc_feature (978)..(978): n is a, c, g, or t
  misc_feature (1033)..(1033): n is a, c, g, or t
aaattgttctcatctttttaaagttgatgcattttcaatcctgcttacacaggctgttcatttggataagtaaataaaatgtctaaggtgaacttggcattatgtggagatgttggaccgttatagagcaatacaaattcctatgctgtcattctgttttctgcaaatgcaaacgtgcttatatggtcaacagtgcaaaaatagggtagttggctgcatatttagggtattacctaagcatttgttctctaacgttgctctactagaatgatttttttcttgcatcttttcacattaatgatgttctttatataactttcatgcgattatttagttttttaaattaataaagtgaatttaagaaatattgaaataaacatctaagtaattgccattttaaacccttgtttcttactgtgggagagggggaaatacagcactcatttcttgtttttaatttgcagaagtaagtgaaaatctatgtaaaatcaaacccaaagagttggactgagtgtgtattgtcttgagattaagtgacaaatagtaaagtgttactgagtaattaagcccatgtatttttttctttgtgagttgaaaatctttgaaatatgtgataaccgaatgtcaaaagttcctaaactctaacagtgcaggttgttcactgtaacgaggtaactcatatttgctggttacataaactacaagtactgctctcacaatatgggactttgaactgtgatgtagttcaacagttgccggcatcctctcagctgatacgctgcgaatattttgggttagacttgcagccagatgcagttttgcaacccaagaaaaaagttgaacctatgatcaaaaactgctcccaagatgaacctggaaaaaaatcanctaagctcccttggcgatctgcaggaacactagtaatgactggaattactccgtgatctttgatgactattacacataacagcactctancaccttttcttactggcatggacttcctcagggactgctacttcatggatgatancttcattgctttgggtagggatttaagtagtcaggggaaaatacgcagttttaatacaggtcttaaca

SEQ ID NO: 245614 - DNA, 361 bp, Homo Sapiens
tcatactccttttccaaccacgctacgcttctcttattcttcaataattaagcatgcttgtcttaactctgtaccattacgcatgtaattaatttcctttgcaaaatactcttatggtatctttcctccctccaattggctagtcctcctttcattttaaagattttgttcagacgagacccttctgaaacatttgtagacttcagtgaacatcataaatgtctaataaatacttactaaatgaataaaccaaggaagttatatttccctttagccttctcttactatctcctggacaaatcactaatagtctttttattccactctttttaatcaccatactaggacaccgtatagctag

SEQ ID NO: 245615 - DNA, 208 bp, Homo Sapiens
cccatttttgacagcaagatgagtaccaaaactgtagattcatttaaaataattttcttaatttgtctttagtatccctttgttttacaaagcacatacttttaaaaattagcaagataagtcttgttgccaagatgtagaattttgccagaaaaattattttgattaaaattaattattttgaaaatttcttgcttaataaggaaca

SEQ ID NO: 245616 - DNA, 213 bp, Homo Sapiens
gattcccttctgcccccccagccccctggggtgaaaagcactgcttttcctgtgtaaagaaaaaacgttcacacccagaccagtgaaatgtttttgtggccacgttgtgaacgcactgagtgtttgttgtggcccaactaagacaactttatagattaatgaagagtgatgtatcctttcttccgaacagaacatttagttctcactcggccc

SEQ ID NO: 245617 - DNA, 266 bp, Homo Sapiens
cagtgttggaggaactgcattatactgcactttcggtgacatggagtcacctgtttgtactgactttgcagacaacatggacttctattacactaagttacttcagggagtggcagaactgaagcactggatctacctctcctagcagcattccagacacagacatgctggcagtgagagtgaaaggcgggagactttctaaacagtttttctttcaggaattctgtagcattcccccttccctctgttagacctgtaatagctag

SEQ ID NO: 245618 - DNA, 352 bp, Homo Sapiens
tactgggacaacgtggagccacgtttgcaggagctccatttgtatccctgctggtgttgacttctgtgtaggggccagttcatgtcccctgattttcccttcccattagataattgacgcccacccccctttctagagtgatgagagtcaagaagaggggatgtatggacggccttattcccatgtgagaggaagatgacctgatccacctagccttttcttctggatctgtcttacctcactcacttgacctgtaccacatctcacagtacggtaaacatacagtgtccatgtcccacttacatatccccatgaatacataatccatcagtcgtaggacactgtaatgtag

SEQ ID NO: 245619 - DNA, 337 bp, Homo Sapiens
ttttttcacaagaagggtcactgccacaacagcacagtcagcgggtgaattacaggtgcctgctgcctgcctacctgggtaatctgatcttgtctgtatcgccgtgtgctcatcactgaagaattgcaggccactcatgtcagtgaccagatttgtggcttataaacattagcagtttatttatgttttaagatgcaaagatgtgtgtttgatattcactttaataattagaaatggatcttgtaaacagggcatatatcaaagatgaccttataatatgtacccgaatatacagttcaagaattttgtctgactggaaataaatgcattttgtagc

SEQ ID NO: 245620 - DNA, 210 bp, Homo Sapiens
ccggtagtactgctcctggggattagcagactggtagcactcatcaaggccttggagaatcttcggattctaccccctcatcttggaatcaggaaactgcaggggattgcccaggggcacagatgtcccaggctcctgggtgggttggaaccatcaagctccctgaagaaaggctcccaagacagggaacataattattcccccagaaca

SEQ ID NO: 245621 - DNA, 370 bp, Homo Sapiens
tcaagctccaacaagaagtcatgggctacctccaagtggcaaagcatctaaacaaaaccaagttgtcttggaacaaagatggcattctccatggagtcagatatcaggatgggaatctggtgatccaattccctggtttgtacttcatcatttgccaactgcagtttcttgtacaatgcccaaataattctgtcgatctgaagttggagcttctcatcaacaggcatatcaaaaaacaggccctggtgacagtgtgtgagtctggaatgcaaacgaaacacgtataccagaatctctctcaattcttgctggattacctgcaggtcaacaccaccatatcagtcaatgtggatacattccagtgaaatcc

SEQ ID NO: 245622 - DNA, 243 bp, Homo Sapiens
cgcgggatttcactggggacaggcttagccgtgagtgcgggggatgttcctgaggcgctgggtctgtggtcacctttccttccagcgaccagggccacctgctccccttacggaatcgggtctcctgggaaaggttccataaaaagtcttctgttactggaccatgttgccatctgaatctaaggacatggacactaaatgcagcccagccccatgaccacagtgaaggcactgggcttattt

SEQ ID NO: 245623 - DNA, 489 bp, Homo Sapiens
tgcttcatttcgaggtatgcgttttccacactccgtctgcaccccagtccgtctctctctggctgctgcttctgcatccccaccatcctgccctcccttatcactgttctactttaaagtctccccacagcggtccattcatcagcttcctctgtgacagctcccttgctgtctgtgagcaaccaagctcactggactcctcctcctcctgctggtgaaattatctgccctggggcctcagctaccttggctggttttagggtgatgggggcggcagcccagaccctaagggggccttcttaagggagagagagtcctatgttgcggtgtgaggtgcagtcctctccattggccaccccactctgcagaggagcccccagccaccacctctaccctctgcctcttccttccactctggaaccctcccccaggagaagtcagcctcagcccatgagtgccaggtgctcgggagggctggtctgtcctcac

SEQ ID NO: 245624 - DNA, 140 bp, Homo Sapiens
cactgggggatttcactggaagttttaaaagcaggagtgtgaaaagatcgaatgttatccaaagatcattttggttgctttgtgagaataagaactgaagagtacaagaatagaagcagagattagttaaaagctatcat

SEQ ID NO: 245625 - DNA, 296 bp, Homo Sapiens
gcttgttgcttgtgccgtatgggcatgtggtagacgtagggagactcctcaccctggggaaagtggagggaagagtgggaaggactttggtggtttcggcactagctcagccacagtagaatagagtaccaggtagatttctaaggtttctgattctaggcccaggcacctggacagcctctctggacctgcgtggagcctgggggaactcattgcccttaggggaaggacacaagcctggctggcttcaccacttgctgattgtagagcctaagggtccttgagtgaacatacgg

SEQ ID NO: 245626 - DNA, 571 bp, Homo Sapiens
tggttactgccctttgcagggcatcttcatttggggaaagacatgaaatgctaatggccaaaccccccctcacccccaccaccttcaggccgaacaccgcagtggggggaagatgcatagaggtgggggaagaagtgtgcaaagaaagggcctggatgggtgggggtcccaaaaggacctaagcagcaggagacccccaggagtgggctttaggccagcaggtcccccttctcaaggtgagtccagaggccattctggagtgggccctgggtaccaggctctgggtactccttttggtaccaggctggcctcctgattcctgaggcgttggctcggcaccccatgggggactgccctcctccaggcctggcacaaagccagggggctaagagcagtctgcaggacagagggcaggaccacagcagggagggggctcctatgccagctccccctcatgccatatgaggccaggcctgtggctcgaagcccctgagctgggcatgtcctgagagtctgggaccatccaggggctgcatcgtcatcctcagccctgcgtagccttctgccctct

SEQ ID NO: 245627 - DNA, 296 bp, Homo Sapiens
cgcggagcgatgatcctaagcacattaacttcctatttcaccatagaaactttcaatattttttcagaaactcagggcttttgggtatgccctcccactgtctagtttttgtgctttcttttggagtcctctctggaggccacaaccatttttggagcatgcccagcagaggaagtggtggatctagttcctcctggaatggctttggtgatgctctttgctgtggatcaactacaatctgctccaacaccccttcctcctttctttttttctttgcctcacacacaatcttagct

SEQ ID NO: 245628 - DNA, 367 bp, Homo Sapiens
gttagtacaggatcacaaactacagcccatgggcaaatctggcccacagcctgttttgtaaataaagttttattggagcacagctacaccattcaattacatgcactctgtggctgccttcatgctacagtggcagaactgaagagctgagatagaaaccacatgggccacaaacctgaaaatatttactctctggcctcttgcagaaaaagtttgctgaccccagttccagagctctcagcatcatctgactctgttgaccactccacccttccggaaacacctcttcccgtggcttccacatcatgctctcctgctttcctcctcactctctggtttgctctgactcctctgatcatctgagccg

SEQ ID NO: 245629 - DNA, 315 bp, Homo Sapiens
  misc_feature (157)..(248): n is a, c, g, or t
ctaaacagagactttaaatcagctattttaaatatgttcaaaatactaaaagaaagcatgtctaaagaaataaaagaaagtagaagaacaatgtcttaccatatagaagataatgataaagagatagaaattatctgttaaaaaactagggaggctnnnnnnnnnnnnnnnnnnnnnnnnnnnnnnnnnnnnnnnnnnnnnnnnnnnnnnnnnnnnnnnnnnnnnnnnnnnnnnnnnnnnnnnnnnnncatggtggcacgcacctgtagtcccagctactcaggaggctgatgcaggaaaatcattttgacctgc

SEQ ID NO: 245630 - DNA, 193 bp, Homo Sapiens
ctagtggtccggcgcgagagagagagaaagagatctatttgtttgggagaaagtacaggaaaaaaacaagagtctttatctagtaatccagagaactcttggattttgtccaagagcgtcaaggtggtacctcttaagagtctgcaagaaacacagtcctgctgggcttgaggtcccccctaaagcagataca

SEQ ID NO: 245631 - DNA, 573 bp, Homo Sapiens
ttctcctcccttttggcctctaggcagctagggagaggaaagcctggaatgcagctgagactgaagattgggggatggctgggctctctcataagaatgggactgaattaggactaaaccttatcttctgggtggagggatcaagtgtaaaatagttgctggggacttggggtccttatctcctcatccgagcccgtctctgtgacaggtctttagggtttccaatgagacactggtgagagaaccagaagtgggggaaagtagtaagagtctggaaagccctgtcctctggactctcctttcctctcaccagtagtttcactggctgggtggggttaatgtcaggaaatgggctttcgtatccctgtgccatagatggtggcctcatccactctccatttgggtagtgctgaaggcagggacccggactgggttcagacaactggtctgacttaccagtgtctatctcttggcctactcttggttggatagaagcctctctaagggctcccttttttttacctcagcttcccagaagccccagtcacatccagggaaagcccacggagacgg

SEQ ID NO: 245632 - DNA, 324 bp, Homo Sapiens
acataccagcaaggagattatattttaggaaagggactttaaagtctactcaaatgggggattcaactaacttctcacctaaaaagcactcaaagaatgaggtatatttttccaggaagtctgatgtcatttatctttctccttttgtacctcccaagggaagacagaagctaaattaaacacattatccctgttcttatattcctataaaactgaattttttgaaatgtggtgcaggagaacccatggtcatatatatgccatgtttcatattactagttatgtattaatttcacatatattaggaaaagccacacaagcgat

SEQ ID NO: 245633 - DNA, 126 bp, Homo Sapiens
tacttaatgtttttcctcaacactagatgaccagggagggtgtttttaaactatagcattattacgttgctctttgtctgtcaagtagggcttactgtgtttctgtgacaaagtgcatggtcccca

SEQ ID NO: 245634 - DNA, 526 bp, Homo Sapiens
  misc_feature (22)..(22): n is a, c, g, or t
ttacccagtttgaatccagggnccttgaacgggtgcttttaagcccagctttaatgagcaccagtacactggcaactattcaagctcttgcttctggtggctctcttccaataacatcacttgatgcaactgggaacctggtatttgccaatgcgggaggagcccccaacatcgtgactgcccctctgttcctgaaccctcagaacctctctctgctcaccagcaaccctgttagcttggtctctgccgccgcagcatctgcagggaactctgcacctgtagccagccttcacgccacctccacctctgctgagtccatccagaactctctcttcacagtggcctctgccagcggggctgcgtccaccaccaccaccgcctccaaggcacagtgagctgggcagagctgggctgccagaagcctttttcactctgcagtgtgattggactgccagccaggttaataaactgaaaaatgtgattggcttcctctcgccgtgttgtgagggcaaaggagagaagggag

SEQ ID NO: 245635 - DNA, 783 bp, Homo Sapiens
cgctgtcataaggggtttttttcaggctgtacggccggaatcccgggatatcgtcgacccacgcgttccggtgggaattgaggggaagtagggattgggtctgtacagtgtatggtaactgctcactgtttcttttcaggctgaagatggaaacattgaatataaattgaagctggtgaatccatcccagtaccgctttgagcacctggtgacacaaatgaagtggcggctccaggagggacgtggtgaggccgtctaccagattggggtagaggacaatgggctgctggtggggctggctgaggaggaaatgcgagcttcgctcaagaccctgcaccggatggcagagaaggttggggcagacataaccgttcttcgagagcgagaagtggattatgatagcgacgtgccccggaagatcaccgaggtgctagtacgaaaggtccctgacaaccaacagttcctagacctccgtgtagccgtcctggggaatgtgggctctgggaagtcaactctgcttggagtcctgacccagggagagctggacaatgggcggggccgggctcggctcaaccttttccgccacctgcatgagattcagtctggccgaacctccagcatcagcttcgagatcctgggctttaacagcaagggagaggtggtgaattacagcgactcacggacagcagaagagatctgtgagagcagctccaagatgatcaccttcatcgacctggcaggccaccataagtacctacacaccaccatttggccttatcgagt

SEQ ID NO: 245636 - DNA, 107 bp, Homo Sapiens
  misc_feature (107)..(107): n is a, c, g, or t
tttacaaagccctttacttttctcccataataacttatagcctccttgaagccagtggttttacaagtcataaaaatcctggccatggcccagtgcagtagcttgtn

SEQ ID NO: 245637 - DNA, 240 bp, Homo Sapiens
ccccctatgctcatatttctctccagcaatgaggactccctttgaaacacctggcttattttatatgtggctctaaaatgtttgtattttacaatgttgataaggataaatattttcacaaatgtttactactcatttgattttttggaccatttgggaatcagtgatttttatttctatgtgtattcacaaaaggtacttataactggttgcagactgtggggagaatatgagcgaaga

SEQ ID NO: 245638 - DNA, 269 bp, Homo Sapiens
aacagacgctcactgaggtctgtgaaggccttgctgcacacctccccttcactggtctacaggatcccaggtcttcccatctcccagccaaacatatttcaaaaagccacagtccaacacacacagctctttggctctctcaggcaggtgtgcagcaaggccttcacagacctcagtgagcgtctcctctgggagcccacgtggctcaagccagcacaaagccagatctatttggtggctgctgttgttcactcttggcataccgtatg

SEQ ID NO: 245639 - DNA, 299 bp, Homo Sapiens
  misc_feature (171)..(180): n is a, c, g, or t
tacagatattttaatgccagtaatctaaagagatacggatcttcaacagttgtcagaggattgcgactgagaattctgaaaaatgcaatggaattaaaataacctgcattttcaatgtgtgaaactgcataagaagtttacattcattttttggtatggaacttgtgggtnnnnnnnnnngtcattttctgtttttacctaataaatcaacattagactccgtaaagcattattcctttgggaactacctagatctctaggagataaagtagaggagagaaagagggggaaaaacaggg

SEQ ID NO: 245640 - DNA, 513 bp, Homo Sapiens
  misc_feature (11)..(11): n is a, c, g, or t
ccagttcccgnctcagcatttaatcactgaagtgacaactgataccttttgggaagtagtccttcaaaaacaggacgttctcctgctctattacgctccgtggtgcggcttctgtccatccctcaatcacatcttcatccagctagctcggaacctgcccatggacacattcactgtggcaaggattgacgtgtctcagaatgaccttccttgggaatttatggtcgatcgtcttcctactgtctttgttttttccctgcaacagaaaggacctaagtgtgaaataccccgaagacgtccccatcacccttccaaacctgttgaggttcattttgcatcactcagaccctgcttccagcccccagaatgtggctaactctcctaccaaggagtgtcttcagagcgaggcagtcttacagcgggggcacatctcccacttggagagagagatccagaaactgagagcagaaataagcagcctccagcgagcacaagtgcagggggtaccgagct

SEQ ID NO: 245641 - DNA, 433 bp, Homo Sapiens
cagaatttgatttagtaaatctgggtaggagtccaaaaatctgtattttaaagcagtccaaatggttctgatgcagatgataaaacaatccttatcagaaacatgcttacataatttaagatttaatctcaaaagtcatagcttgaactcttcttgcactaagttaaaggttaaacaaagtatctgcaagaggattctgtcctgctaacagactggtttttaatctggacattgtttggctcaacagtcctttcatagacttcctctaaagcaacttggtaagccactaaaatctaactgttcctcttaactacagccctttgccccaagaaaacagaagaatgatataaatgaaaggcatttctgttgcccagtcattggctctataactgaaagggcttttgaaatccagtcacattgactatacgagtgg

SEQ ID NO: 245642 - DNA, 718 bp, Homo Sapiens
ggacagtgaggaggccgaggtggatctgcgggaccctggcagagactatgagttatacaagtacacctgccaggagctacagaggctgatggctgagatccaagacctgaagagcaggggtggcaaggatgtggcaatagaaatagaagaacggaggatccagagctgtgtgcatttcatgactctaaagaagcttaaccgattagcccacatcaggttgaagaaaggaagagatcagacccacgaggctaagcagaaagtagatgcctatcatctgcagctccagaacctgttgtatgaggtgatgcacctacagaaggagatcaccaaatgtttggagtttaagtcaaagcatgaagaaattgatctggtcagtttagaggagttttataaggaggctccaccagatatcagcaaggccgaagtcaccatgggagaccctcaccagcaaacactggcacgtctggactgggagctggagcagcggaaaaggctggcagagaagtaccgagagtgcctatctaacaaggagaagattctcaaggagattgaggtgaagaaggagtacctgagcagcctccagccccgcctcaacagcatcatgcagggcttcccttccggtgcaggagtacctgtttatgccattcgaccaggctcacaagcagtatgagactaaccagcaattgcaagttcgggactaaccagccatgcaagttcg

SEQ ID NO: 245643 - DNA, 292 bp, Homo Sapiens
ccgacttgggactggagtgatgcagcaataagctggggaatgccacggactgcccactgccgccacaagctaaaaagagccaaggaaggattcttccccagagccttcaaagggaccacagccctgccaacacctccatcccagatttccagcctccagaactgtaagggaatcaagttctgctgtttcaatccaccaggtttgtggtaattcgttagagcatccctaggaaaccaacacagcatcactgccataagcccccgcctgctcaggcccactcattccgggctgc

SEQ ID NO: 245644 - DNA, 286 bp, Homo Sapiens
gggcgtatcagaggattacgcagcgccccacagtgcagcgctcctgtgtttgcatctggtggacaaggtgccaggcttcgccgtggcccagtgcataaaccagcacagctccccgtccctgttctcacagtctgccaccctccgccagcgggagccccagcggcagcgggagcaccagccactgcgactctggaggcaccagctcgtcctccaccccctccacaggccagagtccagcaggtattgggcacgtgactcagtgatatggggacatttggagaacccc

SEQ ID NO: 245645 - DNA, 526 bp, Homo Sapiens
atgttgattctgtttcttatctcttgctctgtgtaattttatagtggctttttttccagcctgggcaacagaacaagactttgtctcttactaaagaaaagaaaatttgtgattatatataaacaaagattgagtggcagcagagcttttgtgttaggcgtctgtgtagtctgtgcccagcctaggttcttctcatacctgaatggccttctttctcattagggctaacttacaggccatactttattgaaggaggggaatattgctgctgccgctgctctgggttggccattaattcaagttttcagtgtccctgtttcagtccagctaagtggataagggcatttatttttagttgaaagggacattttatcaactttaaagttatatgcattaaatatttaaatatgttgacttctttatccattcaggtgttgaatgtttgttttttaaaggagacaatgattcataatttgtgacactgtaaatcctgaggtttatagaaaggattcatgactttgtaatg

SEQ ID NO: 245646 - DNA, 196 bp, Homo Sapiens
atcactcccaagggtccacttaaaggcttccgtgattaaaaggcacaggattcaaaggtccatcccctcttcaaggtggaaaacagaagtgtgctaaggctcttcttttccttgtgaactgtccccatagcccatagtggcagagagggacagaggtcactcatctcctgatctagggatcagagacatgtagacc

SEQ ID NO: 245647 - DNA, 229 bp, Homo Sapiens
ccaggtcctggatccagcagctccaggggctttcgtggtggtgttcagagccacacggtgatgcaggtggtgcaggcccccggatctgagtctagaggggctctttgctgtttcatgaggtagtatcttcaaggagcttttggatcttgtttcctggctgagctggttctctgtatctcatggggattgtctgatcacaaaatatccatttattaaattccatccataa

SEQ ID NO: 245648 - DNA, 603 bp, Homo Sapiens
atttccttgaacatattcaactagaatggcaaggcattttcctacataaaacattagaatgttcccattactccaaaggaatccaataaataattttacagtgaaagagcctggatcaaaactggaagtgacaccggcccccgatgaacacaagtcacaggtccctgtgcaggtcccagggctgagtcatccaagaactccaccaccaccgtgagcccggcctccggtttcatctttcccgaatgggactggctggaggggccaagctgctttacagaagagttccatctggtaagcccgggtggtgagcgaagccaaagatgacaacacgagaaggggtcaaagccaaggtttcctcacgctgcctttgtcttcttcctgcagcctggcccgatggctgaagctgggtcccaggaggcgagttcttcagcggggcctcctcacccaggctggagcaagtccgctgcacccgtcaagcggggaagagctcgggcgggctttctccatagcaatactttgctatggggtcccggtaggtgttctcatgctgcacgctctgcttgaaggtgctgctgaggaagtagacgagcgacagcccgaaga

SEQ ID NO: 245649 - DNA, 296 bp, Homo Sapiens
cgcctgcgactagccggctctgacttggaaacacctgcgggaaaaagtcagtcatgcactggtatcatacaatgagcatgacctctactcacccaccctgtactatccacccgcttgaacttctaggctagattctagtgtatcaaaatgaacaaaacagggttctgcataaggtctcagttggggtgggggatcaggcaaataagcaaatgatgccaatagcatgtgtggaaagggctgtgagagaagcaagcatgggacactctggaaccacaaacacagtggtcataacccac

SEQ ID NO: 245650 - DNA, 242 bp, Homo Sapiens
cctctcccctttatctttcacggtaatcacctctcattactcgtacttctaactccatcttgaaagctgcttcctggaagatccaaacggacacaaggagggactgaaggattagaatgagggaagtaacccatgcactgcttatttgagatggggaaccgaaggactttggcagttcctacacagagacagatggcagagatgacaaggtttctcagagaatgcgtgagtaactggaacgg

SEQ ID NO: 245651 - DNA, 351 bp, Homo Sapiens
cttaaaagtaaatccagcgattcggtacatagcttaggccctattaaatgacccagtgctttaagaactatcttttgaaaggaacgcttcacacaagcaccctcaaaaataattagacacctccccatttctctgttaaatggtgaaagacacccaagactagtcctacctactgtcaccctctcctggcctcttggcagccaaaaggccacatggcccaggctctccagcatcactgtgtagccgacttggacaaaaatggacttctccccattgccacttgcagctctcttcaaagaatcagcagatctgatagtgtgcccctcttcatccccgagcacccccaataca

SEQ ID NO: 245652 - DNA, 406 bp, Homo Sapiens
gacgtatcagtagtaagtcaaatgaggaagtgcagagggtttttttacatatatatagcaaccttgtcaagtggtcctcacaagagtcataaatactttgtaattagcacagtatattcagcagtgtataactctacaaatagtaccttatattagtgtagtattatatcaatatcttatgtataattcttatattaataccttatgcataattggattcaaacattgaaggtctattttagtgttcttcaaaatgtgcttccctgacctactgaaatagaaacttggtgatgaagttcaagaatttgtattctaatcatctcaaacaattcctaaagacactgattttaaaatatctagtctaggccccattgtgtaatagtttatgctgtgggtcccgagctcg

SEQ ID NO: 245653 - DNA, 1342 bp, Homo Sapiens
  misc_feature (1033)..(1056): n is a, c, g, or t
  misc_feature (1063)..(1063): n is a, c, g, or t
  misc_feature (1075)..(1076): n is a, c, g, or t
  misc_feature (1217)..(1225): n is a, c, g, or t
  misc_feature (1264)..(1284): n is a, c, g, or t
ggcacttgaagaacaaacatggcttgaaggtggtggaaattgatggagaccccaagtgggagacagcaacagaagctcctgaggagccctccacccagtatctccacataacagaggccgaagaagacgttcaagggacacaggcagcggtggccgcgctccaggacctgagatacacctctgagagtggcgaccgactggaccccacggccgtgaacatcctgcagcagatcattgagctgggcgccgagacccatgacgccactgcccttgcctcggtggttgccatggcaccagggacggtgactgtggttaagcaggtcaccgaggaggagcccagctccaaccacacggtcatgatccaggagacggtccagcaagcgtccgtggagcttgccgagcagcaccacctggtggtgtcctccgacgacgtggagggcattgagacggtgactgtctacacgcagggcggggaggcctcggagttcatcgtctacgtgcaggaggccatgcagcctgtggaggagcaggctgtggagcagccggcccaggaactctagaggacatgtggcatcggatggccacagggcggggctgccaggctctgcaggcacccagggtggggaggccacccttcctgccctacccgcagaatggtgctctcctttgccctccctgcccagcagcctgataggactctcctagtccaacttggggtgggcaaggcagtcagcatcaccagcaacaccacaggaccctcaccccagcatagacacacaccccctgacccttaccatctgcttcctgaaagacttcagtgtcagctcccctacacacaccccacaccttcaccccttgcttcaagattcaaacagagactcccagtccccctcagcatcttccctgaatcacagccccagctccttgacccccatctaggtgccaaatgttcatctgcaaccgctatgcagtctggtgagagggagacagccatcacatagaaagtgaccgtacgggtttttaatcactgctnnnnnnnnnnnnnnnnnnnnnnnnattgtcngggctttgtcgnncaagtccccacttcccctaatatcacgccgcccttgctaatcaggtgaggaaacatccccccataaacgggccttccgccctactcatgatggaacttatttccactctttacaatggactggcctattctccattgggtnnnnnnnnngctttcctatgacgggcgaacgtgccctggactctaaannnnnnnnnnnnnnnnnnnnntatgaccagaccttttgcatctacccgcctcagctccttattatctccccctcctcga

SEQ ID NO: 245654 - DNA, 276 bp, Homo Sapiens
  misc_feature (118)..(118): n is a, c, g, or t
cttcgcacctccttaggctggaacagcagagaatggaggcacaagggggctgattagagccaagaagagggagtgaaggagagcagaggtaggagggcagccctgtttacagtcaccntggctggtggggtggcaggtgctctctctgaattaaccctttgagagctggccaggactctggactgattaccccagcctgggtggcatccaggggctctaggaggtaccttttgctcctcaccctggatctcttttccttccaccatgagctctgct

SEQ ID NO: 245655 - DNA, 637 bp, Homo Sapiens
tctgtctccaaaaaagatttttttgttgttgaaatatccaaatttctactttcctccagtggcatgaattaagaacagtgtgtggtatatagtcaatacttaagtaattttcatccaaaaatgttactgttttgcttgaaattcctattttatatgtattctccccttatttcttgcccttcctgccttgtgacctgagaagtttagaagtgtcctgctaaagctattggattttaatagatgaattataagaactttcaaaaacatttccatgttccttattgttttctaagaaagtttgatgagtataggtatacacaatgggaactctaaggaagtgttgaggcctacatatatttagctgtctttgctattaatgatatgtttgtattgtttgctcctgagaacagaaaatatgtctgttccattaatgttcagtttttttatgcatttaataaatgcatagcattgtgctaagtattctactcaaaaatttaagataggatccctggccgacaaaaatcacttggggattaccaaataaaacaatgtctgatgtgtaattgtgattgcaagtagtgttagtagtgttgagcatcatcagacatgatgccttggctcaggattccatttggtg

SEQ ID NO: 245656 - DNA, 838 bp, Homo Sapiens
ttcctaaaccctaccaggttccccctcaaaggaccatggaggagtctccatacggttgttataagtggtccacaacctaccaacgttttcgtggggcatcacaagatccctatagggtagtattaacccatttttcaagaaggaaactatgtctggaaattgtagaatgcacattaaaaactctttctgacgagcgtttctaccggatccgatgttacccaaagtacaaaattaaagaggggaagtcaatcacaagatttcattgaatcttcagtatcaggcaactggcttctattttatggccgcaaataactatatattgggccccttttctcacctgtaaaataggaacgaaaagaccttctccacgaataagatgaaataagaacaaaggctgagggtgaacctaccacgtcgtagggcctcaaataaattccttctccttcttgcccttgacagagatagcacgagatatcactaccattcccacttcacacgtggaggaaatccaacgcgagaacgctcggatttccccttctttacttgcaacaactccgtaacccgcaaatcggctacggacaactgcgatgtccactatgttagttctcgtagcgtggattctctctcctcaagatgccatctggggggctagaggccactaataattgccctcacgatcgaagaaactcgatcctaatcctcgacggcacttcaggaacaaagctgctctcccatcgtccctaacctcactaccgtaaaggtcgcagcagagcccctgctccaaccgctagcgccattttggccgctacgtgtgacgccacccgtggggtaggaggtg

SEQ ID NO: 245657 - DNA, 385 bp, Homo Sapiens
cgagctcggttcccacctcctaccccacgaagataagattgcaaagaacaaataacttcactgtttgcttcaggaacaccaatgtatttgaataataaactgcttatttagacaaacagtctcattttcagaacaataagttactcaggaaaaaatttcacttaccaactgtttactaatcaacacctacatcaggaccgttgcctcactttctcccaatcctaaaatcttctatgataaatttatacccaaccacaatcagacctcgtattgaaagacctaagatgtaaaccatttgagttcatacctagaaactctataaatacccaccccaacctctcaccctgagatccttctaagatacggggatactctagagcggtcc

SEQ ID NO: 245658 - DNA, 541 bp, Homo Sapiens
tttataagcttctacttatttttccagtctcatttcttgctacagcccctttggtcccctgcaatcactcaactctccaaatgtcccagctccgccaagtttttgcatattctcctcccttctatggggagcatctcacctcatcccccagctcataacctccaactagacttgaagacccaactgggtgatcatttgctctgccagggatctcctgactctggtaggcaaagagggctggtttatcccctgtgtttccatggcctttgtccatggttttattacagtacataccaggcagtataatgtacatgctgtcttttcatgggattaagagctgtttgaagggaaaggactggaaaggaccacagggttcttcttggtatccctcctaccacccgcagcctgacctgtgatgggtgcttagtgaatgcatgctgaatgatggtataaaaatagaacagtgtttgtggcagataaaacacttcactgagtatattatgcttatataaactctgattccaatcgtggggtaggaggt

SEQ ID NO: 245659 - DNA, 448 bp, Homo Sapiens
  misc_feature (251)..(263): n is a, c, g, or t
gctctagagtatctccctcctaccccacggggaaatgtaaacatgataactcatatgaaaagtactaatgttaagaactgttcagcatatttctccctaaaattgaacttgtctaatacattgtgatggtcattttagggacagtgaagatttaagagagagcctttggcctcaagtactttatagaattataaggaaggttagaacagtactgtaaaaactagacaatgaaaactgctttatatgctggnnnnnnnnnnnnncttaaaagttttatccatggggatgcaaagaagagaaggtttaattccaataaagaaagtctggaagagtttaaaggagccttttgcccaagatgttgaaagatgagcaagaatttgttggctggtagagatggagtgagagaaagggaattctcagtgtatggttagagcgtggggtaggaggg

SEQ ID NO: 245660 - DNA, 577 bp, Homo Sapiens
  misc_feature (307)..(307): n is a, c, g, or t
cgagctcggtacccacctcctaccccccgcatcaaatgttccccaaatcctatagccaaatgtgaactctcccatttcttaattcctcagacttttcatagtacttattacagcagcatagcataatggccaaagctctcaggtcatctcggacatagatactagctccatcacttatagctcggtgaccttgggcagatcacataggctctttatggcttattttccttatctgcaaatttgttataaaaatattatttcaaagagtttttatgaaaataaaaaataatttctaaaaaaggtaaancaatagagatagagagggggctaggaccagactaaggccgggagcagttattacctacaaatgggcaagagggaaccttctggaacaaggaaatattctaaaactggattttaaaaagaaatatctaagtaccatgcaaatttaaaataaaaactgggttgtagccatgctttcatagctatataacgttactatttatcaaactctacagttaaaatgagtaaattttatgatactcaaattatacctcaatcgtggggtagcaggtgg

SEQ ID NO: 245661 - DNA, 608 bp, Homo Sapiens
  misc_feature (384)..(392): n is a, c, g, or t
aagcaaaagctcctactgaaggcagcttaaaaaataaccaaccagaaataaatatatattactattggtttatgaagattacgtttgtacaagttttcttggcatacacagcaattttactatttcttttgagattaaaaccatcatatttaaactttagatctgaagtaaaatatgccgttacaatacccctatttcaatattattctgccttaagaaaaatacttcaatactaattttttctaataaacagagtagaaaacagagcaaagaaatatgtccttctcacatgaatttggattataaactaagccatctcatcatgattcaactgtgaccaattaattatacctgatagaatgcctctgtcatgacttaaggagnnnnnnnnntcagtttctaacaaaataaacacgattagaaactggaatttcagacttgtaaaaattatactggccaagggactgcatctctaaagacacatacacaaaaagctgatatgccaggcgcagtagctcatgccagtaaatctcagcattttgggaggcaaagtgggaggcatgcttgagcccaggaggtagagctttttaagctcctgtagagcgcct

SEQ ID NO: 245662 - DNA, 971 bp, Homo Sapiens
gctcatggcgatgctggtcctagtacccggacgagttgagtgcggcctctgggtggccaactttggcgcttcttgcctcgcggactcgagttttggggcccagccgaggggactgcgagagtcttgctgaggcagttctgcgcgcggcaagcggaggcgtggcgtgcctcggggcgccctggctattgcctgggaacccggcccctcagcactgcgaggccgccacccccgtggtcgcagaagggccccggagactccacgcgcccctcgaagcccgggcctgtttcctggaagtctttagcaatcacatttgctattggaggagctttactggctggaatgaagcacgtcaagaaagaaaaggcagagaagttagagaaggaacggcagcgacacatcggcaagcctttacttgggggaccgttttccctcacaactcatactggggagcgtaaaactgacaaggactacttgggtcagtggttattgatttattctggcttcactcattgccctgatgtctgtccagaagaactagaaaagatgattcaagtcgtggatgaaatagatagcattacaactctgccagatctaactccacttttcatcagcattgagcccatagagggacacaaaagaagccatcgcaaattatgtgaaagaattttctcccaaactggttggcttgactggcacgagagaagaggtcgatcaagtggccagagcatacagagtgtattacagccctggccccaaggacgaagatgaagactacatagtggatcacacaataataatgtacttgattggaccagatggtgagtttctagattattttggccagaacaagaggaagggagaaatagctgcttcaattgccacacacatgaggccatacagaaaaaagagctagccaaagcagtgttgctggatgcagtattctcttgcttagaggaaggaaactgtctcgc

SEQ ID NO: 245663 - DNA, 483 bp, Homo Sapiens
catcgcatctacaggcacttactcagcagctgcaaggaacctatcactttaccaggtggggagggtggcacaaaagaaaggtccccaattgcttatcctcaagaaacttgcactgttttgattccatggtacatgttgaagcaaactgaggtcagtaaataggtggaccatttgtcattctgaatacatttccatgaaattcggcagctcattagcaaaatatttcttttatttggtttgggcatattgatttggatatcctcttcaaacaaaatggtagctgatgtctgctacatagggtccagcttttgtagaataaatatcagcagagctgtcgttattagatttggtaatgacagagatgtgggcagttcagcacgtgagcagtggtgacttaaagtgagagcggcttgggtgaagggtactagctgattgttgcttggattttatggccataatgcatggtgtttccataccttatac

SEQ ID NO: 245664 - DNA, 789 bp, Homo Sapiens
aatcgtaaaatctactgaggcaaatgtactacctccatcatctataggatttacatttagtgtgcctgtgcaaaaacagcagaactttctggttctagtagtactttagaaccaattataagtagttcagctcatcatgtcactacagtgaacagtacaaattgtaagaagacaccacctgaagattgtgagggtccttttagacctgcagaaatcctgaaagaaggaagtgttctagatattctgaaaagccctggtttcgcatcgccgaagatagattctgttgctgctcagcccaccgcaacaagcccagtagtttatacaagaccagcaataagtagcttttcttctagtggaattgggtttggggagagtttaaaagctgggtcatcatggcagtgtgatacatgtctactccagaacaaagttacagacaacaaatgcatagcctgtcaagcagcaaaattgtcacccagagatactgctaaacagactggaattgaaacaccaaataaaagtggcaaaacaactctttctgcatcagggacaggctttggagacaaatttaaaccagtgataggcacttgggattgtgatacctgtttagtgcaaaataaacctgaagcaataaaatgtgtagcctgtgaaacaccgaaacctggaacttgtgtgaagcgagcccttacattgacagtggtttcggaaagtgctgagactatgactgcttcatcttccagctgcactgtaaccactggtaccttagatcagaagatgagacgggatcctcta

SEQ ID NO: 245665 - DNA, 212 bp, Homo Sapiens
  misc_feature (161)..(161): n is a, c, g, or t
ctagtccacacatactgacaacgtgactttctgctttcacctttgcttgtaaattctcccttctcctcattctcctttaatgttagacccattctccagtcttttactttttctccagtcttttactcttactcgttttcttatccattcttatttacccncatcacatcattgcttaaccgctgctctgttcctattttcgcttcaccctc

SEQ ID NO: 245666 - DNA, 1227 bp, Homo Sapiens
  misc_feature (15)..(15): n is a, c, g, or t
  misc_feature (29)..(29): n is a, c, g, or t
  misc_feature (231)..(231): n is a, c, g, or t
  misc_feature (440)..(448): n is a, c, g, or t
gccacttttgaaaanttggaaaataaaantgccctcccttaaaacccctcgccgtaaaaacggtcctcaggtgcccgtggtcctatgcccgtggtccctgtagctgtccgcctcagctccccaccgtgtttgtctggtgtcagcacgaggcagagctgtgtgctccatagcgtgtagctttagactcggagatgagtgctttgacccagcgaggagctcagctaagtgtantcacgctgtggttcagcagcctttagatcatacggcattgtggttcatgtttgaaattacagattttaaatgccatgttcattaagaaatccagggtattcagattctggggtttttcatattgtattattattattcttaggaatagttcaatgtaacaagaagaaaacttgacctttgctctggttaaaacagtaataggcacttgnnnnnnnnngataaattattgaatgagtagtattacctacaaattccagaattttctgggttttaggacgttgtgaagcatgactgattaacagaattttatacaactgtaccaataaaattccaaattggaattgttttgttactctggttgttgtgccaaattgtggtacacttagaaaattctacagtcgtcgatttttagggtgttctctttcaacacctttttgttagtaatcattgccagtagtgccttcatcagttaagggaggtgtcccagcacagatcattctcaaaagcgagcagggaagagctagtgggcatgctgaaggccagcgtggacagcaggtgaggcaggtgctcctcacacccagacctgggcatcttcattgagggaaaggaaacagtcattgtgcaaaattctgttagtcagtgattctttacttgcaaattcaggggcttagaaaatgaaagccaacacaaaaccttgagtgtgctttgggaaccaaatggaccttctgggacaagctgaacaagctgtatgaacgccacgtttgtgaagagctgagggtatcaggagggccgacgctgtgttggcatgcgcagtaggggatgagggttagccatagtattctttgcaaatgtgaaagcgagacattatatcttctcttgcttggtgtaactaatcactgttaatttcaggaaacagaactcattaaaactccttagcaaaccaggtctacatcctgttttgtttgctgagtgaggtatggttgggagctagtcggg

SEQ ID NO: 245667 - DNA, 616 bp, Homo Sapiens
cagcgagtaaacgaaggaggttaggtctgttttcgatgtgacacagctgtccctaactccagctattagcttttgatcttagctacgattgaggaaggccatgttccgatcctgggctaattacagattccattcgctacatcaaagcccacatacttaaagtctataaatggattccactacttacaatatgccaattaggatctgccagtgagaatttaaaaatgttgtattttggctgtgatgaaactagttaagttgaaaataatgactgtttaaacttaatttatatgctgaaaatgacttactgataaacgaaatgttttttaacttaacggaggctccctcaactttcttgtgggtatgatctgttcccctaaagactggcttgctctcagagctgcctggattacttagtccacaaaggaccaatgtagttcagctgaagtgagactggaatatgtaaaatcatctttcattaaatttttatcttacaagtatttattaagccctttgttgacatctggcacgtgaaaatacaatgcaaaagccttgaaatgcacccatatacagagcagactccttactttcgtatgttggactagtcggggtcctc

SEQ ID NO: 245668 - DNA, 656 bp, Homo Sapiens
  misc_feature (60)..(149): n is a, c, g, or t
tcagattaccccgactagtccaaccctacaggttaatttttaatagtttttctgtagagnnnnnnnnnnnnnnnnnnnnnnnnnnnnnnnnnnnnnnnnnnnnnnnnnnnnnnnnnnnnnnnnnnnnnnnnnnnnnnnnnnnnnnnnnnctgagccaccatgcccagccgtgactcactcttaaaggagctcaagtcttttgtgttggaactccaggaggttgacgaccacactcatctattcagtcagcatttgctaggtacctagcacacgcccagctctggggaggtatggggatataaaaatgaaggtgatttgattcttcccccgtggaggttaggacctggaaaggatggtgtgtgaagtgaatgctaggtttgctggtggctgaaaggaaggaacgttgtcatctttgtcatatgttagggattgccagacccaccagttgactatatccaaataaaggaacacagaatttggagtgatcacagggcagtgagatttgtctgggaagatatcttaggactcgtgaattttttgcagatcttaataattatagagaaaatgagtaggtggttaggaagaccaggtaactataacttacagaggtgagagaatgagaattgtatgcgtgggactagtcggggtacggggct

SEQ ID NO: 245669 - DNA, 571 bp, Homo Sapiens
tagtcccaaccatacatatgaccacagtataacttttacataaaaataataaaccaacttcacaggctgagaacattaaggatatattaatatacgtctctcatcaatagcgatcattcatcacattagtccacatgtattcaaacacacagatattcaccatgaccacatgagctgcccacaagctcttattctcccagtccacctcagtcctatgcatttacaggacaagcaaccaaaggtcatggaggatccactcaatgtttgagaaacagtgtaataagatggaaaaagaacatatctaagagacaaacaaatctgctttcaaaccctggctatgccacttcctaagtaggtatcctcttgaagcctcagcatcccaagttgtccacctggaataaaaccaacctcacaggactgttttacagaaactcttcactgcagaatgctggggccgtcattctcctgagtgaagcaacctcaaataccccattccaccagactgggcttatttcctcacaaagattgattccttgctaagtatggttggactagtcggggatcctctaag

SEQ ID NO: 245670 - DNA, 685 bp, Homo Sapiens
acttagaggatcccgactagtccaaccatacggaggattaatagctttttgataggcaggatgttgctgtgctcctccttccatctggaaagacatgactggaagattcaaaggtatatggcatattttggtgatttagagtttggaatgtaggctaccaaagctggtgggaaaagagtctgggaaaaattatataacagatataaagctttcgatgacttattaaggaggtgaagcttttttgtcaacattgaggagcttgaacatttagaacttggtactggatgtgtggctgagacatgggggcgctgaaagattgtgatgtggccttctagcttggagaataaagcactaagtggacagcagcgccactgacacaggtgcggaatatagaagatcaggttttggggtggaactctggtgggcagagatggttcaagtttcggacaatattgcgagtgacttgctattttatttttgtgataccgagtatactggaagtctaggttagagttggagttgggctttgtttgtgtagaatcctgtactctttcctctggttttttcttgtattgttcttgttgtcactggttgttattttcatcctgctgctgaactctattacttgattgtgttcacgatacttagtcatgtggtcgggacaagatgttgtagctctcagttt

SEQ ID NO: 245671 - DNA, 479 bp, Homo Sapiens
  misc_feature (383)..(383): n is a, c, g, or t
tccggtaacgccgactaggtcccaaacatacaggaatcatgcaaatacaatgtacttgcagggcaacatacagtatgaacccagcttgatttgccttcgtcagtcctttcaatctggacatatgaatagttgggggactctgggaatatacaatctctcaagagcaagtgaggagcccagctccacacccacaccacccttccattctgaggcagcatctggagcccctgtcatccgagggcaaagcacagagattgttcccacatactccacaccctctagctggctccgttccaagaggatctggcacacagtcaggacttaattttacatctgctggcctgaagttaattggggaagacaatgaccgagatatttattcnaaaaaaaagcctttctatttcattcctgaaccacagggaaggggagaagcaatggaaggatggttagactaggggtatgttgactagtcgtatcct

SEQ ID NO: 245672 - DNA, 753 bp, Homo Sapiens
acgacacttgcagatcgatgaccggtcccgctatccaccatctcatctgtgggaacagatcaattcgccatactcaggatatgaaagagaacaggaatctttttcttcagttgcacttgaatggactcaagcaaagagtgtggatatgtatcttgttactgtttatagttagtaatgtggagattagtatatatgggatttcatttgccttgtttgaactaattggatgcattatatagaaatcacctgagcctgtgctagatcaacaaagaaaatggaaatgtatacctcaggattgaaatccgagaaaattagacaattcaatgctatttaataacgcattaagaagaaatactattgccaatcagggaaagtgagaatctagtgaacgtgagaggaagtaaaatttaggcaattattacacttgttgaaacataacttatgacggtgtaaaagcagaagatagatcacagtatatgtcacagacattttacacagtttccaactgaatttggggttaactatgtaagtgttctaggaatgtatggccattatatcaataagaaactgtccttttaaatttgtgatcctacacatttatatatgcagaagagggcctttttaaatttattgaggatgaattgcatgctggaagtacctctttgcattacagttacttgctcaattgaagatactgtataaagtctaatttttgtatggttggactagtcggggactcctctagagtgctcc

SEQ ID NO: 245673 - DNA, 923 bp, Homo Sapiens
gggggggcctggcgtgtattcgaaaggaaggcgccggctgcgggaagatggcggctcagccgctgcggcatcgctcacgttgtgcaacgccgccccggggggacttttgtggtggcactgagagggcgattgaccaagcttcttttacgacctccatggagtgggatacgcaggtggtgaaggggtcctcgccgctcggccccgcagggctgggggctgaggagccagccgccggcccgcagctgccgtcttggctgcagcctgagaggtgcgctgtgttccagtgcgcacagtgtcacgcagtgctcgccgactcggtgcacctcgcctgggacctgtcgcggtccctcggggccgtggtcttctccagagttacaaataacgtcgtttggaagcgccttcctagttggcattgaaggttcactcaaaggcagtacttacaaccttttattctgtggttcttgtgggattcccgttggtttccatctgtattctacccatgctgccctggctgccttgagaggtcacttctgcctttccagtgacaaaatggtgtgctatctcttaaaaacaaaagccatagtaaatgcatcagagatggatattcaaaatgttcctctatcagaaaagattgcagagctgaaagcagaagatagtgctaacgcacaatcgcttaaaatcactaatgaagattctgagtgaagtgactcctgaccagtccaagccagaaaactgatcctgtaccaaagcttgagtgtcaggttcaggctttattgctgtcttcaacaacaggtgctgcttagtccatttcttgaaaaagattgggttcaagaatggaggggaaatgcagtttctatttaccttaaggctgattttccaaattatttgtgaagctgttttaagaagatgcgagactaaggatt

SEQ ID NO: 245674 - DNA, 839 bp, Homo Sapiens
aaatatatgctttctttcagctaatgtaattgcatatctagaaaaaaacaaatcaactggaaacaatttagagcaagatgatttagtcaggtgactcgttattgtgttaataaataaaagctttcctagacaaataaccacttaaaatataagaaaatatttctgtttacaacagtcatcaaaaatgatcaaatatctaaaaataagtgaaatgtgatacacatatgggaagaaaactttaaaactctcctgagagatattttttaaaaaccactaaaataactggaaagatatattttgttcttgagaaaaactaaattctgtaatttttccaaattataagtaagtatttcatttagaaatcccaactaaaatgccaacaggcttagtctggggaacttgaccaacacaaacatgggagacataaacagtctgagaatgagtaagaagaggaagactaggtgaaacaataactcagtatagagtgaattgtctataacttagagtactagagaaggaagcaccaattcaatggaagagaacagtctcaggagaccgaactacatctgagaatttagtatacaataaaggttggatttcagatcaatagggataatactggcatttcccaataaatgatgttgagataatcagcagctgtttggaaagaaagaaaactgaggctcttcctcactgtttctaccaaaatcaatgtatatgtactttaccagtatatatacagacttctttctagtatgaaatataaactgttaatagtggttacttttaaggagagagactaaggtatggtgggactagtcggggatcctctaggcgcc

SEQ ID NO: 245675 - DNA, 157 bp, Homo Sapiens
acgaataggccagttctaatactgacctttaaatagggcaaagtaaagttcatttatgaatgtaaaagaaatgcctaccttgaagcaccattaccatatacagaaaggtaagaacacattcataactcagaagtgtaatcactggggtcctctagag

SEQ ID NO: 245676 - DNA, 876 bp, Homo Sapiens
  misc_feature (530)..(530): n is a, c, g, or t
tgagccactgtgcccggcccaaagctcaaaatcttaagttgtgcacgccaacatcaaatcacagatttctgtgaggacgtacacatgcattattcatgtaccctgagcatcttcagactatagctgcccccaccccaacacacatgttgatgaattctagagtgatgctggcctacttcaacactctgctactttaatttctatcataggggttgaggcacagcatagtcttttagcctttgtccctgcttttaaagaaatcaccattgttggtatattgtatgttggcataaggagaagagatgacttggggagatataacataggtaacttgcaaagattcattcctcacagagagtgaaagagggagagggggcaggtagagcatccaacagaataaatgtaagattttaagtgtgtcactttctccactcatctttgaatagaaagatgactgtagtatctcttcaatttcatttgcaaagtacttattcaaattcccctgaagtcactttttaatagcaagaccnatttagatccttttggattatcgatgaaattctagatctagtagtatagcaaacgtgatttccatatgtcaaatagagcaaaagcataaggggtcaaatttgctatcctgtacttgcatacctcatcatatcatatactatccctgacagatattatctccttatagctattattctcagtataaactactttaaaagactccttcattagacttttctgcagttacctacttgcctattagtcagtgaaatgctgctgaggtatattttaggatcactattcttctggctgtctcgagattgtacctgagaatgcataagatacattttcacattcactgctgta

SEQ ID NO: 245677 - DNA, 1244 bp, Homo Sapiens
  misc_feature (273)..(390): n is a, c, g, or t
  misc_feature (392)..(414): n is a, c, g, or t
cctcccaaagcattcctgttaccaaagaggcttcaaacctgaccctcacttctcagtggacccgagtttcccttccatgccattattttcagtggggaagttttagaggtgagctgttggccacaatatcaattttaagtgttcatagcagttatgtctcctgcattcttggctcctggatttaccaccaagagtccccaaaatattaatgctcttccctttttctaccctcaaacttatagttgtatcttattttttaaaatgaattttcannnnnnnnnnnnnnnnnnnnnnnnnnnnnnnnnnnnnnnnnnnnnnnnnnnnnnnnnnnnnnnnnnnnnnnnnnnnnnnnnnnnnnnnnnnnnnnnnnnnnnnnnnnnnnnnnnnnnncnnnnnnnnnnnnnnnnnnnnnnnggcatgttcctgaaagactgtcaccttggaaagtgacaggccctggcattagcatgttgacacacccttttcttcttactcagcaaaatacttcgttttggtttcttcttgtgttgctattgagaaatttgtctgatcatatccttctgcctttgtcccccaagaaatgccctactttatccttttctttttgtagttgaggagggctagagaatcacaattaaaagtaaggaaatagcagggttttgagaatccttgtcccagccccaaagctgaggaaataagaataaatgcttaatatagccttaattctagagcgcaccagccatgaggctgcttttcttgttgtttttgatttttaaaacatacagctgtctggccaggagcatctaccatttctagattattcagagtaatgaggggaatggatggattgctccagtccacagatgagccacataatatgcaaatcatatacccattcatagcatttgttaacattgcttccctgctcagctgctgattgaattctgtgtgcttatataaattatgtcaaaaattatactgcataattgaggtgacagctgttgctgcagtgacatgacagactggaacaatgaagctttttggtttaagtcagccaggaaaatccttttgaatggtaatgtgattgggcaagagctcataaaccatacctcaagtgggtgggagttttatctctatattccttctctctctgaaggaattaaaggcctagatcaagtgctggataattgacaagttgcttgtacttaatctgatcgtatctcaacaggaggaaaggataggcc

SEQ ID NO: 245678 - DNA, 540 bp, Homo Sapiens
  misc_feature (308)..(465): n is a, c, g, or t
gggggcgactctcagaggattacttataatgaacagcaaatgcaaacacagattagagtttgataaaatttgtccaaattgggcagagtctaagtgacatgccagtgtgcttgtgcatctcaccatctgagggaccccatctgataatggtgttgtgaggaacacagactagactctctagctgcaggcagtggatgcctgggagggaagatctgtggctgcagacagaaatctagtggctctaacctgtcagtcatggtctgtatttccttgtgctttaatttccctttaataaaatgagatggtgnnnnnnnnnnnnnnnnnnnnnnnnnnnnnnnnnnnnnnnnnnnnnnnnnnnnnnnnnnnnnnnnnnnnnnnnnnnnnnnnnnnnnnnnnnnnnnnnnnnnnnnnnnnnnnnnnnnnnnnnnnnnnnnnnnnnnnnnnnnnnnnnnnnnnnnnnnnnnnagtctctcaggctgcaggtggggatggtgaaaccacatggggcctgcagtctggagaagctgaggtggcagggat

SEQ ID NO: 245679 - DNA, 190 bp, Homo Sapiens
ggttcactctttatttcctcatatcagctttaaacggctctggaggaagcaccgggtttcttggcctgtctattgtgaatcttctcccaggtttgctctggaaaggcctggggtggccgcgtcctgtcctgccccatcctccttcactggggcagttccaggacgatcttgcctatgttcttgttggccc

SEQ ID NO: 245680 - DNA, 728 bp, Homo Sapiens
ggatagtacctggtgctagggtctaggggctgcccaaagcccagcaggaacagctactactcatcctgcagaggccttggcccagaccagctttccatccaaagcctcacctggtttccatgtccatctcaacagtctggccttcctgtgactgtagcctggcagccacaccctcagtaatcccgcacagtgagtccagcttctctgggagcttggccttcagttagcccagtccatgagagggcagggtaatgaggaggagtcaaggacctatcttctctgtccacataaggaagttgggaccacaaggtcttttatctccttgttactccgccaaccccaccataacctcctactcagcacacagctttatcctggtagattataaggtgagcttccagaacctggcaggaggctggtgtatccccctgcacagtcggaagtctatctgaatgttgtgtatgtggctgatatggaagacatacatgtatgcaatccatcagcgtttaaagaagaaactggctctggagaaactggctctgagcgggagaaactggctctgagcgggagaaactggctctgagcgggagaaactggctctgagcgggagaaactggctctgagcgggagaaactggctctgagcgggagaaactggctctgagcgggagaaactggctctgagcgggagaaactggctctgagcgggagaaactggctctgagcggg

SEQ ID NO: 245681 - DNA, 446 bp, Homo Sapiens
  misc_feature (395)..(395): n is a, c, g, or t
  misc_feature (398)..(398): n is a, c, g, or t
  misc_feature (403)..(403): n is a, c, g, or t
  misc_feature (410)..(412): n is a, c, g, or t
cccgctcaggcagtttctgctgggttttgaggagtgattttctttcttccccttgaaggggaaaaagctattttcattggtacatttaaagtcccccaactatggggaggtaccaattctggacaagtgccactacaacaacactaaacctgaacttttcaactccgttggtggtgggaggcagcgggcagaaatttactgttggccactgccaggtctatttcatatttcaaaggaatattgggtgctgcatataggaactgaaggggtcaatgtattaaacctgtgattggttgttttcctgtcattttgagagactaaatgtggggggcagatgtcaaaatacctgtacaattttaaaatgtcacaattaaacatgagctggtttcccaaanaanacaanaaggaannnctaagggaataaatgggatatataaaaaggaaga

SEQ ID NO: 245682 - DNA, 175 bp, Homo Sapiens
tgggtgcagtgggactgtgccttcccctacatgtttcctcatcttcgtctacgacgaaatccgcaaactcatcctgcgcaggaacccaggtggttgggtggagaaggaaacctactactgacctcagccccaccacatcgcccatctcttcacagtcaccagggtaccgagctcg

SEQ ID NO: 245683 - DNA, 156 bp, Homo Sapiens
tgcagtggtgctgtgtgcgtgagtgggtttgtgcacaggccgccagtgtgtctgtgaggggcaggtgacggtgccaccccgtgcctacataccacacatccagtggggtcaacaccacggtctgcctgggagtcagcacagtcaccactaaccaca

SEQ ID NO: 245684 - DNA, 677 bp, Homo Sapiens
gcagtactcagtaaacattcatttatttcctgccagcaggtgcagtggggccccactggtgaggggactggtgttctaacaggagcgagaaaatgaaggaggcctggcttaagaccagacatttgaagaaggctccaggcagggaaaggaaaggagaggccaggcccacactgtcccctccctgcccccacgtttccagcaacacaaggcggccagtggaccgtgaaccatttatttccaaactataaagaaacctgctctctgagaaaagacactgcccaggtgatgaagctccagcccctggaggtccaaaacccagtccaaactcagtccctttagaaagctgctgtgccttggaaatgagtctcggctgtcagagcctgggaagtggtgggaagaaccagcccactcccctctcctgctgcgattccagcgcagcttgggcccagctctgtccagtcccaggctggcctggtgctcgccccttgtgtgaccaggctctgaagggaggggcaaaagtcatgagtccctggcttggccccaccacctggtgactcccgtccacagctcccagctaccatgatgagccctggcggcttgagcacagtgagtgctggcagcaggctggggagtggcctgcttctaagccatttgccctggctggtcactgctgcccc

SEQ ID NO: 245685 - DNA, 1246 bp, Homo Sapiens
  misc_feature (117)..(130): n is a, c, g, or t
  misc_feature (428)..(436): n is a, c, g, or t
  misc_feature (921)..(954): n is a, c, g, or t
tcaggggtttccattcaatccccggttttgtggaaggggctttgccaatgttccgccaaagaaatgtctttaattgaaattttccaccccggtttcttgggatagaaggtgggccannnnnnnnnnnnnnttaaatttgaatattggaagcttgggccttgggacttcctgttgattaggatccaggttaatggccttcaggaaactcccattttgggatttggttcagaaaccgctcgggtttgccccgccgggccgtttttttatttggggaggaattccaaagccctaagttcatgccccaggatttccttagggaaaccagctaagggccaattttcactttccttactggggcccgcgcggccaaacgaaatggtttagaaagtttctggagggccggaggcggcccgacaagattaaaagannnnnnnnnagaggtcgggttcgggtaccaacatttttatttattcaaacattaagctaagaaaaattgttgtatgaaataatttataacacttctccccttcccttcagaatcttaaacaggaatccatttatctaccttataatcctaggaaggtattatttgattattcaagaaattcctcaatgatgctgccttttcccatgaaagaagttcctttttttccccgaatagacccctttcatgacccaccaaaaaccacaccaaatcttgaatacaatttcagctttattgaccccctaaagtctacaaatccttgggactctactgacccttgctgtaaagtgaagggagtgaaagtatttggaatataggtaggacctctaatataataaagatgtcactttaaaatcaatttattcaacaaacatttattaaacattcatatgccaaaaactatgctatggagatgcaaaaaataaaaaggttccttnnnnnnnnnnnnnnnnnnnnnnnnnnnnnnnnnnacttttgaaaaataaaacaatacagtatgatttaagtgacatacaagtagaggtaggttgtaattacagtggtgacacgaaagtggaagttagatgactctccttgagtggagcaaaggaggtttcacagaggaaatgcttatgtcaggcctgcaagatgcataggaattttccaagtggggaaggatgactagcatacttgatgcaaagagtacagcatttaccaaggcgggaggcctggccaaatgtggcttctgaagaagtgtaagtctgtttcaccagaacattcggt

SEQ ID NO: 245686 - DNA, 327 bp, Homo Sapiens
tgggagccgtggctgtcggggtggccagagcccggcacaggaagaacgtcgaccgagtttcaatcagaagctacaggacagacattagcatgtcagacttcgagaactccagggaatttggagccaatgacaacatgggagcctcttcgatcactcaggagacatccctcggaggaaaagaagagtttgttgccaccactgagagcaccacagagaccaaagaacccaagaaggcaaaaaggtcatccaaggaggaagccgagatggcctacaaagacttcctgctccagtccagcaccgtggccgccgttcctcctcttgccgccg

SEQ ID NO: 245687 - DNA, 184 bp, Homo Sapiens
aacccgagagcttttccggctcctgtgctctgcccatgaggccccggggccagccccctcccttctgctgctcgacggcctagaagagtacctagcggaagacccagagccccaggaagccgcctacctcattgccttacttctagacacagctgcgcacttcagcgaccggcttgggctgccg

SEQ ID NO: 245688 - DNA, 129 bp, Homo Sapiens
atgacgcggggatctaggggatgggcagacttcgcgggacacgtggcgcatgtttcctgggagttactgatcatcttctttgaagaagcatgaagttacatctatgcttgactgtgataactcgacatt

SEQ ID NO: 245689 - DNA, 597 bp, Homo Sapiens
acggcttttatctctttataattttgctgctcactcatctcaatttctatacttgagtttccaatgtctcacaagctagtacctttatattagcatatttctaagcaattaattttcttactctacatttctatcaatattggtactttcttcttaaaatgctccctcagtcattgcttctggataattttcattttataattacatattgaacacaacagcccaataaaagctgctgcctaagttcactctgagctgtgtcggccaactgtttatgatgtcagctgctacttcagtgtatttgttttttaaaacagtttggtgatttgacattggtacttaagcttgaaattatactgtgttttaaatttacatatttaagtacattaaaagccacaggtaaactatgttactaaccatcttccagtctgatttgcaatctgttcttctaatttctgtagctccgatgtataggccattagtcgagcattgcacaccatgagatacttaactgcatgtaaaacttgatcttactgagtgctcagagaaaggagttccatattccttctcgcattcgaatgctaagtctatatttct

SEQ ID NO: 245690 - DNA, 619 bp, Homo Sapiens
cctttcattgttaggatagatggtgttcgccatccaaactgcttacaggtggaaaggaagaaattgttatttcttaaaaatctgagccactgatgaaagaattaaactgccagttttttttgtatattaatagagattttaagtcattagagccaatttgtacaatactcatttccaaggggaagtcaaatcaacaggtctctctgaactgtctttacccactacaattaggaagattgaaaattaatacaaggagactgaaataaggccaaataagatccccgaataaagacataagagagcaacaatttaaaaccaaaagaataaccacagaattttcaatgtaacattaaaacgaagctgttaccttgctggactcttccaactgcgtgcctcgtttccaggcttcagagaataccgggagctcacaatgctctgggaacggacgtgtcctgctggctgggtgtcagacactccgctttcagactgatgggcggtggtttagactgcgcctctgttcaacatagttattaaacataggttaacagcgtcagtatcctgacaatattcatatgtatgtcctagttagctctttcacacaggtccagtgctgtgtcca

SEQ ID NO: 245691 - DNA, 526 bp, Homo Sapiens
ataacaagtttaatattgaaaatctgaaaaaggcaggaagataggaagaagaaaaatatcaaccatagtcctaccaccgtaaagaacactcactgacagtgtggccatgctcattctttaagccttaatttaggtcccatttctggtgtggtgccttccttgaacttcctcccccagatcttccatgtcatatctgtaccactcagttgtacatatcatagcacttttgtgtataatgtgatgtatgtcttatgtttccaactgagattgttacatcttcgaaggctgcaaacatgagttgtacttgttagcttaccccaaaataatacctggtataccggacccaatatctgctgattgatctaacctaaatgaatacaaaccatttcagaaaaagatatacaatagaccacatatccaggtcatgaaaattaaagctttcaggtcacctagcttagtgactattgcttttctgaccctagacccttgaaagcctatttaaactggcctctttctccacaccaaa

SEQ ID NO: 245692 - DNA, 332 bp, Homo Sapiens
attatttggctgtaggacgggaatatgatccaatccctctttacattcctttgttggcttctccgccccagcctccctccagtggagtgtaccccagggtggtgtccatgaccccttctcctttctcgctgttcatcatgtttctagagagcctcacgcaagcccatccttcaaacatcagctgtaagatgtctcccacatgcgtttctctagcccgagccctggagcccatagacacctctcatgaatgtcccacaggcgcctcaaacatcacacctgtctacatgaaattcatcatctcctgctcagccccagcctgcccaccttctgtg

SEQ ID NO: 245693 - DNA, 351 bp, Homo Sapiens
agaaagttcaaaatatatacatatatacagacatatgtacatccacatgtgcagacacaggcacgcccagagttgttggtggttctgcctccattcagaatggcaggggccgcccagcagacaaggagctgacctcatccatgggggtttcagacttgatgggcagggagtctctgctcagaagccaaactggaggtgatggcaagcctagcccccatccctgcccaagaccatcttcgttgtccttgcgcccggttttctgcccgtaggcccttcagccgttcctttccccgcaacgcctcttcttctagccggcccacaccacccgtagtcgcctccatcttgcccccc

SEQ ID NO: 245694 - DNA, 743 bp, Homo Sapiens
gaacaaagacgcaaggcacttgcagacaatcccttcctcaccggcctcaatggacttctcccttacctcctccccttccttggacccttattcgctatcatcctgttcttctcttttgccccttggatcctaagacgagtaacagcgttaatcagggatcagctcaattccctactgggaaagcccatacaaatccactatcaccaactagcaacacgtgatctagaatatggcagactgtagccggttcccctcctacgggagcagcataccgctcgacactatgcttttacgaaggtaatggacaccgctaggtgcaaagcaaggcactgcaaggagagtccttactaaggctactgtcgagtctcctgagaggtaagctggcttgcatagaggttggtactcgaaaaatcctctcctccctaaaaggtacctgtaagcctgaaaattaaggctcaggaggagcacagcctctacctcccctagctggttaaggtccgcctcctctttttttaaagaaaaagggaggagatgttggaacccaggctaagctgatgctattggaacaaaaggttgcatcagccccccccgccaaaagcatgccccgggcgtggtggggggccaccaatggaggacctgatcacgggcaagacatcgcctcagggccaccaatggaggacctgatcacgggcaagacatgccatcaggtccaccaataaggacctgtatcacgcacagatagc

SEQ ID NO: 245695 - DNA, 328 bp, Homo Sapiens
gggcctgtggccaaggcagtcctcgcagtgtgcagggacgcaggcccccttaccatggaagccccacccagaaggaagtgggtgccccatgcagtccgaggtggatgaggggacagtggtgtgctcacagctgtcagctccccactgaagccccaaaccagcagatgtgggcaggggctcaagtggtgtctgactacccaggtcccacgtgccttaagcgtgaaagctgtcagctcccggcacggggctctggtggggctgggaacaccagtacacacatgggctgaagcttccagagacagtgagacacggaagggacagatagccg

SEQ ID NO: 245696 - DNA, 509 bp, Homo Sapiens
tatgggaaaattctatacgccagtggcaaactagtggtactatttgaagaggctgcttttgcctataatgtatcctgcttgtttaatgctggttaacatgccaccaaattctccccaattgctccgttttgtaaaaacatactgctggcatcatttcagctggttccaacctgtgcctgccgagcatgtcgctgctactaaatcctgacctcaagtctgtctggatttcaatatgttcaagaaagtaaaaagcagccagcccctgacctctgagaactaatctgatgttcaagctaagccttggtgttactacaaactgttctgacatgtacagcttaaacattccacgctcctgttggacaatctcactgaacgtcaatatcaaaagtagtcactcctaagaccatggccaagtgagaaaatactaggtcactgtacacccactaaatacaaattctctttcttgctgtatgaagacagctattggcagtttcatcacggtaacgtcc

SEQ ID NO: 245697 - DNA, 924 bp, Homo Sapiens
cggacgcgtgggtccggacgcgtgggtcgcttcagcggtggaaaccaaccagtgaagaagagtttcttggtataccgtaatgactgcagccttccccggagcagctcagactctgagtccagcagcagtagcagtagcagcgctgcttcagaccggaccagcacaacgccctcaaaacaaggccggggcaaaccctccttctctcggggcactttcccagaggacagcagtgaggatacctcaggcactgagaatgaggcctactccgtgggcactggccgcggcgtgggccacagcatggtaaggaagagtctgggccggggagctggctggctgtcagaggatgaggactccccgctggatgctctggacctcgtgtgggccaaatgccgaggctatccatcatacccagctctgatcattgatccaaagatgccccgagaaggtatgttccaccatggggttcccatccctgtgcccccactggaggtgctgaaacttggggagcagatgacccaggaagcccgagagcatctctacctcgtcctcttctttgacaacaaacgaacctggcagtggctgcccaggaccaagctggttcctctgggtgtgaaccaggacctagacaaggagaagatgctggagggccgcgagtccaacatccgcaagtcagtacagatcgcctaccacagggctctgcagcaccgcagcaaggtgcaaggcgagcagagcagtgagaccagcgatagtgattgatactgctcaacaaaggccaaactataagtgcctgtgacttctcttctccccttttgtcactgtcctggagtggcaccggctctgcactgactcatttctggtcctggggccagtctcaggggaagctgggtgggggaggtcctcctggcctaagtgcagctggactgt

SEQ ID NO: 245698 - DNA, 638 bp, Homo Sapiens
cagcttgacccgacaagcaaagaagattttctgaatatctgcattgaacctgacaccatcagcaaaggagactttataactataggaagtcgaaaggtgagaaaccccaagctgcacgtggagggcacggagtgtctccaagccagccagtgcactttgcttatcccggagggagcagggggctcttttagcattgacagtgaggagtatgaagcgatgcctgtggaggtgaaactgctccccaggaagctgcagttcttctgtgatcctaggaagagtagaacagatgctcacaagccccacccagtgagcagcagaagacaagcactctgagaccacactttaggccaccggtgggaccaaaagggaacaggtgcctcagccatcccaacagtgtcgtcagagggtccccagggcattttcattggcaagtacccctctgcccccactccagcagtgcttcccaaagtgtgctctgtcaccttctttgctatcggcttccattagcgcatgttttattttggtgtgacggttggccctcctaaacacggactttcctcaggatgcttcagacggaaaaggactttcgttctgttttcttccaaagtgcaatcacacgtggagaagatccacgatga

SEQ ID NO: 245699 - DNA, 170 bp, Homo Sapiens
aaggccgggctaagcaggatggaaggcagccctgttttattgaatctgatagctactttcccaaaaaggccagaaaagccatttcacatccccatagttatgggaattagctttttctccaagatgcccccattagccagttaaaccatcagtggccaacagggtcaaag

SEQ ID NO: 245700 - DNA, 310 bp, Homo Sapiens
cgtttttgttactcttgtgagtctaattttattttaaaataaaatgtttaaaagtatacatggtaacagactttctttggggaggggaggtagttctgcttagcagacgtacctcctttatgacaccccttgattccttctggagaggaatgagaataaaagttatcccacctgtgaacaggcagacttgaggggattctaaatcaaggcgctttcgtatttccaagccaaatgcatccacagggtctatcacagacgacttcagcaagaatattcctcttatagccaaagtacagtgattaacaacggt

SEQ ID NO: 245701 - DNA, 407 bp, Homo Sapiens
agttagcagtattggaatggaatttttttccagaaatgcgaatttctggttttgctcagatatatgtactagcgactcattaacaaacatttaccagtccactgaatgaaagatgctatgctaggcacttgaaataacaccaagatgaataaattgtggtcctgaaggaatctagaaagggatcagatgcccagtgtactctagtggaagtcacagtgtggtaagtgagccctgcagagagtgtagagaaggctttcaaagccgagaacagcaatcccttacgtaaaacctctcagtcttgtcactctcataaaactaaagatttatctattatctgctcactgttctttgcgaatgccttgtgtgtattgtttttttgcctcctgggccagagtgcaccagtcaga

SEQ ID NO: 245702 - DNA, 265 bp, Homo Sapiens
  misc_feature (145)..(179): n is a, c, g, or t
gagatatttttggttgtcacacatagagggggtgctactgccatctagtaggtagagagaccaaggatgttgctaacatcctatagggcacaggacagcccccacaataaagaatcaacgtggcctaaaacatcagtagtgctgnnnnnnnnnnnnnnnnnnnnnnnnnnnnnnnnnnntggtattgataattatattcagataatttgttatggctctttaatatccccacagggctctaaaaagcaaacaatcaagccgtcag

SEQ ID NO: 245703 - DNA, 605 bp, Homo Sapiens
tcagctcgctacctgacggctgaatgttggggtacgagttagttgaggtgtgagtggaggctaattgctccccaggaacttaatggttgtaagggcacttaggccacatcgcactctacccacttaaatgatatataactatctcagagcctcaattcccacattaaaatagggatcgtagttgggagttgtgaactttcctcagtgtctaatgcacagaaaccattcaataaatgttattttagtattactgatactgcatctagtaatgagatagctttgttttctgggtttatcaggcctacctgttaatggaaatcagtaatcgttttccttttgattgacttcattttatgtctgctcacatttttgtttttgtttatgataggtaactgtgctcaaaagaaaagtgtatttgtatacagttctgtatatttaatttgtttgttcagtgggattgatccttgtctttcaccactgaatttgatagatgaggaaacaaacatacaatgtataacattttctaggtcttacggttatgtctagaagattctattatttcggaatttaatttctttcttctcttcaccaacattcaaacgtca

SEQ ID NO: 245704 - DNA, 333 bp, Homo Sapiens
cagctccagagctgtaagaaataaatttctgtcgtttataagccacccagtctatggtactttgttatagcaacctgaaatgaataagacaagtattatcaagagtaactgcacatatttatggaaatcacaacatgatataaaaaaattacagagaaaaaatatcttaaggagacaattctgtaactttcttcgcagagagcttagaaataaaaaaacaaacatataaaacccagctcttttgtgatttataaagcacaggctgaatagggccatatacaaatatttaaatatttaacatacaagaggataagtttcaaacattcaccgtca

SEQ ID NO: 245705 - DNA, 411 bp, Homo Sapiens
  misc_feature (175)..(205): n is a, c, g, or t
  misc_feature (208)..(278): n is a, c, g, or t
ctttaacactccagcaatcagcctcttccttctcttttttcatttaaatctgatagttacaaaatctggtagaactggtgtgcagtattacaaaacattattgtggactgctttttactttaatttacaccaacacaaaaactgctcaaatttgaggtacaatttacatgctaannnnnnnnnnnnnnnnnnnnnnnnnnnnnnnagnnnnnnnnnnnnnnnnnnnnnnnnnnnnnnnnnnnnnnnnnnnnnnnnnnnnnnnnnnnnnnnnnnnnnnnagttcaagtgattctcttgtcttagcctccggagctagctgggactatgggtgtgcgtcacaacgcccggctaatttttgtatttttagtagagatgaggttcacccaacctagttccgatcagggtccgagc

SEQ ID NO: 245706 - DNA, 465 bp, Homo Sapiens
tcggtaccctgcacacgccgaaaaaccatactactagttgtctcacaaaacatctattctcatgttcttcctgagcatacaatcagtcacataggctccatttcccagccttccttataggtaggcatagccgtgtcactaagttctcaccaatgatgcaatgtgagtaaaagaaatagcagaacttcctgctcacctcctcaatggcaaactgtcctgaatttcctccttctcctccccacagactgaagtgtgaaattgtacacccatgacaagtggatccctgtattacttcatggagcagaatagaatatctccatcctactacatggcagcaaaataaaatgttatcttattatgaagactaagtaactgtaacaatccacattttaaaaagtattacatggccaggtgtgatggctcacgcctgtcatcacaacacgttgggagcccgaggcaggtgga

SEQ ID NO: 245707 - DNA, 578 bp, Homo Sapiens
aggccacctatgaggtaatgagatgaaagcagaaattaaacgtttctctttaaaaaaaagcataggacctgatggttttactgctgaattctcccaaatatttgaagaagaattaatacaaattctcctcaaattattctaaaaaattgaagagggaattcttccaaactcattctacaaggcaagaagtaccccgtggccaggcatggtggctcacggatcattagaggctattatgtatgactatgcttcagcattttggctcggtacacagctaaattctttggcacatacaacttaccaaaattgaatcataaagaaacagaaaacttaaacaggccaactatgagtaatgagatgaaagcagaaattaaacgtatctctttaaagaaaagcataggacctgatggttttactgctgaattctaccaaatatttgaagaagaattaatataaattctactcaaattattctacaaaattgaagagggaatacttccaaactcattctacaaggcaagaagtaccctgtggccaggtatgggggctcggcgtgtgcaggggatactctagagcgg

SEQ ID NO: 245708 - DNA, 644 bp, Homo Sapiens
  misc_feature (634)..(634): n is a, c, g, or t
aggctgatggagttgggcctccccttactaagggaaagttaaagagcaagaaccacacacaggaaacatctgaagggatggattcttaatccaagagtctggaactgaaagtggcattctcaaagctcacagtacaggaagacccagctactaccaacagagagccttctcacatcagaaaagcaaaagcctccgaccttccacctctggagcatgcgtttgcagaagggctttacttcactctggcagatattgtgctcttgccctgtatccatcatttcttggtaattatcagcaggaaattttccgagaagctggtagaatttccattgctagcctcttggtaccagaggattcaggaagtgccaggagtaaaaacagcagcttctaagtatgggatccaatttctccatttaccaaagttgttgacaacctcaactgaacagcatccaaacttatgtgaagtcccaggtgtagaagagcaaagcgatcctttatttataggaggaccaagaccaaccatggccaagttaatggaaaagggcattgaagtgatgttttctccccacccttgccctacttggactcttgattggaatgttctccctgcacctcgaaagcgccaagggggggntcctctagag

SEQ ID NO: 245709 - DNA, 397 bp, Homo Sapiens
gcccagctatgtactcgcttgatggagagcttaatctgcctttgagcgctctttgatttgaccccacagagactgtgaaattctctgggagcatggctggttggagatgagaagttttttcatggaagcacctggtcccctcacctctaacacaggccacagaggacgatgggactgagttttagattactgatgtgcatagaaacagaagccacctgccacaacctggatcactgccactggcatcagagcaagcgaggagtagatatgcctttgtcttgtcctggcagttcctcaggatggataagtgtgtgcacctgcccagccctgaccctgctgtttgtacctcagtaaattacatgttgtaatagcaactcgaaagcgccaagcgggggat

SEQ ID NO: 245710 - DNA, 725 bp, Homo Sapiens
ggaaggggccggaagggccgggcccgaaaaaagggggtttagtttgttgagtgttatctttgtgagggaggcaaggaacctgccaatattcggtttaatggggttcccaaattcgggtcccccagtaccaattgaaaactgcctcgacttaattttaaatttctggggcagcaccactggaaggcagtgactgcctttttaaaagacagggttctgacattcagagatttctgtttctctatccatcatttttgggcatcttgaatcacctgatttagagtcagtgacatcctgactggattggttctgctctcgctgggcgggtgagacccccagacccacgtccacagtgcacctgatgttctcccagcggtcgtcacttccccaaggaggccaggtaggcataccagaacagagctgccaggttggcgaagagcacccggaacttcagagggacgtagttgatgttgatgaactgtagtggcgtccacacccgccagttcatcctcagcgccggccagaagccccccctcatcttggcggcgaaggctgaggcgtctttcccctccagaaagttcatgatgaggaagaacaacatgaggaaggccggtgcaaagacgaggcggtccaggagaagcctcctgagccctgccagggggacctcaggagggatccaatgttccatgaagaagtagaagaagtgactcagcggccctgtgaagacc

SEQ ID NO: 245711 - DNA, 237 bp, Homo Sapiens
catgctgtggggtgtttatagcatcctacttatctcagataaaggaaactttcaccccattcttagtttactaaacttgtttcttgtttcgtttttgttttacagtcatgagttgttgaatttacccaatttttcttaatttattgagatttgaaaaaatctgtttagtatataatttaaatatgattttctttttaagcctgttgatgtgatgaatttaaccttgcgcacccgtat

SEQ ID NO: 245712 - DNA, 491 bp, Homo Sapiens
  misc_feature (16)..(16): n is a, c, g, or t
  misc_feature (31)..(31): n is a, c, g, or t
  misc_feature (36)..(36): n is a, c, g, or t
  misc_feature (46)..(46): n is a, c, g, or t
  misc_feature (67)..(67): n is a, c, g, or t
  misc_feature (113)..(113): n is a, c, g, or t
  misc_feature (119)..(119): n is a, c, g, or t
  misc_feature (127)..(127): n is a, c, g, or t
  misc_feature (204)..(204): n is a, c, g, or t
  misc_feature (220)..(220): n is a, c, g, or t
  misc_feature (225)..(234): n is a, c, g, or t
  misc_feature (239)..(239): n is a, c, g, or t
  misc_feature (385)..(385): n is a, c, g, or t
  misc_feature (401)..(401): n is a, c, g, or t
aaaaacccccaaaaangggtggggaaaggcnccctncccctaaaancctaccgccctgatgaagtgnaactcctacccaccctggatggaacatgttttatgacccgacccanacgtgnccctaagnagattgccttaggcagatacagaatgaagaggagacttgagtgttgcctgctgaagcacatcccttgcaatgtgggngtgccacaggagtccnccctnnnnnnnnnntccgngatgctgttgcctgcctttttagtcaccccgtaacaagggcacagcatccaggactgtgtcttgcctttcagatcttaacagagcagcagggcttaacttgttgattttggagcctcttagtgacctggttgcgtctgtgtcaggnacttaaactttctggntcagtagtgtgttaaacataacactgaataccttactgggatacagatttttgctcagaaatggctatgacactttttctaggctctacc

SEQ ID NO: 245713 - DNA, 272 bp, Homo Sapiens
ggtggggcaggagggttgtgtgcatttccagcctgcatgtacagaaagcacttcctgtctaatatcccaaaatggtgactactcactcctattttaactcacctctcagacactgccctgctttctcagaacacactgaccagggctgctctttcttagagcccccttgcctttaagcacactgtagagtaccctatccactgtgatcaaaccggactcctgtgtgagactccctcctaggcccccagacttacagacaccacagaacggta

SEQ ID NO: 245714 - DNA, 651 bp, Homo Sapiens
gccaaacatgtgcaggaaacatgacagagtgtcctggccactttggctcacattgaactggccaagcctgtgtttcacgtgggcttcctggtgaagacaatgaaagttttgcgctgtgtctgcttcttctgctccgaactgcttgtggactctaacaacccaaagatcaaggatatcctggctaagtccaagggacagcccaagaagcggctcacacatgtctacgacctttgcaagggcaaaaacatatgcgagggtggggaggagatggacaacaagttcggtgtggaacaacctgagggtgacgaggatctgaccaaagaaaagggccatggtggctgtgggcggtaccagcccaggatccggcgttctggcctagagctgtatgcggaatggaagcacgttaatgaggactctcaggagaagaagatcctgctgagtccagagcgagtgcatgagatcttcaaacgcatctcagatgaggagtgttttgtgctgggcatggagccccgctatgcacggccagagtggatgattgtcacagtgctgcctgtgcccccgctctccgtgcggcctgctgttgtgatgcagggctctgcccgtaaccaggatgacctgactcactactggctgacatcgcgacattcccct

SEQ ID NO: 245715 - DNA, 399 bp, Homo Sapiens
ccctacaaccttcctcaaaactttactcctttctttacgctgtctcagaaccttctgtttatttctgccatgagatttatcgtaatgtattacaaatgtttatttacttgcctgtcttcaaagataatacgttttctagccttgcttaattccatctgtgtgtccccagtacctagaacataaatatagaactaaatataaacgtatggagctgccgctattcttatacacagccaaagtaactatgtatcacaaggaaaactgttgctgaattaatttaaaatatactttcacaattcacaatctaacgaattcattctaggaaaggtataaaaagcagcaactgtctagaaaattaagtgtaactatcaccaatactttataaactgctctcatctg

SEQ ID NO: 245716 - DNA, 296 bp, Homo Sapiens
ctccgccttactatgaagctgtggtttaaagtgatgagactagttgagattaccaagcagacaagtagaagaaaataagtccaaagactgagtgttgggtttgagtccagtatttggaattcagagagatgagaaactaggtggaggatgagaaggagcagtcagaggtggaaggaaggaggagactggcacagaaccagaggaaggaggaggaggcggggtcggtgtctgtgtcagatgccgctggcagcacaagttcaaggagactgttaccattgagggactgagtaaggaca

SEQ ID NO: 245717 - DNA, 424 bp, Homo Sapiens
  misc_feature (219)..(219): n is a, c, g, or t
  misc_feature (386)..(386): n is a, c, g, or t
gctgcagtactctgtccaggtggcgcatgacaacacagtggtggcctcacggaagtatattcataagtggatttcttatgggtcaggtggtggagacatttgtgaatatctacacaaagatttgcatacaatcaaagggaacacccacgggatgccgtgtatgtttccccttccagtataaccatgcagtggcagtcatgaatgtacaccgtgaaggtncgggaagatgacttacttgtgggtgtggccacggacaagccagttatgaaagagatgaaaagtggggattttgccctgatcccacctctgcagaagtaggttgtgatactatttgggagaaggacctcaattcacacatttgctaccagttcaacctgcttcatctnctctggttggagtaaggcggagatgtacacggtgccga

SEQ ID NO: 245718 - DNA, 349 bp, Homo Sapiens
atctccgccttactcagaacccaagatataatattttaatagtcccagattatttttgacaccacctctccacatctaacgtcttccttctattacagagccgtgctcaagagtgctagactagattctaccaagtagaagctcttacctgagatctggaagaaagaatgaaaacattacccattcttttatcagaactgaacaaattagatgttcctaggcgtacatagtacttcgcaaagatctttcagcctttttctagaaatcgcttacctgagtacagaaggcaggagggattgtgccagcagtttcccaattgctagtagattctgtaaggcggagatgtaca

SEQ ID NO: 245719 - DNA, 410 bp, Homo Sapiens
caaaaattcttcacataatgttagcaggtcaaatccaacaatatataaaaagtaatacattgtaaccaattaggttttatctcagatgtataaggttggtttaatatttggatattcatcaatataattcagcatattaacagaccgaaactgaaaaactagatgatcatttcaatatatacaggaaaaatgtcaaaattcagcatcccttcattataaaaacttcttgcaactgggaatcgaaggagacttcatcattctgataaaggatatctgaaaaccaacagctcatatcaatcttggtggaaaactgtaaactgtccccttacaactggggacgaggaaaatgcctacccttaccacttctagtccacattgtactggaagttctagtcagtgcagtaagcgga

SEQ ID NO: 245720 - DNA, 556 bp, Homo Sapiens
caagcttttctccagaggagacccccttaggcagtcctgcagtgctgctctgcagcatcgcttctcatctgttgacgcagctattagctatgctggagagggctgagcaggcacaggcacgcacacccacgtgcatgcccacggacatgcaagcgtgcacacacacgcatgctcatggatatacacacacactcaggctaccaagccctggccctgatttgaccctgcttgcctttgctgcctgcccagtggtgtaatggaaaagtctcttcttcacatccgccattgcccttcccccacctcaggctcacttagcaacagtggagtgaaatgaaggtcactgtgtgtcaatcggtgggtccgggagattcccagctggctagcttcctggtaggcaggtatgaatgtatgctgctgttctctcttttaaggttgtgggtggctgtttgtttagctctgaagtatagacggctcagtgctagcagacacattttcaaagggtcatattcttggcttgttggtaatcagaatcgggcaggagaagtggggtggatgc

SEQ ID NO: 245721 - DNA, 214 bp, Homo Sapiens
cctactcacgccccacgataatctggaggccaggggccaggagacatagaaacaagtgatatgttagaagatgatgaatgctatcaaggaaaagtaaagcagagatgagacatagggaatacggttggctgtcggggggaggagcagatgacttactatttcatctaagggtttgtgggtgagatctgagtaagtgggattgtagactatgggt

SEQ ID NO: 245722 - DNA, 625 bp, Homo Sapiens
  misc_feature (333)..(379): n is a, c, g, or t
attagaggccttctgtgactcctaattctctagtttattgccttcctaacacttaactgcagtcctgtttatatatttacttttggtctccatccactaataaagaaagcatcttaaggcataagcaggtactgtcttgttcctcgaaaaactctcagcacctagaacacaggtgctgaataaatgtgtatcttacacaaaacaaaccgatcactcaacatacccatattgttctggcagaaaaaccggctgccatttggagttatccgacctggttttgaacaggacactggaagcctttattagaggttctgaagcccagctccatatttnnnnnnnnnnnnnnnnnnnnnnnnnnnnnnnnnnnnnnnnnnnnnnntaatagaacctaatagaataagattaggagattcaccaacctcatagaatctcccgaggaaacttaaaaattatctttgctcagaccctgctcagacttaggggtgatgggtcagtatggaagcattacgttttaaaagctctttttgtaattccttgtgcaaccaacatggaaaagtactgctctgagtgacacagaactgaataattacctggctacccatgttcttattatcgtgggtgcgtg

SEQ ID NO: 245723 - DNA, 257 bp, Homo Sapiens
ttcagaccgtagcagttcccatctctcagggtttcaaaacctttgctgcatgtttgaattaccagggtgcctttaaatacattggtgcctactcttaccttcaaatgttatgattggtttggggtatgacctatgtgttgaaatttttgaaagcttccccagcgtagtcaagtttgggaaccactgtcataggtgaggattccatgaattgatccttgtaaaatgccagagtgtcctggccatcacgcaggaagtgc

SEQ ID NO: 245724 - DNA, 399 bp, Homo Sapiens
gcttcaggaaaatgcaataaatatgttaaccatgggaaaactgataaagttgcggaagctctcatgatcagtttttagggactttcatggtaatatatatggagtaaggctaacctcttttacactaatttattttattcgttctcatgttgagaaacagtagtctagattcactttctctgtacctcttttttcatttctaggatttatcaaccaaatgggttcaaatagttttagtctatgaacattaagtcttctttttggtaaatgttgagcataccaactgagatatctgtcatgttgttgagctgtacgttcagctactagatctaccacccaatctgttgttctttctttctttgatagattttctgaaattttatccgtatccaatcccat

SEQ ID NO: 245725 - DNA, 564 bp, Homo Sapiens
ccacaacgcacccacgataagagtccctgcctcagcctcctcttttactaactccaccctttctcatctctgggacccagcaggacctggagaggccaacagccactgctacctttgtagtcttcaaaatattgaactgcaggtcccaagatgcatttcaggatttaagacaggtgcactaatgataaccattccttcaccaagtagcaacattcttgccagagttcttgggaaacctgtttttttctctactctccatctctgctgctctcatgctttaaattgataaaatatgggctcaaaaaaagaaagccgccaaagactcttatccttattggtgccccatcattggccaccccagccataggtgtgtgctgttggtgggaaatggtctccttcctcagcgttgtgtttgggttactggtgaggccagcttcacagagtgacatcatggtcaccagtacatgtcgctggagtaaaatcttgcctttagaaactaggttgagctgttcagaacggtcgattctcttctgtattccccctcaacatttatcgtggtgcgtg

SEQ ID NO: 245726 - DNA, 594 bp, Homo Sapiens
ctgtatgtgccgatcttgatctgataacatgaccagctctctgtcctaggttggtctctacctttttggttaatttaataggagactaaaaaaccaatggaagaaagtaacctgctattaagtcaaccaaagagtaggacctgccttccggctcgaaaagcctgggtctggcccatcccaccctatggtgagctgccgtgtgaaccaatgctctgtctgaaggcggcacatcccggtcaggagccagtaagggaagccaacacggatgggcactgctctgcagaaagcaccaggattcatgtgtgtgtctgtatccgcaatctacacaattatcgcgcctcctacaaacttcaattttaaaggcaaaacagtgctgttttcataatgcggatcacacgggccgtggagccatcgtgagaaacagctggccctgagatggcagaggcaatactcactctctctttggacctgcttgtggttttgcacgctaatgacgggctctcctttcgatttatccatcacgaccgtccgctccatttctctgcttcctgatttgtgactctagaccagatcttgtagtccggtttcagctgg

SEQ ID NO: 245727 - DNA, 332 bp, Homo Sapiens
ttttcgtaacagtcgtcgaactaggcctcaaaaacatacgtaacgaaaaggcctagcgaggcaaattctgattgatttgaatctatatttttctttaaaaagtcaagggttctatattgtgagtaaattaaatttacatttgagttgtttgttgctaagaggtagtaaatgtaatagagtactggttccttcagtagtgagtatttctcatagtgcagctttatttatctccaggatgtttttgtggctgtatttgattgatatgtgcttcttctgattcttgctaatttccaaccatattgaataaatgtgatcaagatacgcacagcagc

SEQ ID NO: 245728 - DNA, 718 bp, Homo Sapiens
  misc_feature (415)..(543): n is a, c, g, or t
  misc_feature (546)..(652): n is a, c, g, or t
ggctcggtaccgctatgtgcgattcttgagatgtattttacataagggcacgttcctctagtcctagaccgagctctctaacaacactctttctcccccacccctggatccaactcccccagaggcgtagccaccctgccgggtacacagagctgaggtcactggactgaacactgccagaaatgaggttcacttcctgaaatagctcttgaacacaggagtgaatgggctgtggattcaggtggaatatttattaatgcatcaagcaaacaggtagtgcgaggtgggaggtaggcatgaggctgggtgctaggtgctcagtaatgactcaaatctaagtccacaggtcctgggcagtgggagtggagatgcatgcacagaaaaacggtgcgagtgccaggcgaggtggctcaannnnnnnnnnnnnnnnnnnnnnnnnnnnnnnnnnnnnnnnnnnnnnnnnnnnnnnnnnnnnnnnnnnnnnnnnnnnnnnnnnnnnnnnnnnnnnnnnnnnnnnnnnnnnnnnnnnnnnnnnnnnnnnnntgnnnnnnnnnnnnnnnnnnnnnnnnnnnnnnnnnnnnnnnnnnnnnnnnnnnnnnnnnnnnnnnnnnnnnnnnnnnnnnnnnnnnnnnnnnnnnnnnnnnnnnnnnnnctgggcatggtggcgtgagcctgtaatcccagccaccccgtcggagcgggatactctagagcgacc

SEQ ID NO: 245729 - DNA, 323 bp, Homo Sapiens
tgggtttacagtttatatacaccacagttagggatttccatatatcccccagctagtcaagaaaacctttgtttggagttctttactgactattgcatcatccaaatttattttttgcctatgaaaactgaaaaggtgaagaccaaatttggaaattcacgtgtgccaatgcagatatcaacatgaacaaaagaaaaatacatgtattggactttggaaagtaaaatcacagacctattctggttcaaggtcagccataagtggaattgtaaagaaaggccagaaaataatatatggttcatactcaagatatcgcacagcag

SEQ ID NO: 245730 - DNA, 263 bp, Homo Sapiens
aaagtcttttgatgcaactagggaacttctgtcatccctcatccccagtcacagctattgaaggtggtggagtggtaactgacttccagagcagacacctgagtcctcatagtggggccaccattgggaaacaagcaagttttgtcccttggatcccagaacagcacaggaattggaagtatcaggtatctcaaaagacaggggtggggcagatgtgcttgagactcagggaaattaagcagcagaagccctaagatgagaca

SEQ ID NO: 245731 - DNA, 224 bp, Homo Sapiens
gtcaattattgtagcatgggcatccttttaggtaattgtatatggacatctactgcattattttcaatggctatgtaatatactgttgttggatgtcctttatttagtcattcatctgttaattcagcaaagaactattgagtacctgtcatgtgcaagttacctggggatatattcaacacacagaacaaactgatatctctcacctcaagatcggcatcagc

SEQ ID NO: 245732 - DNA, 851 bp, Homo Sapiens
taccctgaacttaattaaatggtaagctcttttctgcattcttgatacaggggccgatgccaccgttatatcttacactcaccggccgaggaactggccgttaacaaccgttgctactcacctgcgcggtattggccaggccaccaacccccaacaaagtgctcaaatgcttaagtgggaggactctgaaggcaataatggtcacattaccccttatgtctctccccaatctgccagtcaatctctggggaagggacatcctctctcaaatgaaacttgtcatgtgcagtcccaacgatactgtcatgacccaaatgctaagccagggtatctccccgtccaagggttgggaaaaaataatcaaggaatcacccagcccattactattacccccaaaaaagacaaaacaggcctaggattccaccaaaatttaccgtagcggccattgacattcctgtaccccacgctgacaaaatttcctggaaaattacagaccctgtgtgggttgatcagtggccacttacatatgagaaaaccctcgctgccattgcgttagtacaggaacagctcgcagcaggacatattgagcccacaaattctccatggaatactcctatattcatcattaagaaaaaatcaggtaactggcgtcttttacaggatctaagagccgttaataaagtaatggtccccatgggagcccttcagcctgttcttccctctcctgtagccatccccctaaactatcactaaattgttattgaccttaaggattgtttctttaccatccccttacagctctgaagacagaccttactttgcctttagcgtccctcaagaatgtacatcaa

SEQ ID NO: 245733 - DNA, 574 bp, Homo Sapiens
gtgcgtattcttgacacatgagaacaattattttatattggggacagaggcagaattgttttgtgagaattcctgggactatgttaggtaaacctatatttgaatctgttgcttcctcactattgcctggtaggagacttgctcacttcccaaatgggagtgacagcacagtggctgctacctgaccacccaccatgtgcaggctccattcccacactgccctgcaccctcacgtcagtcccactgtagacctgggaggtgggtgctgtcattgtccccatcttacagagggagagcttggggacacagagagggtgagatgcacgattagagccatctgactctaaagcctggcttctctccctgactccatacagccccttcaatacaatagcttactcccaggtctgtagggagtctccgacgattacccacagttaagtggataggaatgcttagcacagggccaagctccaccgggcagcttccttccgagtccaccttcctttccaatagaacctgatttcttcaagagaaaggactatcattcactttatacccggaataggaagcc

SEQ ID NO: 245734 - DNA, 286 bp, Homo Sapiens
tgatccgattcttgaagtgctgcagggatatgctgatgtgatcaggcactgcttaatctcagttctgtttcatgtactatgggcagaccagtcatattcctgtagtatgggcagactagccatattccttcctgtctctgggcctatgcacataccgttctttttggcctggaaggaccttatctccagggtcaacttaaatgttttctacttctctttacagaagtcttcctggcaagcggtacctcctacccattaaccaattacttgtatcttttactccttt

SEQ ID NO: 245735 - DNA, 451 bp, Homo Sapiens
gagaaatattcaaaactaaatgttctgttttaaggttgggaaacagaaagcagccagacaacaactaaaactgttttgtcccctaaagggcacttttatagactggatttaaagttcaagccgttcactttgtaacctcagatataaacacagtgctcagtgtactatcttgaactagttttcttttgtactttattagtttctcgactgtagtatttgctgcttgtctgataacattttcgtgtccctgtagcttctgtagcttttcaagcctccattttggactttacctaccctgtttatattaccagggatctttatttgatcctcgtaatctgaatgcttttttcatctactttcattgcttctagatctctatgtttaggtcagtccttctgagctgcagagtcatatatctcatcagatatctctactcaagaatcggcactcg

SEQ ID NO: 245736 - DNA, 493 bp, Homo Sapiens
  misc_feature (146)..(196): n is a, c, g, or t
  misc_feature (304)..(331): n is a, c, g, or t
agatttcatgattagacaatgtggaattacataacaggcattgcactaaaagtgatgtgatttatgcatttatgcatgagaactaaatagatttttagattcctacttaaacaaaaactttccatgacagtagcatactgatgagnnnnnnnnnnnnnnnnnnnnnnnnnnnnnnnnnnnnnnnnnnnnnnnnnnngcatgctcagtattgagacactgtcaagattaagttataccagctaaagtgcagtagtgtcacttttttcctgtcaatatatagagacttctaaatcataatcatccnnnnnnnnnnnnnnnnnnnnnnnnnnnnatggatttgacacactcaccatttaatcatttccagcaaaatatatgtttggctgaaattatgtcaaatggatgtaatatagggtttgtttgctgcttttgatggctacgttttggagagagcaatcttgctgtgacacagtggggatgtatatcacatcaa

SEQ ID NO: 245737 - DNA, 552 bp, Homo Sapiens
tgctgtcgctagattcagatgattcaagtgaggatcaagtggaaaatagtaaaaattcctggagttgcaagtttgttgctgctggagggcttcaacagttattagaaatttttaattctggaattctagagcctaaagagcaggaatcatggactgtgtggcagctagactgtcttgcttgcttgctgaagttaatatgccagtttgcagtagatccatccgatttggatttagcttatcatgatgtctttgcctggtctggtatagcggaaagccataggaaaagaacctggcctggcaaatcaaggaaggctgctggtgatcatgctaagggtcttcatataccacgattaacagaggtatttcttgttcttgtccaaggaaccagtttgattcagcgacttatgtctgttgcttatacgtatgataatctggctcctagagttttgaaagctcagtctgatcacaggtctagacatgaagtttcacattattcaatgtggctcttggtgagttgggctcattgctgttctgttagtgatctaagccctt

SEQ ID NO: 245738 - DNA, 358 bp, Homo Sapiens
atccgtgtctctctcctgcacttgatcttgcctgttcatgggatgatgcagcctgtccaccagaggaattctctgcatgatgagtgcctgattgtctggagctctctgcagagtgcccatgactggctctgtcttcttgatgggacctggggtttctggagccatgtcttgactgctcctgagcagatccatgatggtttctggacgccgactcagaccgcctctcagagtcttctgagtgtccctcactgtccctgtcctggctaacaatggattcctggcgcctgcttgtcttggaccccgctgattctccctggcccacctgtgagtgtctagagctggcggcccgagtggaaag

SEQ ID NO: 245739 - DNA, 772 bp, Homo Sapiens
aggattgggaaatacatgcacctgtcttttaaggatattcctatatcttagaagaaatgggtccacttgtgtctctgatttcttgcacatgagtctggttttcatgggtccaaactgatattccacctagtccaagaggactgactagttttgttagtgcctgtcagattaggtgctaattctagccttaattacaattaggaattacggtaattccaattaggcattgtgctaagcagcttgccatagatggaaacatttaatgcctatcagccatctttgaaatgaaatcactcattataaataaggaagtggggttccaacacatcccgacaatatttcataacaggacttcatattcaaagcacctgattccaatagtggttctgttacttatgaactgtgtcaccttggacaaatcacttaatatccctgtcctcctaacacatctgacaatggacataatcatagtacttactgcaaagagttattatgaggactaaatgattctaatataaggagtcagacaggcccacgacagtcatcagtgcatagtggaaatgtcggggatggccgcgactcgcaccggcaatatttgctggtcacactaaatacacttagagacatgctcatcattccgatctcaccataaccaaggggcacacaaagagtagagctgacataacaagaggcttatctagctattgtggccaggacgcacttattactacggcatctaaatacctattatcggctcgcggatacggtgcct

SEQ ID NO: 245740 - DNA, 637 bp, Homo Sapiens
tcgtgcctcctacaagaggatgtcgccttctggatccacctcaagcctactcaggagagctgctcagcttcctcaagggcctggagtagatggtttccatcttctcttttgccacctgtggagagtttttaagagcaaacagaaattcaagtgaattgtcctcctacagttactgacgaaactattacagctacttctggttatccattcaggttaaatcaggcatcatttcagtcacctccaggtattaatgtgtatgatataaattggaaagtcaagtcctcctaggagatgactgtgcttctgcacaattccattacatttgcagtctctgtcttcctgtactgcattgctgtcgtgctttatgttggttacaggaacctatatcagggtagtcataaacttcccatgattggctttgtcattactcttgttgccatcttttgcgattggtgagcacttcaaaagctcgcttgggcaaaacctcttgcagatattaaaataactactggtcaaaatattgttcaggaacttctgcttgtcagacatcataataatgtgttattttggctctgtgaccagcatgggattcctaaatgtatctgtgatctttgtctttctgaatatgatactctgg

SEQ ID NO: 245741 - DNA, 957 bp, Homo Sapiens
  misc_feature (224)..(233): n is a, c, g, or t
  misc_feature (896)..(896): n is a, c, g, or t
ggtacaggttcctagcctggctctatttttcagagggaagcattgtttctgcggggacatgcctgttcacttccatggcactgctgacttgtgctcaccctatgacgcctcgcccagagcacaggaggacagtatccactgcggggcgttcaccccacgcgagcggggacaacaggtctagccctaaacaactgcttgcctggctataagaggagccttgtccnnnnnnnnnnggtattctagattccagaagatgcagtatttttcctagggcaggagaaaaccctagttcatagacagccaggataaaaaccctggaataccatgagccagggtgaacgaagaggaatttcctaaatcttggggacagagaattatgttacttcaaggcagccatgccattaaaatggaaggctatgaaagcaagcaaggcacaaagaaacccccattccacagagagacacaagtgttctatttggtgaagagtttggtgcacagacagactgcatcctgtgaagagttggcccttgtcaaggctactgccgccaggaggatctttgcatctttaggatgtgtcactagctcatcgaaactatttctgtaactctctgcaagagccaatttaagctggcgtctcagttccctctgcactcaaaagagaccaatttccaattcctcctcagagtccgtgagaccagatgctacagcaaatgttccagagaaatgaacctagaaaatgatcccggggtgctccttgcgggggaacacaggactcctcagctctatctctgtggctttaacatacatcagtttcagggtgagtgctaccattgccccccgagagtgtttctgatgggacatgctttcctgatagcacaggggaccttgggggacanaaggttcccagtaaggctagggggcacgtgacaaattgagaagggggatcatgtttccagg

SEQ ID NO: 245742 - DNA, 1074 bp, Homo Sapiens
tagtgttctagaggatccctggcttcctacaagagcttgaattgcaaatgaaagcagcataccaggcacatggatagcaattttagaagtgaaaagtgctattgtattctctaatgttgtctttattctactgaatgaagacatttctataagagctctcataggctcatacctgactttggctattcaacctataattgccttaaattcttaaattcctcaatggtaaaagttcctaatattagaatttccactaattattgtagttgggaaggtagtcctttgatttatttcatctatttctctaactcattaaatgcctctgaatcctgacagaagatactatagtaacaatgtttgggacccagccttttatgggatgctaatgcttcacctttggaaggattttgagtggtttttcagtcctgttgaggcagaaggaagcttactctcaagcttctttcaagaggctgaaccaccagggagttgactactgcgaagcaggaaagaagcatacatcgcagaacccacagcctggacctatgaaacctaaactgtaatctagtacaacagtggcccagggaagataggaaatctatttgcattgtttacgtggtgcataggtcagaatttacaagcccgtgtttgagtctgagaatgtcctctcaataaggaatctcataagacactaaatgctccagcaggaacattatctacagctgaatgctcaattgggaagtgagacgtgtattataagactcttctttctgactgattcatggtatcttctgcctcaatcataatgacactgattaagtcacacagcagattggaggaacatgtgttcccattcagagaaagagatcattccatattttatcttattcactggacagcaacataaccagtattggtgactgttcgggataaagagaatatgaatgaagcgtactcacaaataaacccacgactctcatagttaaaatgtctactcctgcaaaatcatgataagtatcatataatagagacacagcaaatcagcaggtctctttctcatttctgatctgtttcttc

SEQ ID NO: 245743 - DNA, 462 bp, Homo Sapiens
ttaatccgtaccataacatcttggaactacttctagataaaataattgcacgccatgggttaccctgatatggagtatagtaagaaaagtagtctactctaagctcatgttatcacatattagtaaaagtggcttcaatggatagttgaatctgctatttacttctaaaacccttttgagagttaaataaggaccccaatagacattttaactgttatttatagatcaaaaaaaccacgtaaacactgaaaacttgcatttatcctgagcagaactgcttttacagaatccacaaatcctatgaaaacatggttacatttgttcacaatatgtggaagacattattccctataccccctttgtcccttttgtgaggacgtaaataaaaacctaccttagcaccagagaaattgtttctcttgaggaaatgatgaatagtattgtttctatttggtacggatt

SEQ ID NO: 245744 - DNA, 242 bp, Homo Sapiens
tcggtacccggcagatcataaaatgaattcttctttgtatctacacactccacattctttactgtgtcctactactgtatcttggctccctgctgtattaaacaccatcttaagcacttgttcctgcaggactccttcttgacattttgtctcccccttcaaagtcactcaaagagtgggacttcatcaaaagaaatgaattagtctctatcacaccgaatactaagatttatttcctctga

SEQ ID NO: 245745 - DNA, 483 bp, Homo Sapiens
ccgtaccactgggtggcgagttttcatagccttatactactatttaaaaatccagcaagcatggcactattcgtaattaccagggttttctcctgttatgacatgtttaattgtacttttaagacattatctttaagttgattacaaatttactagtgtagtggcaagctcatagttattttaagttaggaaaagggatattgcgtaaatgttaggatataattccttccaaaactaagacagaagcatgaattagcttattatgttatagcaaaaagaaggaaaaataccaacaaaaagtaataggatataaatgaaaaggaacaatttagatattgttgttggttcactaatattgttgaccaaatattgaatataactttgaagcaggcagcatgaaattgggcaaacactattgtagagattaaaggaattgggttacagtacaagggaaatgcatcatggtacggattagcgcggaga

SEQ ID NO: 245746 - DNA, 1038 bp, Homo Sapiens
  misc_feature (1028)..(1028): n is a, c, g, or t
ggggaaaaaggggatttataaacatcatttgtttgaagaacttggtacatattaggttctataatacaccgggctaagagtattctttctttaaatctgttctaagcaaatttagccaccgatgtttccagtttacagtacttggagattgcattcagtttgagtagagcacatcctttgtcctgtcattgcttatattgatccccaattcatctgcatgacttgcacgctttctcagcatggtctctagttcttttccacaaggtgatttaggtgacatcataaaatgagagggcttcagacagacctgtgttcctcacatttacatacctgcattgtctgctcctctcctctcttcagacatattgatacataggcttttggctattttcattttcttcaaaacagtaaagaactaaaggcaactttggcgattaaagccttgatttggttgaatgagaatttttactttgatgttcctgtatttgcatatatttattatttatcttcattaatgtgtttctattagtttgattacttaaagatttaatggacatgtgtgtaatggatcccaaagaatcaaatagtattttaaactactactatttaagtagaaactagtataaaactgtaaatactactttaagacattggctttttccagacatggatccaaaaaatttctgcatctactttgaaagtttgttatgtatggttgtatttacttttgttttatcttcttttggggggttggggtgattttgttctagatgtctcctggagtatgaagtcatctgaaggtataagtatttaactgtggttctctgaagtttcctggcatgctgtgaagcactgctgacagcttgggtttcttatcttttcacgaggaggttcttgtttctgttaacttagctgaccttaaagtgtagactttaggtccgtgttgcagttggtattaggaattttgacttccagaacctgctttttaagagacagaaaaacatcatttctaaatttatttgtgtctntgtggtacgg

SEQ ID NO: 245747 - DNA, 439 bp, Homo Sapiens
cgttaatccgtcccaggtactgctaaattatttacacaatttcaattacttttcacaaacagtactataccctattaagtgaagtttagagacaaagcaggataatcctcaagactagtaatttgcccaaggtgatgttggtagtcaataatgtagcctgagctctacgcaatgtcatactgattctaaaacccacgcttttaatcactatactaggctgagtttgtgaggaaggcaaggccagagaaaaaagagatagaaatgaagtatgtgaaaatttttgggaatatatccttatgatgttttagaaattgcaacaaagctttttaaagtcccttttggccaggcgtggtggccaatcttgagtcagtaagtaattctcccaagatctgttgattgcattatttacatcatccctgcctagtaccatatgttgata

SEQ ID NO: 245748 - DNA, 640 bp, Homo Sapiens
  misc_feature (230)..(239): n is a, c, g, or t
cgtaccactgcagtgcaataaagaaaagaaccatctttttaataaatggtgccaggcaatcgacatatccttggggaagagggccagggaagaatcttgacctttacctttagtaccatgcaaaaatataacaaattctagaaagattaaaatgtaaatctgaaaggaaagcaaacttctggaagataacataggagaatatcttcctgacccggaggaaaacaaagaannnnnnnnnnctgttttgagccagagtttcgctcttgtcacccaggctccagtgtgcccaggtgcagcacaggacatggtggtttgcccttcacacagcacagatgataaaccttggcagggtacatgtggtgccatctccaaagaagtacaaaatgcataaaccatgggggtatggctacccccacatagattttgaagaatgaagccaggcagagcctcaggctcaagactcaagcagtgggctatcgtaaggttggagccaacacagagagttgccactagggttatgcctagcaaaaccatggggcccctcctccaaaattcatatgttgccatactaattcccaatgttatagtattaggaggtagagtctctgggaggtgattaggcagaactctcgtggtcgtg

SEQ ID NO: 245749 - DNA, 526 bp, Homo Sapiens
  misc_feature (488)..(488): n is a, c, g, or t
gagtaatgctggccttagaatgagttaggaagtgtgccctcctatttttggaaaagtaggatttgaaggatcagtattgttctttaagtgtttggtagacttcaaagtgaagccatcatgtctaagattctttattgttgggagatttggattactaattcaatctcattactagttacaggtctactcaggttttctatttcttcatgctttagttttgctagattttgtgtttccaggaatttgtccattttgtctaggttatccaattcattgctgtataactgtccacagtatgctcttatagtcatttttatttatgtagaattggtagtaatgtccctgctttatttctgactttagtaatttgagtcttttctctttaattcttagtccatctagctaaaggtttgacagttttattgatcttttcaaagaaccaacttctgttttcattgattttctctattggttttctattatatatnctatctctgctcttatctttaatatttccttccttcta

SEQ ID NO: 245750 - DNA, 610 bp, Homo Sapiens
  misc_feature (81)..(81): n is a, c, g, or t
  misc_feature (146)..(146): n is a, c, g, or t
  misc_feature (154)..(154): n is a, c, g, or t
ttaatccgtaccatcgttcatcaagtggccccaaagtttggactatggggtcccgagtgggattaattctgatcttgcagnccaaagcctgaagatgatatcagcacagcgggggtcacatttgatgtgtttcctgggcagggacncctgttantgtagctaaatgccttacagctcccataaatcagcttccccatctgtttccttgatggcctttccaatgacttagtgacctcaacttttaggtctctgtccagcacacacatcttatttaaataaaaaacaatgatcatcaaggccctgcctgaaaaacacaatcctcaaaggccctgcccaactcctttctctttctaggtctgctatcctctctcaatcagggtagagccttaactgcacagatggtctggtccagagcctcaatgccaccagacagggtcctactgagcaaacaggagaggtagcaacaaatacccaaggtacagtcgccagcagggaaacacaagctccagagcccaggataaggggtggtcaagaaaagcacaacacagagcttgtctttcggccccaaagatggcaattactgcattgtaaaggcagcactgtctttagc

SEQ ID NO: 245751 - DNA, 1161 bp, Homo Sapiens
gtttctaaaaagactttctaaaggttacttggtgggaaaggactcggacgctcctcttttctacagagaagaaggaaacaaaaaatttcaggagaaagattacacaggagctgcagtgctgtactctaagggagtgtcacattcaaggcctaacactgaggacatgtcactgtgtcatgctaaccgctcggcagccctcttccacctgggtcagtatgagacgtgtcttaaagacattaacagagcacagacacatgggtatccagaaaggttgcaacccaagattatgttacgtaaagcagaatgtctggtggccctggggagactgcaggaggcaagccagaccatcagtgatcttgaaaggaacttcacagccacaccagccctagcagatgtcctccctcagactctgcagagaaacctccatcgtctgaaaatgaagatgcaagaaaaggacagtctcacagaaagcttcccagcagctctggccaaaacccttgaggatgcagcgctgagggaggagaatgaacaactttccaatgcctcatcatccatcggcttatgcgtagatcctttaaaaggtcgctgtctcgttgccacaaaagatattctcccaggagagctcctggtgcaggaggatgcttttgtgagtgttctcaacccaggagaactgccaccaccgcatcacggcctagacagcaaatgggacaccagagtcaccaaatgggggacctctattgtcaccgatgtttgaacgcacacttttggccacagttcccgtgtgacggatgcagttatgccaagtattgcagcccggagtgtttgcaagcaggcctgggagctctaccacaggacagaatgtcctctgggagggctgcttctcacactgggtgtcttttgccacattgccctgaggttgactcttttggtgggatttgaggatgttcgcaaaatcataacgaagctttgtgataagattagtaacaaggacatctgtttacctgaaagcaacaatcaggtcaagacacttaattatggcctaggggagagtgttgaaatgggccatgagctcttcaaattggcccagatctttttcaacggggttgcagtacccgaagccctgagcacaatacagaaagctgaggaggttctgtcgctgca

SEQ ID NO: 245752 - DNA, 373 bp, Homo Sapiens
  misc_feature (157)..(165): n is a, c, g, or t
ccaaacccatatgccatcaaaattttaatactagtctaggaaaatagaaaaaggtaacgaatcattaagaaacttatatctcagcaatgagaacacaaatatatcagtgggaaaattaaactcatgatcctttctcataaagtaagccaactgctgnnnnnnnnntctctaatgatgaactaaccaaactcaagcccatggtattgagtccacattgcagataacaagcccatctctaacagaatatatattcacatagtagggtgagaaaaacagaacaatcattatcctaaacaccaaacacgtaaaactaaatcctcccagaatgggaggtagagaggaatctgcatcaaatatgaatttagtcttactc

SEQ ID NO: 245753 - DNA, 430 bp, Homo Sapiens
ctaggaaggtctctcactcaaatgtctggtgccagctcatctgggcctttcttttgacgttttcaccattcatctgtttagtccaggcttccttaggtgttgctgggaacattccaaaagggggaaggtggaagctttaaggcctcctgaggccattgtacaatttcacttctaccacattctgttgtagattagtttaggcatgaactgaaatggaaaatttagcagaaatggatcctggattttctggtacccgtgtttcgtttaattactttgttgctttctctccctccctgagttcaattaagttgagaaaagtgttcattgttattactgatggattagactttatttgctcttcattgaatgtttcagttaatttacagactagtaaattatctgagtcatcaagttatgtacgtgtatgtgg

SEQ ID NO: 245754 - DNA, 328 bp, Homo Sapiens
tgtgcagaaagtattgaagatgcctggaagtcattgacagataaagtccaggaagctcgatcaaatgcccgcctaaagcagctctcatttgcaggtgttaacggtttgaggatgctggggattctccatgatgcagttgtgttcctcattgagcagctgtctggtgccaagcactgtcgaaattacaattccgtttccacagccagaggaggcctatgaaccccccttgaaccctcacggctcagccagggctgaagtccacctcaggaagtcagcatttgacatgtttaacttcctggcttctatacatcgcagcctcggacccaca

SEQ ID NO: 245755 - DNA, 386 bp, Homo Sapiens
aggagatcatctggtccttcatcagttttattatcttcacgtagtttagcttctagaaaagccattactgcttctgtgtcttttagaataagggttgtgtccatactagaatcaggatccaaagactcacttctttctcgtattctacttgcagatgttaatgctaaagaagaaggagtagaggaagtctgtttatttatatggggaataagttctatgggtatgtttgggctgggtttttctatagtgaagctcccttgtcgcactaatgacttggaggattccttcttgtctcctccctttggagtctgacttttcagaatttcctcagcttttcttctcttgctctcgctttgtgccacgatgatctctcgagtaccgagctc

SEQ ID NO: 245756 - DNA, 466 bp, Homo Sapiens
acgatctcggtactctttcagttttttaaggtacgatctcaaagctactctttaacctactatgaatgaataatgctgagttcataacatctttgtagatatatccacagttttccctcaggataagtgcctacaagtggaattactggactgaaaataatgcagtttgctaagactttgctatctgttcctgaatgctcctccaaaaaggttttgccagtttacatcctcatgaccagcgaatgagagtgttgcctattttcctgtgcccttgttactgcttaataatttttgaaaaaaatctaatttgacagacaaagtgctgggattataggtgtgagccactgcaccccgccaatccagcaagttttaacttggccaaaatccaccaatcttaaactttgtgcacccttcccgctctgaagaacagtgagccagccggccagggtgcgggtatctcctacct

SEQ ID NO: 245757 - DNA, 623 bp, Homo Sapiens
ggaataggatgcccacgctcgttgactccgtggtgaatacagcagttaggacatacacaccatcacctttgaaagtgcttgttttgggggagggaaggacatacgggtaactagaactacccagcgagtcgtccagaggagagtatctggtttgagtcaggaggctccctgtactggagtcgtcccactattcctcaagaaatcttagaaccagcttgtgaggaaaaacattttttaatgtaataaaaatatgccattattctttgaaatgccaaatgatataaatattttgcctaatacatatttattgtagatgaaatgcactcttctcgatgaggcctcgatttgaatcaatggggtgggccacaggaaatgtcagaggaaccagaactcagaactcttcctcctggacctttcttcccttcccttggaggtatccctttgaatcaggcctctctcttctcatcagtctgtagcttccccccttgtataacctgctttcctttttacatttattaaaagtggattttgtaaaagcatttcattgacacgcgacctatcacagacaatggaattcgtcagtggtggtaagactgaaatcctgatgcttttcacacttcttg

SEQ ID NO: 245758 - DNA, 461 bp, Homo Sapiens
  misc_feature (117)..(133): n is a, c, g, or t
gatgcctggaggatatccttccagttcagcatacaaacgccgccaataatacttggatggcattagatccacaccagtttctaagaaagccttttgtcttaagattgggagaggacnnnnnnnnnnnnnnnnnaataacagtagtaattctatttgattataaactttgtatgaattaagaaaattcttatgtgctattccttaagttgctatcatgaaaggtaaggtagaccgttgcattcagatctgccccatgggcgtcctttggttaaagaaaagatggattcctcatcgtcaaagctgtgaagtggggtgaagagtgactgcttgtgttgttacaattatgtggtacatgtcctcggctgtgatcccatctgcttcgtgatcccgcgccataggaatagttctcatgttacccgccatttaatggtgtaaagcctcgctcagcgaatcggcagtaa

SEQ ID NO: 245759 - DNA, 204 bp, Homo Sapiens
caagacttggattagattttgttgggagagagctgaggacttgttagtggactggatgttgaggccaggaaaggagaggaatcaaaggggactataaagtttttggcctgcgctgctgtatgaatagagccgccattaactgatataaaataaaattgaagagggaccagatttgttggctgtgtaagtctagtatgtgtgttc

SEQ ID NO: 245760 - DNA, 484 bp, Homo Sapiens
  misc_feature (460)..(460): n is a, c, g, or t
  misc_feature (470)..(470): n is a, c, g, or t
ccagataatcgtggatcatgtgttatttcatttattccttacagtcaccttattttatgcatgattgaaactgagagctcagggagagacgaggggggctgcatcccaagtctatggttgtttggatcatggatatgtctccagattaaataaaacttccaaatgatcgatgccctatctgctttattatttctgggatcctgagtacttttatgcttgtaaatatgtcctgctgtcgagcaggccacaccccaatctaagccagctgccaggagcctgagcatgcatgctcctgtagaatcaacagtctgaaaaccctcacctgagactaaacatgtgcttggcaatatcatcatgaagagaggtaaatgctggcaggctggtgataactatcatttctttccccagaggagaggtagttttggtctcttggagagatgacactgatagagagggaatntaatgttganaatgtctgaagagg

SEQ ID NO: 245761 - DNA, 619 bp, Homo Sapiens
gagcgctacgacgaacatggccgcggccatgaagaacgtgacagagctgaatgaggccactgtcgaatgaggaacgaaaccttctgtctgtggcctacaagaacgttgtgggggcacgccgctcttcctggagggtcactcagtagcattgagcagaagacatctgcagacggcaatgagaagaagattgagacggtccgtgcgtaccgggagaagatagagaaggagttggaggctgtatgccagggtgtgctgagcctgctggataactacctgatcaagaattgcagcgagacccagtacgagagcaaagtgttctacctgaagatgaaaggggactactaccgctacctggctgaagtggccaccggagagaaaagggcgacggtggcggagtcctctgagaaggcctacagcgaagcccacgagatcagcaaagagcacatgcagcccacccaccccatccgattagggctggctcttaactactccgtcttctactatgagatccagaacgccccagagcaagcgtgctacttggccaagaccgcgttcgacgacgccatcgccgagcttgacaccctcaacgaggactcctacaaggactccacgatgatct

SEQ ID NO: 245762 - DNA, 699 bp, Homo Sapiens
gaatgcgggtaatgggacacgtttcattgtcctgagaatcagtatgtacacccagaagagtaactcaagttctgattgtacttttacatatccatggatgtacaatgcattggtacactccagttgtgagcatatcctgctactaagacaagttaatttttgtcagaccatgccaaatatctggttcctccttcccatctatcactttcagggtttaaagaagaaaaagaacagaaacgttatgctcatacagaacaactttagattctaaaataactatgtaaggcatggctcagcatctttaagaacttcaaatcagtaaattcaaatggccacaaataatctaccattttaaagtgttatataaacttttttcctcctgcctttccttcttctcattgatggtgggttatttctctaaggtataccaacagataagcacgtattgggatataaaggctatatgaatacacagtattagacacttatttttaaaatgaaaaataatgtttctcacaaaatacttatttgctcagaattcagtcagctccgcttactctaaatgaaaggacccctattcatcgtgggtagatgtgaagcatggcccgttttgatttcaggtatggaaaactacaggactggctaaatccagcacatgttccctctctagggaagttgctaggcgctcgggatcctcta

SEQ ID NO: 245763 - DNA, 262 bp, Homo Sapiens
cgagcgcctagcacttcccaccccggaggaagacacaagtgtctgccacggcgatgactgcaatcacttggtcgaagggtgacttcaactcctcaggctgacagtgaaagggaggcaagccctctggggagttctgtggaaccaggcaccgaagaaaaaagtttaatcagtgataaaacagctgaatggattgcagaggatgatgatgacgtgtttgtggcttcacgcacaactgaagatttatttactgtgatacacaggt

SEQ ID NO: 245764 - DNA, 472 bp, Homo Sapiens
aaggaatatgagtttagatgaagatgtaaaaggcataacaagcagctttagtatggacatttcaagtgttatgtaccctctgggagtggtaaaaggagtctcactagtgagattcaggcagcggaattaatatagacccctgcatgtccctgctctttgattaacaactacggttcttggtctttgctttttctcattcatatgttgctcatagatttatttttataaaatgttcaatttacattacagatgcaataatagtaaagaatattcatatacgctttccgttttttctccatttgctttcgtggttcctctctgaaacccttattattctctttctgaatgtatactatatataatcatcttattatgctcttagagattaccattctggataattacaccatgtagattcaggttgtcttttattccaaatgtctcttggataactgtgtgttgggtccgactg

SEQ ID NO: 245765 - DNA, 461 bp, Homo Sapiens
  misc_feature (204)..(277): n is a, c, g, or t
gcagctatacagtgtatgaatataccaaaatttgtctgtctgattgttgaacatttgggtttatacgccgacttggggctatcataagtgatactaccataaactcttgtatatgtgttttggtccacgtgtgcatacatttctgaggatatatacctagaattgctgggtcatagtattacattaaacttcagtagataatannnnnnnnnnnnnnnnnnnnnnnnnnnnnnnnnnnnnnnnnnnnnnnnnnnnnnnnnnnnnnnnnnnnnnnnnntcttgcctatacgtgggatttctagtctttcacatctgagtccatttgcagagtgcgtagtaatgtttttgcttttcatcccccgattactgatgaaattagtaaggaaacaccttttcaaatattaattggatatttaggtagccttcagtgacatgcccttttaaatctagcccatttttct

SEQ ID NO: 245766 - DNA, 816 bp, Homo Sapiens
  misc_feature (743)..(743): n is a, c, g, or t
ggggcctgggccgcccgtcgtacctgatggtaggaggcagtagttccccgcttcccttccgcgggagggagagttagctagccatccaagaaaacaccatgaaagataacgatatcaagagactactgtatacccatcttttactgcatattttcaattatcctaagtgtcttcattccatcactcttcttggagaacttctcagtattggaaacacacttgacatggttgtgcatctgttctggttttgtaactgctgtcaatctagtactatatttagtagtgaaaccaaatacatcctctaaaagaagttcattatcacacaaggtaactggatttttgaaatgctgtatctactttcttatgtcttgtttctcctttcatgtaatttttgttctgtatggagcaccactgatagagttggcgttggaaacatttttatttgcagttattttgtctacttttactactgtgccttgcttatgtttgttaggaccaaacctcaaagcatggctaagagtgttcagtagaaatggagttacatccatatgggagaatagtctccagatcactacaatttctagctttgtaggagcatgccttggagcacttcctattccactggattgggaaagaccatggcagatgacagtagaaagaaacgtagcacttatagatctctccatgtaccctgcagggggcttggtactgggaaatgagtaacttaatcctgacaaccgtantgcaaagtatggcccatctccctgtacgcttggagcgaccctttggctaacggggctggccttggttatttcc

SEQ ID NO: 245767 - DNA, 346 bp, Homo Sapiens
tgcgatgacacgagatctagcagtgaaagtgccatactgtgcactcatgtgtaggagggtggaggtgagagtctgttctgtacagctttctgtagtgttgtcagaaagagtcacaagcccaagaattagtctaaactgtgttgttcagagcaggtgaccttagcagattcatagaaatagccctcaaacgacctggctgtgtggatgatgaaaagtacagcaggaaggaggatgtctttgtgaacgcatcatcctgtgagataaacgttctttacatacatgcccgtttgtttggccaggcaaactctatggagacgcagactacttggaatagctgctgtagttg

SEQ ID NO: 245768 - DNA, 357 bp, Homo Sapiens
ctgacgtcaacccaatcaacagagaggaccaacatccagtcctgctgactatctgacccccacaacaatgggtatccttaatagaggagctgcttgttgtttgttgacagcttggaaagggaagatcttatgccttttcttttccgttttcttctcagtcttttcagtttcatcatttgcacaaacttgtgagcatcagagggctgatggattccaaaccaggacactaccctgagatctgcacagtcagaaggacggcaggagtgtcctggctgtgaatgccaaagccattctccccctctttgggcagtgccatggatttccactgcttcttatggtggttgattggtataccag

SEQ ID NO: 245769 - DNA, 536 bp, Homo Sapiens
tttatagacagattggaacagacacaataaaactgaaatatcaaatgtctgttcttaaaaaggagtgaaaggagaactcaaggaaatatgaattgggtcaaattaactatgatctctgcagtattcatttgcgatcattagaaagcatcaagcgttcatcaggaaatatttatgctacaacattatttatggagacagtgtctgtctcttgacttcaaggtacatgaatgggagattaaatactgtttaccaaaacaatcgagttttaggtgatattgatcgcaggtcggctgcgtgaagaactgtatacttcgaaggtatattggcacatagagaatggtcaccaggaggtctgagccatgggtctgctttcctctttgcttcagttgtacatgaccagggctcatcccactccatttctgtcaggtagagtccttttccatccttagagaggttgcggaaggtctttgccatggcttcaagccgcatcaggaagcagaccaggctggggaagctgaccctgccgacgctgtcgc

SEQ ID NO: 245770 - DNA, 876 bp, Homo Sapiens
gttaggggcacattcctgatgaggtaagttaaatcacttttttccttgcctcatatgtctttacattacatactgatgtatgctaggcagctctggcacaagacacaggtaataatggggactgaagtttctttcatcaaatacgattgtggaaactacccaaattagatgcagataatgaatactgcaatctaagcaggcccagtggccattatgaaaactgatcattcctgaagtcaaaggaagcagtatgtggctataaattatcatgagggattcagaaaatactcaatgctgttcacttagcctgccctacctataattttaggttagaacagatactgtttgatcaataatgttttattccctaaaataagaaagtttaaatccaatttcatacagaggcctttggcctttattacatttaaattagtgtttaatatagaatatctatttaaacatgaaatatcccataggacttcaattacctgttgctaaattttccttcacccatctccttaccatgactcttaaagggctttgacgtatattggcaaaatcccagatgatatgccaaattctaagtatggatgctatgtaagattagaagtgcaaggactacttccttaattaaggaacaaagtacttctaaggagttgcaaagtatatggactaacttcataggtgtattcttgatttcatgccacacaacatatgataactttcgtctaccataacagctctctaggttagtctgacagagcacctgactttaagaaacagacaaatgaacaaccagtgaaacagacgtggggaaagatatgtacatattgatattacagttcaacatgctgttccacaatctgtcaataataa

SEQ ID NO: 245771 - DNA, 455 bp, Homo Sapiens
atgttatttgcttagaggatgatacagagaggctgtgtaggcttgatggggtgaggggatacgtagatgtcaaatggtccggcagttctccgtttctcatagcctcagtttcctcccagagacaatggatgtgaagattcctatctcgtgtacctttctgtacagtgcccgcactgcctgcattgagtaatgcttgcgttatttcattcctactacagttgcgtcccagcatgtagggcagtgcttgcacgttgcatctggtgcctgaccagatgtttgctgaagacaatgtgtgaccgcgtgctctagctcatgttctacctccataaatgccacttacgaatccatgatgtaagattaggctcgggcaccgtggatatccatttcttctaagccagattctgttcactgggatctcagcattgcattaatagcaaacatttacagagggcctg

SEQ ID NO: 245772 - DNA, 755 bp, Homo Sapiens
ccctcgtgctgcctcctgtgtgctgtccctcctctgtgctgtccggacagcaggaagtatgtaaatggctccacttaccagcgctggcagttcacactacctatgatgtcgactctctaccgcctggctaatcagctcctgacagacttggtggatgacaactacttctacctgtttgatttgaaggccttctttacgtccaaggcactcaatatggccattccctggaggccccaaatttgaacctcttgttccgagacatcaacctacaggatgaagactggcatgaattcactgatattaacaagattatcatccggcagcctatccgcactgagtacaagattgcttttccttacttgtaccacaatcttccacaccatgtccacctcacctggtaccatactcgcaatgttgtattcatcaaaagtgaggatcctgacttgccagctttctactttgaccctttgatcaacccaatctcccataggcactcagtcaaggtgaggaagggaagggatgctttccctcagctcttctaggagaaatgcgtgagattggctgatgttactaaacgctcaggtggagggagatgtgttttccgtcttgctaagtgttccccttgagtcaataagcgcaatatcgagaattcagcatctgctattaaaacatgtcagttggtataatcctgttttctcgtgattatccttttggactttacggtattttcctgggtgctgagacaatctgtcata

SEQ ID NO: 245773 - DNA, 496 bp, Homo Sapiens
agggcccacatcggccctgttctgtcattagctattagttctaatggagaacagtgttttagtggtggtattgatgcaaccatccagtggtggaatatgccgagtcccagtgtagatccatatgatacatatgagcctaatgttctagctggcactttagttggtcatacagatgcagtttggggtcttgcttatagtggcataaaaaaatcaattactgtcttgttcagcagatggcactgttaggttatggaatccacaagaaaaattgccatgtatttgcacttacaatggagataaaaagcatggaatacctacatcagttgactttataggctgtgatccagctcatatggtaacctctttcaacactggtagtgcagtaatttatgatttagaaacatcacagtcattggtgatactttcatgcacagggtagattctggtttacaatctaataatctatatcaacagagtagtaatgtcatcccacacc

SEQ ID NO: 245774 - DNA, 319 bp, Homo Sapiens
ttcaatgggtagaagatgaaagaaacacatttctcttcaacagacgaaggagcttttaaacacgttaagacctgcacaaatatggaacggaagtgccctggtaagagagtgagctcctcatcactagaggtaatcaagcagagaagctggatgagacccttggtgagaaggcctcagagggcagactgacagtgaagagtgggatagatgaactctgggctttcaggacttctgtttcaacaattccaaggttaagtttctgtacatgtaagcctcaatgtggtgttcaaaactgaatttcctttcatgtatactttta

SEQ ID NO: 245775 - DNA, 1113 bp, Homo Sapiens
  misc_feature (219)..(219): n is a, c, g, or t
  misc_feature (950)..(958): n is a, c, g, or t
aaaaaacaaactgcaaaatggtatttatttacattaaaacatgaattgcctgtatacacacaaatataagaggaacaatctgttatgcacaataactgtaatatttagtacatgttatacacagcagtatctgttaagtcagtggtttgagtgaaaacacagtaccaaaacattcctgatacaaaataagttactcattcacatattctaatcatacanggacacttaatattttaaaagttacatacttcaaataacactggctaaatgtacaactaaagtttattaattttttttatgaaaagacttcagattgttattcataaatgatccctttcaggatgcattatcttttaaataaataaactaaattgacttcaagactatttataaatagcccactaaaatatgattgaagacattccttcattttattaaaggtgtagctatatactagagaatatgctcaactactgcctccaaattccaacactgtcattttaatttgcaaataggaattatttaaattccaacttcaggacatgagatgagctgcctgccctattttgtcaattgtttccaaaagcattaacggattaagagactgtcttgaacatctcaaacatttgagaaattcaaggttttctttatgttttaagctgatcctatatatggagattttgagataaattggaacacttttagaagaccttcacaaagaatttttcaattctaaaatctattacagatttatataaagtccaagagaacatgtgaaatattttcataatgcagtgaaggattcatctttggcatttctccattcattctaaaataagatacttcaacaaacattttatacttttctatctacctactatacatattttctatacacaaaagtatttgattgaaatttgtgttttaacagcaatttcattgctaagaannnnnnnnnagatatgaaaaatattagtaacattcagctttttactatgagaagctgaagttttgatgttgttgaaatgaatttgctcagtttccttttttggtgaccagcatttcaacatcctatcgaattcagcaatggataaagcagagatactttacaat

SEQ ID NO: 245776 - DNA, 324 bp, Homo Sapiens
  misc_feature (304)..(304): n is a, c, g, or t
ataattaattttatctgctttcagacttgttctcacttacgaggttgctaagtagatttcctgtaatgtcagggacttcattttatcaggaaataaaaggaacaataataagacaagagaagaacatatttcacagctgcacatttttgacagtcctttcataaatattttccttttgtttggaaataattctaaaagaaaagatagctatacctcatttgagatacagatgttagctgatactaaggttagctgatactaatgagattaaaacctttcactcttggagataccaaaatccatngggatcctctagatcacctc

SEQ ID NO: 245777 - DNA, 620 bp, Homo Sapiens
ctgccactataagttgttagatggatcaaatgaaatgaggtaggaatgctttacatgctgcaaagctctttacaacgtgtgatgctattattatgcaattaatgtttggtatcgactcattgtagccataaagcagcaacaatgtaaatctttcataagactgatgcgaggcaaatgattagaagtctcttggataacacaacaaaaaaagagagtgactgaaaaagcacttttttatagttaccaccttacttaaggtttctagcatctcctctgtgccttccctctcttacctgggaagttaatgtgtaagagaatctatctttatctcctacctccctagttaatagggttaatttgctgagacgaggaaaaccctccaaagtccttttccacctgtaaaagtttctttggttgttggttttctgttgggttaaacaacagaagcagttggaggggtgtcaaatgaagcgagtagattcattttatctatgtaggtgcacagagcccaagaagtgtcaacagtacaataccttatcaaacaaaagacaaactgcaagaaaaaaggcaaggagtttgtaactttattactttccctaccagtacaggaagtgctaggg

SEQ ID NO: 245778 - DNA, 251 bp, Homo Sapiens
cttcctgtacaggtgacattgtgtaataatggatacaaagataaacaatgtgacttttacccttaatgtactgccataggaaataatttggtaagttacgatagttgctagtaagtttcatatgaacaaaggagtgataaggagactgaaagagaatatttctgggtgcacctaaggaggtaaagaactgggaaaggaaaatttcctggtaaaggtgcatttgcttgaagtaagaagtaatagggcgagtt

SEQ ID NO: 245779 - DNA, 665 bp, Homo Sapiens
caccctcgttccccataaaaaccaggagggaaaatttctattacactgaaatgttctgtccaacccaatttgcacattccctaatactgataaaataatgatgatgctttgtatttttattatattccacatctaaaacaatacggttacatcttgtcaggaaaacaataatagttacatcttgggctgcacttttttcttcctacagctcagaggatttactgtaccctaagtcttatgcagcatgatatcctggagagaacccgggatcaggcagaattcctaagctgtgctcccagatttcctgctttctagttctgtggcactgagtaagtcacaaactctgacacttaattgcctcatctatctacctacctctcagggtggaagtgaggaaattgggcctttttataaacggacttttctatgcaaaaaaaagtttactaatatcatactaatatatattaatatcaacatttaccaatatctggtgttttattattgtgtaaaattgtttttattgactcagtcatactcagctttttaaaagctgttaccaggtcccatatttcttcataaataccaaattagtacatgagtcattgcatttcataaggtgaaacctatcatatcactggatcgtgtacatactgaatcagtaatga

SEQ ID NO: 245780 - DNA, 477 bp, Homo Sapiens
tatcacactggattgtaacttgtgtacttgcttgctacctctaccagactgggaatttcttgaaggcagaacatatcgttttccttggtatccccagagcacagcacattgcctgatatggactgagtagacagacatattttagagaggaccacgtaattctatgtctaggaggtaaaaaatatcaaagaaggtgaaatgaaaaagcttaaataatatgaatctggtcagaggtcctaacttcatcatttatagcaataatctcaccaatacagctacactgttaattttctcagttatgtaaattggcatattatgtagtatcacctcaattacggaactctaaaaatcacaaatgtcttctctctgaaacactctatacattcataataaaccgtattatgtaacaaaatgctatatgtgacaaaagtactgaaagtgttatgtgttggctagctaagtgatataacataagtg

SEQ ID NO: 245781 - DNA, 713 bp, Homo Sapiens
  misc_feature (540)..(608): n is a, c, g, or t
  misc_feature (620)..(655): n is a, c, g, or t
gttacaattttatattttactttttcaagttcttttatgaaataccaaaggcagaaaactctgtgacatacaatgggaaatctccctctataagacatcttcccatttctctttaataatgagttcatagattctcctacctgttactcttatccaacacttttcccccagcttgtccacaggttatctacataagatgttaaatttttgctgataataagacttgtcctcagcatttattttatttgctaaagaaaggtggttaatttcctattgagcctctactggctgctagtggttaccacttcttatccaagagttgctttcagtgatacactggtaaccttttatcagaaggatctgtggaagcaaaggcccatatttgtagtatttgctaatttcccaggtgtaaatactcccactttgttgatttcaagctacctaggttatgcccctgaatggggagggagaagagatatgcaccatcgtctctacttagtcatactaattatttttactactactgtagtaacgaaaatnnnnnnnnnnnnnnnnnnnnnnnnnnnnnnnnnnnnnnnnnnnnnnnnnnnnnnnnnnnnnnnnnnnnnaccgtgtgaggnnnnnnnnnnnnnnnnnnnnnnnnnnnnnnnnnnnnttaaggaacttactgaaatgactgtgtggctccagagtccttgttcgccaagactgta

SEQ ID NO: 245782 - DNA, 555 bp, Homo Sapiens
ggcaacagggtcagctccatttcccctggctctgcaacgcttctcagtagttttggtgcctgggaccatatctgcaacatgagatacagagcctttcggcgaatgcaggtgtgggacgcctgctcagaggccctgataatgtttgataaggataatttagatgacatgggctatatcgtggagaatgatgtcatcatgcatgctctcactaagcagttggaggctgtgtctgaccgagtgacggttctctacaggagcaaagccattcgctatacctggccttgtccatttcctatggccgactccagcccttgggttcacattaccctaggtgaaggcagcaccttccagaccaaattgttggtagttgaagattcttattttgctaggggtcttgtatatctacatcttatcctagattctagggactctggttttagatttaagctatagtttaattttaggcaaaacttttggttatgaggaccagtacctattcaggccagctcaagtggagatggtctcatcgtaaatcctgtacaggaagtgctaggg

SEQ ID NO: 245783 - DNA, 604 bp, Homo Sapiens
gaaactgtgcacgcgctcacatacctctgacaggggtattgggccgatatgctgatgctgctcctgggaactgtgcattgcacgattgtttccacaagaacacccaaacctcctctaagtacagggggtaaaagaagaaggaaattaagaaaagcagcccatttggaagtacatagggaaggagatggttctagtaccacagataacacacaagagggagcagttcagaaccacggtacaagcacctctcgcagcgttggcactgtcttcagagatctctggcatgctgctttctttttatcaggatcaaagaaagcaaagagttcaattgataaatcaactgaaactgacaatggctatgtatcccttgatgggaagaagactgttaaaagcggtgaagatggaatacaaaaccatgaacctcagtgtgaaactattcgaccagaaagagacaggctggaacacaggaacactgaggaatggtcctagcaaagactaccaaaggacaataccacatgtctctgatgaagtctccagtgaggaaggcctgaaccaggatctcattagtcgtcatgtgacggattctgaggtgtctcgactagaa

SEQ ID NO: 245784 - DNA, 234 bp, Homo Sapiens
aattccataaacttgagtggcttaatcctggccattttaataggcatatctaataatgttggtatctcatcacggcttcaatttgcaattccccaatggctagtgctgttgaacatcttttcatttgcttattttccaacccctatattctcactagttgagtaattgtttcttattttagttcagatgtagaacattgccagcctagagtcaaggtaaggaaggttgctaggg

SEQ ID NO: 245785 - DNA, 398 bp, Homo Sapiens
actgttaattctaaggctcctttagatgatgttatgttgtcaagctctgtaacagggtttccttccctatcatagccaaaccaacgtggagggtcattagtgttgtattcctgctgctgaactttagatgacattctttgagctgccttcctgtaataacagtgtttagcattagctagttgcagaagtaacccctagtgcaaaattttcaaactcaaccaaatttggagttagggaattcactgtcacaatctgaattcacatgagacctctcttgccttgctgagagtgaggatatgggtaagtgtacaaataaacagggtcccaaagcctcagtaactctgattcagccagttcagaaattaacagatacagtgaatgggtaaggaagttgctat

SEQ ID NO: 245786 - DNA, 468 bp, Homo Sapiens
gagggagaaaatgctccctccattttactttctagggttgcaaagggatgacaccatccacaccagaactgcatgaatggcatcaggaatgatcagagaccataaattccagtgagaccaataacaccatttctggtcctgcatgctcttccaaactttgccactaaccccttcaagaggtacagtctatgttccctttctcgttgaaattgggtaggcctttgggactcccttgataaacagaatacaacagaaatgacactgtgtatctaacaaggctaggttagaaaagggcaacagaacttcatcctaatctctctcaagatgtcccccatggaatccagccatcatgctgtgaggaatccaagcagctacacagaaaggccacaactagatattccagctgtagtcgcgcaggggttcacagctcacgacgaacgatacaaaccacgacccgtgcacaaggat

SEQ ID NO: 245787 - DNA, 329 bp, Homo Sapiens
attttaaaaaataagctttactataaataataaaatgaaaagatataggacctatccttgaaaattcaggatttatattggctatatatagtgagtatatatctcataagagagtgtttctcaaagtgttgtctctggaccagcagcatcacctgggagcttgttagaaatgcaaattatcagcagggaaacccaccctacctcactctcaactcagaaactctgggagaggggcccagcatctgtgtttaataagccctctggagcatgctcaagtttgagaaccactgccctaatatttgaaatgcccctccctaatagtttatgct

SEQ ID NO: 245788 - DNA, 525 bp, Homo Sapiens
ctgtacaccaaatcccattgacacacatttttcccatataataaacctgcacatgtacccgctgaacctaaataaatgttggaaggaaataaagttacacccaactcttgtactattgtgaggaaacaatcatatgtgttgacaaaaaatcagctactattagatttataatagtatatatgtagcagaaaaatatcagatataacttatatactcaaaagtatgacttaaaaacagcatgacaatctttatgatgggatattgtgcaactactagaagcacattttcagagattatttattaacatatgataatgactacattgagtggtttttagaagcatgaattgagaccatgtataagcatgactttattgcacttatatataacattacacaaacatttacataattataaaataagtatgctcatgttcataatatgtatttctttatattcatatgtaaggccaataggaagtaatctctgtatctgagttattatttcataaatagtttatgctgt

SEQ ID NO: 245789 - DNA, 194 bp, Homo Sapiens
agcataaactattacagcataaactattacagcataaactattgctccatatctttatcaacattagtactgttaattcttgaataatgttacctcatttggttctaatttgcattttaccaatatactaagaagactgaacacctttcacatgttttcccagccaggtggattcctggggatcactctagagt

SEQ ID NO: 245790 - DNA, 335 bp, Homo Sapiens
agaggagaaacaagagactgagaatgaggaagcctcagtgattgaaaccgactccacagttcctggagctgattctattcctgatcctgaactaagtggagaatctttgacggcagagtagtaaatgcttccacgtgccttcaactggatatttatagtcttactggtgtcagttattgctttttcggtggcacttactttttttgcccctctaagggtatgcttgtgtatcatttgaattcagattgcctagctatttgaacatctcaaagtatatatactgggtattaaaattaaaagcaagttatatcagtgaagtaagatcctctagtcga

SEQ ID NO: 245791 - DNA, 395 bp, Homo Sapiens
tcgactctagaggatctaaaatatgttcagagcattctgtgaatgagcatgaggatggtgatggtgatgatgatgagggggatgacgaggaatggaagccaacaaaattagttaaggtgtccaggaagaacatccaagggtgttcctgcaagggctggtgtggaaacaagcagtgtgggtgcaggaagcaaaagtcagactgtggtgtggactgttgctgtgaccccacaaagtgtcggaaccgccagcaaggcaaggatagcttgggcactgttgaacggacccaggattccgaaggctccttcaaactggaggatcctaccgaggtgaccccaggattgagcttctttaatcccgtctgtgccacccccaatagcaagatcctctagagtcga

SEQ ID NO: 245792 - DNA, 579 bp, Homo Sapiens
gtcatgcggtgattcacccatgaacactgtgtacttcggcgcccccggtgcctacaactggaaaggaaacagctacatgattcagcgcaaggagtgggacttatctgagtatagttacaaggacccagaggaccaaggaaacctctatattgggtacacgatgcaggtaggcagcttcatcctgcaccccaaaaacatcaccattgtgacaggtgccccacggcagcgacatatgggcgcggtgttcttgctgagccaaggaggcaggcggagacctgcggaggaggcaggtgctggagggctcgcaggttggggcgccctaattttggcagccgccattgcccctggcagacctgaacaatgatgggtggcaggaccctcctggtgggcgccccctactacttcgagaggaaagaggaagtagggggtgccatctatgtcttcatgaaccaggcgggaacctccttccgtgttcacccctcactccttcttcatggccccaggtggctctgcctttggtttatctgtggccagcattggtgacatcaaccaggatggatcccaggcctctagagtcga

SEQ ID NO: 245793 - DNA, 427 bp, Homo Sapiens
tcgactctagaggatcttgagcaaggaatggcatggtcagaatgaacacttaataaactcatgttagctcatgagatagagactgaattgggagggggacaaaaattgataatctagggtaaactaaaggatgctgcaaatgagatgatgaaacacttcacttggactagtgtgatggcaagaggagatggagaaaaagtaaatgggttctcaagtttagaggtggaaaaacctccaatacacatgattggatatgggggaatgagggaaagggaaatggatgttaaaggaagattgccaggtttctaactttgaaagctgctggatgagtggtacagccaattactgaaatgggaagacttaaggacaaaagatgtttgtagaaagctcgtgaggctgtttcccaatatgtgaaatctccctgaaa

SEQ ID NO: 245794 - DNA, 556 bp, Homo Sapiens
tcgactctagaggatcaattagcatagaaggggctttcccaacagtttaactttccctctcatgcgatttacctacttgaaccagggctctttcctacactcctcttcacattcccgacttacacgcagagggaaagagaattcataaagggaatatttttctgcctttgaagatattctcacaagatcgttctccacgcccaaggcaagtaaaacgacacaatctggctcaactccaggctcgaaccctacacattcaacgaggctatctcagacacgctgtggcacacgccacggggagccagagaacgtgtggtgggggtggcgaaggtaatgccttggggaaagcagcacatctagaggtggagaagccagaaaacgagagggaaggcgtccaggaagattacggaggggagatcgcggcccccagagcgatcagagttgtctgtcacaaggccgcgagaacgggggtagggagtgggggatcggggagagaaaaaaagtatgcctatgtattccgagcggagggcagcaagaggcctctcctcaagggaaa

SEQ ID NO: 245795 - DNA, 714 bp, Homo Sapiens
ttggaaatccttccctgtgtatgttgttatccacaagtctaccacgtggaaacttgcaaagatgtatgggtagaactaacccattctgacctctcaattgaggcctttaaatgtcttctgtgcattatgcacttaaacttggaagggcttgggggccttgaaggcagggaagcctttgtcctctgcccaggtgacgggagccacctcctctgccgcaggactgacagctccttcagtttcatggcattcttctttaccttcatggctcagttggtcatcagcatcatccaggccgtgggcatcccaggctggggcgtctgcggctggattgctaccatcaccttcttcggaacgaacattggctcggcggtggtgatgctaattcccactgtcatgttcacagtgatggccgtcttttccttcatcgcccttagcatggttcataaattttaccggggaagtggggggagtttcagcaatgttgcaggaggagatggaacacaggggcctggaagaatccaaatgtgcagcaggcagcccagaacgcagccatgggggcagcccagggtgccatgaatcagcctcagactcagtattccgccaccccgaattacacgtactccaatgagagtgtgaaccagccaacgcttaccaggtggcacgagtctggggccattggcacagggggctcaagcaatagtaacttgtggtacc

SEQ ID NO: 245796 - DNA, 414 bp, Homo Sapiens
aacgaacattggctcggcggtggtgatgctaattcccactgtcatgttcacagtgatggccgtcttttccttcatcgccctcagcatggttcataaattttaccggggaagtggggggagtttcagcaattttcgggaggacgtgtaccaccacggggcctggaagaataccacatgtgacagcaggcgagcccagaatcgccagccatagggcggcagcccagggtgccatgaatcagcctcagactcagtattccgccacccccaattacacgtactccaatgaggctgtgaaccacgccacagcctaaccaggtgtacagagcaggggccattggcaccagggggctcaagccacatcgtcatgcgagctaccagctcgcatgcctggggtaccgagctcaagtaaatatg

SEQ ID NO: 245797 - DNA, 735 bp, Homo Sapiens
agtgcattctagccttggcaagcggaatttaagtttctaattttatacttttcattgtggtctggtcagattttagtctgcttcaaaatcaaaaggtcactcagtcactctaatatgatcattttgaatatggaaatttgttatttacatgctgtacctcaaatcaaagaaaaagcacgcgtcaatatcacgcgtaggaaaaactagaaaattgttccttttccattttgccaccctgctcagttttcctcataaacggttccagcttggaaaacaagagcttcccctctcagacagatgcagcagcgggaggaagggctttggtcttaaactagaagctgcagctgaaactctccccgtctaatcctgctgtgtgtatggctcacaccatctttcctgagtggggaaaaccgctggcactgaatagctgaaaggctcgctgaaatctgtgcttcaagaacgagttaaagacaatacaataaaacacatagacactgaaggggttcaactaatgtccatcacttattctgctaatgtcagtgcctttcaataaacttctcaacatctgtgttggtaaacttctcaatatttgttctagcccaaccacggtgacaaagctcccttgcccaaagatcgtgagcctagacaaaggtggataagaaatatgaagtctaaagctatagaatatagcagttagtgaagtaaattaaactgccccatagcgttgcatgccta

SEQ ID NO: 245798 - DNA, 554 bp, Homo Sapiens
gagtgatgcgatggtcaggctgaatatggaaatacataaagaggagaagttgaaggtgtcatgggtacagggagtgggtactattgcaggctgtggaagttctgagtagtttaggaggtccccaagcaaaatgagtaagggaggatcagggtcagtgcttcagtagaaggtttccctttggaaaccacggtgcctcctgagtgaatgggaggactttggaaaaagctggccacagctacattggtggtacttcagagaaaagtctcacctggtatgtaggatgttgggttagttttttctcttcatcttttgtgggaaaccgcagactctcatgaatggaaggccctgtctgtttttagatttcaggctccagtgtgagttgtaaggatcctaggatatttcttgtgaagagcaaaaattgcccagtgaagtattgattcctttatggttcctggccctgttcacagatccacttttctcgccactagtcccagagaattgggatcaacccagctgcatgcctgggtacaggctcgattgtaatcatgtaactt

SEQ ID NO: 245799 - DNA, 680 bp, Homo Sapiens
catgccagcttgtaatagttttgccttctggaaatctagggccaacggtttgcacaggcagctgccttgctcaaatgcaggagacttgagttcctttctcaccagaatgttctttttgcagattctgccggggccacccacagtgtgtggctaaccctgatagctgtcctgtgtcccagcgggagtgtgtgttattcctgactcaagggcagggcagagacctactgcctagacctgagcccaggtctgggctgctatctagtacaagcagatggtgagaggcagagagagcacagggcagctagagagagtgctagaggaaaggagggtgagggcatgcttcttctttgataggttttctgaagactggggaaacagcattttggctgtgatctgaccccacagtggtaaatgttttgactccttctgctacatttagaacactgactacttctgtatgtgcacaacggtgttccaggtcctttagacgcactaatttacccctcacagtcaccctatgcaagagtgctatattttccccactacacagatgggggaagtgaagcacaggaagctaaataacttacctagggagtagcagatatgggacttgaacctacgtactctctggctccaaagcccttgtatctagccatcacattatgttgccttctttatga

SEQ ID NO: 245800 - DNA, 590 bp, Homo Sapiens
  misc_feature (233)..(249): n is a, c, g, or t
tatttctttcctctgaagattaaaaagaacaaaaaaatagttgaggagactagttcttgaatgaatggtagctgggttgcactcgataatttcatctaatgtctaattttaattttaatgtaattgccttattatgtcctattcagtccaagtcatttcacagtcactccaatcactttaaaacttagtttccttatcttctttcagtgccccaattaaaacccctggacccnnnnnnnnnnnnnnnnnttatgatgtatccaatatggtctttgtctattccaaaaaccagagcttgtggagaatataatctatagctactgacgctccaccaaggacaccatgaattctccaatccacacacaacacagcacatggtgctcatcaggctggccctcacagattcccacggtaaagacccacggatgtccagaaccatccagctctattactcggacagagacctgcctgaaactgcctggcaggccctttcccctctctggggactgttctttccccaacgccaacaggcaaacgctgccatgtattaataactgcttagtccgggacggccacaaatgaccagtcca

SEQ ID NO: 245801 - DNA, 430 bp, Homo Sapiens
aagaggcaaaatgccgtgcctcatttgtatgaagtcaccggaccaacgaaagcattagccttccagttccaggtgcaagggcagatttagcacccgaagttcccctggaacttcagatgcaatgagggcgaacacatcatccgcaacattgtggagaaaaccaggcttcctgtgaatgtgactgtgccaagaccatccaccgagaaacccatacgacctccacttcatccgtgaggggcaccgctataagtttgtgaacatccagaccaagacggtggtggtttgctgtgtgctgcggaacaacaagatcctccccatgcactttcctttgcacttgactgtccccaagttcagcctcccagaacacctggtgaagggagagagctggcccgaaaccctggtccatcactggctaggtatctgccaagct

SEQ ID NO: 245802 - DNA, 169 bp, Homo Sapiens
agtgtggtcgcggcgaggctacatgatccaagcgtagtcttatgtttcttttatccaacaatatctaggcatctgagcactttgaaccaaaatttcaattgtatactgtgatttttatcttgttgcaatatgttaaatttcataggtacctgcccgggcggccgctcga

SEQ ID NO: 245803 - DNA, 511 bp, Homo Sapiens
  misc_feature (200)..(277): n is a, c, g, or t
agacagtgccatgtaagatgacagcaacagggacccagcccaaacccaaccatcacaaggggtgtctgagacatggaggattccagataatgaggtctgggttggggggttcctggaagatggcccagacacaggaagagacacaagctcatacccccgcctgcatggatattcatatgtaaatgcatttttaaaactgnnnnnnnnnnnnnnnnnnnnnnnnnnnnnnnnnnnnnnnnnnnnnnnnnnnnnnnnnnnnnnnnnnnnnnnnnnnnnnaagcatattcacacagcatattcacactaagcgtattcacagcgtattcacactaagcatattcacaccgagcatattcacaccgagcatattcacactaagcgtattcacactaagcattttcacactgagcatattcacacaaagcatattcacacaaagcatattcacaccgagcatattacaagcatattcacaccaagcatattcacaccgagcatattcacaccaagc

SEQ ID NO: 245804 - DNA, 379 bp, Homo Sapiens
gacttcagaggtagggatgctcctccatctgacttcaggggccggggcacttatgatttagattttagaggccgggatggatcccatgcagattttaggggaagggatttatcagatttggattttagggccagagaacagtcccgttctgattttaggaatagagatgtatctgatttggactttagagacaaagacggaacacaagtagactttagaggccgaggttcaggtactactgatctagactttagggacagggatacgccacattcagatttcagaggtagacaccgatctaggactgatcaggattttaggggcagagagatgggatcttgtatggaatttaaagatagggattacagaagatgagagc

SEQ ID NO: 245805 - DNA, 143 bp, Homo Sapiens
tctcatcttctatcccttcttaacgaaaatttttgtttctattgatgggagaagccctaaagaaaatctcccagaaagagtaattagatcattttatgaattaaacttaatttaagcagtgcttaacctttgaggaaattggc

SEQ ID NO: 245806 - DNA, 906 bp, Homo Sapiens
  misc_feature (842)..(842): n is a, c, g, or t
gtcgtcatcttctgaagtcctcaagatcgaagtgggtatcaccccaaaaggattagatggaccgcgtacctaatcaataaagaaatgctttctctacgagacattgcttgttgatgttcattaagcaattagtgatgaaggattctggagtaaaggaagatgaattacaggccattcttaattacctactgactatgcatgaggatgacaatctaatggatgtcctacagctgcttgttgcattaatgtcagaacaccctaactctatgattcctgcttttgaccaaaggaatgggttacgtgttatctacaaacttctggcatcgaaaagtgaaggaatcagggtacaagctcttaaggcaatgggttattttttaaaacatctggccccaaagaggaaagcagaagtcatgcttggacatggattgttttcattgctagctgaaaggctcatgcttcagacaaatttaatcacaatgaccacatataatgtgctgtttgagattcttatagaacagattggtactcaggtgatacataaacagcatccagatcctgattcttcagtgaagatacaaaaccctcagatactaaaagtaattgcgaccctacttcgaaattctccccagtgcccagagagcatggaggttcgcagagcctttctttctgacatgattaaactttttaataacagtagagaaaacaggaggagcttgctacaatgctctgtgtggcaagaatggatgctttctctctgctattttaatccgaagaattcagatgagcaaaagataacagaaatggtatacgccatattcagaatcctgctttaccatgcagtncaatatgagtggggtggctggcgtgtatgggtagaaactttatcaatcactcattcaaggtcct

SEQ ID NO: 245807 - DNA, 665 bp, Homo Sapiens
gggtatatggtcctgcagctatccaaagagccttctgcccgtctgctgaagcatgtagtgaagatgttacctgcgactttcagataaccccagaggcacgtgaagcactcagacagtgcccccctgaccagctgaaagacacaaccttcgcccaggtgctaaaagatgacaccaccacgaaacgctggcttgcacaactggtgaagaacctgcaagagggccaggtcaccgatccccggggtatccccctgccccctcagtgatccttccctgttccctcccactactcccccaagttggggaaaggagggggaacctacgagaaaaacagctcaggttttatcaccgactgggaatagacaacctcaatgctgaaccgcactggagaaaaggggcaaggtacccctgctgaggtgtatgggctgccatctcaggctgtcttgaggacctgggctccctctgctactcccaggaaatgggctcctgacacagcagtctgccaccacagccccaggagggtgtcaacaccagcaaatgctgtatttgcagcatgtccaagatgacccttctcccctacctctacctagccactggcagggaggggagacagtggtgatagcagcagcactctaggcatggtgaacgcctgggaccaagcttgacat

SEQ ID NO: 245808 - DNA, 356 bp, Homo Sapiens
gagaagatctaaggaagaaaaaatagttcaataatgaatataatgagtttgaaatacctagtagacatccatgtgatgatgccaagaagatagttgcactaaacaagtatggagctaaaagatcctaaatggagatggaagtttgagagtcatcagtttacagattaaattcaccaaccatgagatcgactaagagaaagagtatgatagagaggtctacagatcttctaaggcactacaatactgtaaaagaaatgaggaaatacacaagcaaatgaaattatgaccaacacatcagtatcataaatatttttcattatttagtagaccctccttatctgcagaggacacatatc

SEQ ID NO: 245809 - DNA, 329 bp, Homo Sapiens
tgcacgcttgagaaaatacatggaaataaaagttgaagaatctcttacgatgcctgcagtttttcatactgttgcttcaaggacacagcttgcattggaaatgtatgaagttgccaagaaactttgttctttttgtgaaggtcttgtacatgatgaacatcatcaacaccaaggctgggctgcaatcatggccaacctggaggactgttcaaattcataccaaaagctacttttcaagtttgaaagtatttattcaaattatctgcagtccatagaagacatcaagttaaaacttactcatttaggaactgcagtttcagtaatggcca

SEQ ID NO: 245810 - DNA, 275 bp, Homo Sapiens
aggcatgcagcttgggacttcgtgaggaatatgaaagcttgagaaagctgagagaagaaaagttacaagaggaaaaaccctctgaagatcaaatccacaagctgttaccagaggatacagaaacagggaaaaggaaaatggatgaacagaaaaaaagagatgaaccattagtactgaaaacaaatctggaacgttgtcctgcacgtctctcagattcagaggatgaagaacctttctcgaggccagatgacacagacacatcgctgcatttgttt

SEQ ID NO: 245811 - DNA, 469 bp, Homo Sapiens
tcagcttggattaaaatcagaccacctgtctcttgagcctgtgttctcagccatgtctgtatgtaatgatgttttactaatttggacaaatgacagtccccaccctaccattatacagcaggagtggagttcatgagttcaattagtttgttgatggcaagtaaagatgctacattatctggttgtatctagatgttttatctcccagaccactgagcagccacagttcccaaaggagtagcaattggtctgggagagagggttaagaagagagaggaaaaattaatttctctttctcctacattgtttctctgagtcccaggacatgattggttaagtgccaacaggagtcatgatgactcacaatgcagctgagaaccctgttaccatttgcaatgacaagaactaaacactagccactaccaccagggttactcctggttcagggctgaatacagtgagtaagtgg

SEQ ID NO: 245812 - DNA, 183 bp, Homo Sapiens
cagggcattgcaagctggggctatgacacagtatttatcatcattggcaaatgaatgtctttccttcatccccttttaatatctgataattatttgtagatttggcttttttaagaatttctactcttttccttttcctagatcttgtggagaattttgatgaggcttccaagattgcatgcc

SEQ ID NO: 245813 - DNA, 703 bp, Homo Sapiens
  misc_feature (28)..(28): n is a, c, g, or t
  misc_feature (32)..(32): n is a, c, g, or t
  misc_feature (54)..(54): n is a, c, g, or t
  misc_feature (71)..(71): n is a, c, g, or t
  misc_feature (79)..(79): n is a, c, g, or t
  misc_feature (84)..(84): n is a, c, g, or t
  misc_feature (92)..(92): n is a, c, g, or t
  misc_feature (96)..(104): n is a, c, g, or t
  misc_feature (108)..(108): n is a, c, g, or t
  misc_feature (116)..(116): n is a, c, g, or t
  misc_feature (118)..(118): n is a, c, g, or t
  misc_feature (134)..(134): n is a, c, g, or t
  misc_feature (150)..(150): n is a, c, g, or t
  misc_feature (180)..(180): n is a, c, g, or t
  misc_feature (184)..(184): n is a, c, g, or t
  misc_feature (204)..(204): n is a, c, g, or t
  misc_feature (206)..(206): n is a, c, g, or t
  misc_feature (209)..(209): n is a, c, g, or t
  misc_feature (222)..(222): n is a, c, g, or t
gcaaggtgggcaagaaaggttttccccngctngaaaaaggggcaaagttaagcncaaccccaattaaatgngaaggtangctcnccttcatnaagnnnnnnnnnaggnttttaacncntttaaggttccggggnttggtattgttggtgnggaaatttgtaacgggaataccaattttcnaccnaaggaaaacaagcttatggncnatnatttacgaatttngaggctcgggaccccaccttcggtttaagtgctcccttggacttcaaattaattaattcgaaattttcttgaagccaatgaaactaggttaccctttcaaaataccttgggccgggttgctggcactaaattcctttatattctcttaagatagaagtgcactttttaagtttagcaacaaattttctgctcgaaatgaccagcatgagcccagattatccaaaccccatgttcgagcatcctctgtcagaatgcgaatttcaggaatataccattgattctgattggcgtttccgaagtactgttctcactccgatgtttgtggagacccaggcctcccagggcactctccagacccgtacccaggaagggtccctctcagctcgctggccagtggcagggcagataagggccacccagcagcagcatgacttcacactgacacagactgcagatggaagaagctcatttgattggctga

SEQ ID NO: 245814 - DNA, 758 bp, Homo Sapiens
ggcagacaggttttacataatctgagtatgtggtgtgcacgaagtaaagcattaacctatgaccaggccaaagctgattctcacagagccaaaaaggatatcaaaatgggcccatttgatgttgcccggaaagtgtttgcagctggagaggagactgctcacatgtcacttgtggacaagtcagatctcttttttcatgattattcaatagcacccctcttcgtccaggaaaattacatacgcgtgaagcctgtagcagcagggggtgacatgaaaaagcacctgatgcttttaagcagagcagcagacagcatatgcgatggtgacctagtggacagccagatccggagtaagcaaaactggagtcttctgcctgcgcaggccatttatgccagtgttcttcctggagagttgatgagggggtacatgacccagtttcccaccttcccaagctggctggggaagcactcgtctacaggcaaacatgatcgtattgttcaggacctggccttgcatatgagtctcagaacttactccagcaaaaggactgtaaacatggattatctgtcgcttctaagggatgcacttgtacagcccttgacctcacaaggagtagacggagtacaggatgttgttgcacttatggacacatattatttgatgaaagaagactttgagaatatcatggaaatcagcagctggggtggcaaacctagtcccttttcaaagctggatcccagccagctgcatgcctggta

SEQ ID NO: 245815 - DNA, 471 bp, Homo Sapiens
aggcaggcgccatctcctcctccccagctcctcccctagggcacagataccgatagtcaagctccatctcctcctcaccagctcctcccctagtgcacagatacgcatagcaaggctccatctcctcggccccagctccatccctagtgcacagatacccatagcaaggctccatctcctcagcaccagctctaccccaagtacacagatagccaaaggcaatcttcacctccccagctcctcccctagtgcacaagatacactataggcagggtccatctcctcctccccagctcctctcctagtgcacagatacctataggcaggcttcatctcctcctccccagctcctcccctagtgcacagatatctataggcaggctccatctcctcctccccagctcctcccactagtgcacagataccatataggcaggcttcatctcactcctccccaagcattgatgcact

SEQ ID NO: 245816 - DNA, 722 bp, Homo Sapiens
ctccccagtttccaaaaacaaaaatggaactacaaaccaaaactgtaagcccaaaagctgcataataaagaatgacagttcttttaaatgcattcttgaatatacaggaaagataggaaaatcttgtttccaaaaacaaaaatggaactaccgaccaaaactgtaagcccttgaacctatgctgtattgccctggagcagagtgaggagtgtagagatgggttatttcaggtgttctcttcctagcaggttgagttttaccatatgcaaaaaggaatcggaactaagatttctgcataaggttgagatttttgatgtgctgcactctaggtgaaagggtgggctagaaaaagaaaatcttccctattacacaaggagacgacaagaaatcttgtcttgatttgcttgagctctatgcaaagagaaaatgaaaaaagtttgcctgagaaattgaagcacaagatctatactttgcttacatttgggaactgggtttatattatatggctcagaaattaatatacaaacaggcttcaagctagtgaaacaggaaaagactctgagaggtacgtccataccttagacctcaagggattcttacagaagaaataagcccaactgaagatgaatttatgattaaaaatgacacatgaggaaatggctttgtaccacaaacgagagtcagcagatagaacaagcaggaggattatagctccagaactc

SEQ ID NO: 245817 - DNA, 590 bp, Homo Sapiens
  misc_feature (134)..(153): n is a, c, g, or t
ccccttgttttttcgccctctaaaagaaacctttttaggcccccgtgggggcttctcctctttttccccacaaaggggtttttggccccctttaaccttttttaaggggaacctttttgggaaagggggagggnnnnnnnnnnnnnnnnnnnnttaggaaacccccaggatccaaaaaatttcagtttccaccatgtaaggccagggtccccagaaggattgcccattaacccttgggaaaaataagagatgggaaattattctacatgctaaatccaacatgccaccagttggtatggaggtaactgaagataaggactggggtcaagctcatatttcattctatatggaagggattcagcctgctcttcaatacagcttttactctgatgtataaaaacatctgttctcaaatgaacacctctttctcttttcttgtacagcacaacagatcattgctacagctctagtcctaggctggaaagtctaggtggcccgtgaattgatttcaccttcgctgtccttcgagtttttaaatgcaaagtgaagttgtttaaatatacacatgtgttccctgacattctctagtc

SEQ ID NO: 245818 - DNA, 551 bp, Homo Sapiens
gtctcatttgaatccaatattgtccagctgctgacttatgactttgcaagctgctctctctaaagtaatcaatgaccttctgctacttttcaaatccagtggcaccacttgacccttggaggcatgtgaaagggcaacagcacctctcttcttgctctcctaggtggaccctattggttttctccctagaatcatctaccctttgtcattggtttctctttctcagtttcctttgccagattctcctcatcctcttatttccaaaggttccaggtgctccagagctcattctccattaatacttactccctaggtgattcatctcatctagttctctgtttttaaatggcaatttgatcctgatgcctctccaatttctattgccagcctccacctctcatcggaactccagactccaacttcttctgcaacatcttcacttggctatctaacaggtgttccaaacttaacatggtcaaaatcttgatttgctctctcaggttcatcctctccacctgagcaaatggcatcctgaccttagagattctttt

SEQ ID NO: 245819 - DNA, 468 bp, Homo Sapiens
tctctccaggaaggcagtaggattttcttcctttccctgtgttatagtggacatcattgaataattcaaagtcttcttcctagttttccttagtccttctagcatgcaagttagcaaatgtctgcggcaccaatctccatcttctgattttgcgtcccaatgagggtctacactgggaactgcctgctggcctgtggggaatcattctctttcctctgttgtcatcctatcattgaactgactgagacgccagagatcaccaaactctcgggctgcagctatggcggcacttctctcatttggggttagtgcctgatttagcagtaacattatatctctccatgtcagatcaaaggattgtcctaacccttgtaatacatcaatatagccattcaaggttatgctgagaattcacctaaggtctaattcttaatttgcatcaagctctgagaggggatggaagataga

SEQ ID NO: 245820 - DNA, 624 bp, Homo Sapiens
atccccacttagctcctgtttgttgttctttatggtttctccttcttgcttcatgtttctagcatgctctattttttcgagaatatgtaatatgcttatagctaaattttattctgactattccaataattttgctttacctgctccatgttgttcggtttgttacttttctcttatagtgactacactccagacaggaaatgcagatgttcccctctgaattcatactccccagggagaccaggcacatcagctacaaaggaacactgcaggaacaaggggctacagcctagcatcacctagcttttgtatctctactgatgagtagggtagagagtcatggggatacaactctgggagtaagcatttcagtattacaatcgtctaagtttaccctgatacttacctttctgaattctcacttccttggttacaataattcagccctagggatgggagggaacaagtgaactttcaagaaccaagcaatccaactatatccactgttagttattcctcacaggagctgtagaaatggagaggaattcaatatattgggggtaaattttggagagagtacttagaagacttggtgatagaactgatgtgatacagaagaggaga

SEQ ID NO: 245821 - DNA, 424 bp, Homo Sapiens
gtgtgagccactgggcccggcccagttttaaaaatagatttaagaagattcagattttgtatctcttcctatgtcattttggcaagttgcattttttccaggaattggtttctttcttatacaccttcaaacttactggcataaagtttataataccctttttatttcacattgtgaaacaaaaatatgcatacaaagtagtacataatccagatattcatagtttaacgttgtagtagaaacacccatctcttcacaactggatcagtaaatagaacattactggtctccagtcacaaactgcctctgctacttcctagtcacaactcttattccctccttgactcacttagtaactggtcaacattgtgagattcatccatgtcatttaccagtagttgtaatcattttttaaattggttta

SEQ ID NO: 245822 - DNA, 443 bp, Homo Sapiens
  misc_feature (140)..(252): n is a, c, g, or t
gacaggatggtgtgatgagtagagatttacagaaggcagttttccctcagaaaggaggaggggagtagatggaggacagtcctctgggaatggtgagagctgggtagaggaagtgggttttgaacgataagtttgaagannnnnnnnnnnnnnnnnnnnnnnnnnnnnnnnnnnnnnnnnnnnnnnnnnnnnnnnnnnnnnnnnnnnnnnnnnnnnnnnnnnnnnnnnnnnnnnnnnnnnnnnnnnnnnnnntaggtgtgtggttttcaggttactctggaaaaaggatgaacattgggaaagatggaggagagagtgagtattgtgtagaggactgtaggtaggcttgcttcttttatacattcgttcaatttatccagcatttatgggccatcttccctgggcagattttatgcaagacctggggattcgagaagatgaga

SEQ ID NO: 245823 - DNA, 360 bp, Homo Sapiens
tctgtgccgggccctgcgatttgcagcctccaatccatgtggccacattcagcgctcactctatgagggtttttgtttgggtttcttaacacagcttgacagggcatcacacccaatagttcagacgctcatctgtcaacacattgtccctggcaatgtcaagagtctgctgaagcagcctattccagagccaaaaggaggtcggcttatccaggttgaaggctactggattgcggtgggagacaaggagcctacaatagatgagacgtacattctgcacatcttctgtgaagctgaacctgagagatatagtccgagttgtctctgcaggaacctatccagtgcgatcagaagatgaga

SEQ ID NO: 245824 - DNA, 391 bp, Homo Sapiens
agtggaagctgtttcgtcagctcataaaaacgtgagagagtgtaaatttttataataaatcattttgctgagcaaacaatatgtgcggttattacagactttggaaaataaatgattttagaccaatgtcaggctgcagatactgatgtggttagttgagccttcagcatgaagagaatgaaaaatctttggaatactgttgacactcacaccatgaaaccacatgccatttaattcattactgcgcttccaagattacatttacagttgtggtattaacccctgggcatttttgtattacttattgcagacagtttgtcaggcaggattaattcagtggggggaggaggcagcaggtttggagagaaagtggatgattaagacttgggtg

SEQ ID NO: 245825 - DNA, 415 bp, Homo Sapiens
ctagcagtggacctttaggctggttgtttaactcaccaggaaaaatgacaggactcacttccctagcccatcaggttttgtgatggttgaaagggggttaccacacataaacatatgaaaaagcacttggcaaataatcttctttcagtaagtgttagagatgctgctgttacattactggcctacacagtgctgagaaaaaaatatgtcttttcgtctatacttagtggcagcaaagagttgcatggtaattaattcatgggagaagtgaggctgaatgcaggacttggattgagggcagaaacaatggaaggcataggtcggttaccaaagccaggcctgggcttgcaggaaacagcagagatctgagttacttggtgcttatccgtgggttgacacaaaaagaatatttctg

SEQ ID NO: 245826 - DNA, 624 bp, Homo Sapiens
acgatgacggaggtgcagaaaacttcccagcacctccaccttatcctggagaatcccagacagatctgcaaccccccgcaggtgcacaggcgctgcagccttctgaggaaggaatagagacagatgaggctgtatctggcatcctggaaactgaggctgctacagaatcttctaggcctccagtcaatgctcctgacccctcagccggcccaacagataccaaggaagccagaggaaatagcagtgaaacctcacactcagtgccagaagccaaagggtctaaagaagtggaagtcactcttgttcggaaagacaaagggcgccagaaaacaacccgatcacgccgcaagcgaaacacaaacaagaaagtggtggctcctgtagagagccatgtccctgaatccgaccaagctcaaggtgagagtcctgctgcaaatgaggggacaacagtacagcaccccgaagccccacaggaagaaaagcagagtgagaaaccccattccactcctcctcagtcatgtacttctgacctaagcaagattccctccacagagaattcgtcccaagaaatcagtgttgaggaaaggactccaaccaaagcatctgtgcccccagaccttcccc

SEQ ID NO: 245827 - DNA, 737 bp, Homo Sapiens
cgtggtaaagatgaggaggtgaggggagcttatttctatgctcaagatggctatgggggataaacagtaggagcttgtgagtggacacaaaggaaaagactgttccagtgacgaggaggagcaggaattgcagagataagcaggaaaaaataaatgaatgaaatcatggacactaaacaacctattatgtttccctcaccactattgacattacttgtcaaaaaaaatgtattgctctctaaagaatatgagctctggttgttttgaagttgaaatgatcagtagtcataaaacccactccaaatcaaacactacccatcgtcttggtggcttagctttttgaatcatgctaagttctcatcaacgtcacatgctaataggcaagactggtgacccaagacaagcagctgaaaagacaaagacacaacccagagtacttctacacaatgccacccctctatgttttggagggttcatcgtcctaaacaatacttcctttctttccataaaaattcagacacacaataaccataattaagtaacctgctttccctcaacccaatcagctctgctctaatcaccattttcttattttgaaagaatatcattatttcacatgctgctttatttttaattagaagatggatgtgatttcacatctgagttggatatacttctgtttaacattaagggtgatggtgaggggctgtgatgatgtcgtagcgctggcctggtat

SEQ ID NO: 245828 - DNA, 713 bp, Homo Sapiens
ttttcctaagtgtaccctagtgacactgacagactatcttgtgaataagcaatggtgaaatgcacagacctttttattggttggacgtttgctcaggggattctaggaaaaccaatcatttcactgctgcaatcggtggatgcatttataaggagctcacggattggttgagtaatagaacctcttagaggagacctgtccagtcaagtgaggaaattatacacctaaatcagagccccaccccttcccctcttgctgcatgctatggtcactgtctgtggctgccaggagccattatacttcgcatctctacatgtgtgaggatctctctgttggtcaatgactgggtgggcattgcccatcctgtttcttccctttcctcttgcccctctgtctcctctgtgcttggtctctctgctttctccttaagtggtagccctaggtgaccactgacagaactatcttgtggaataagcaatggtgaaatgcacagacctttttattggttggacgtttgctcaggggattctaggaaaaccaatcatttcactgctgcaatcggtggatgcatttataaggagctcacggattggttgagtaatagtacctcttagaggagacctgtcctgtcaactgaggaaattatacacctgaatcagagcccaccccttctcctcttgctgcatgttatagtcactcttctgggtgcacag

SEQ ID NO: 245829 - DNA, 528 bp, Homo Sapiens
tgggaaatagcatatagcctttcccctacttatgggtagactgtttcttacaggaatttggtatatctttccaaagagaattctgtatctgtatttttaaagcataaatcctgtcaactttggaggagaactgatttggcttgagttttctcagacatgggaacttttgacctaagtttgtattttacattgttgaaagggaactccgggatcccagaaaacatatggactgcaattgggtaaagcttctgttccagaaatgcctcttctggacatttcatacaaatggaaacatgcagcatgtagtaatttatgacagcttctttcacttagcatgaggttttcaaagttcattgatgtggtagcatttgtcagtactctgtgcctttttatggctgaataatattttatcatatggatttaccacattttatcattttatttatccatcatcagttgattgacatttgagttgcttctactttttgagtattatcaataattctgttatgaacattcttgtacaat

SEQ ID NO: 245830 - DNA, 292 bp, Homo Sapiens
tccaggatcctctccttatctcactttacaatctctccatcactcgtcttattggctcttgagtcaattattatctgcataaagatttgtgccaaattatattctccagtccagacctcttcactgagctataaattctgtttctgtctcctcttgaatgtttcagaagcacttgaaattcagcatatctaaaagggaactcatcatcttcaattctggtctgtttcagtgtttcctctctcagtgaatagtatccagttgtataagttacaaatcttaaagtcattcttca

SEQ ID NO: 245831 - DNA, 274 bp, Homo Sapiens
ttgaggccccaagctcccaacaagatacttttaaagttttgtcagaaaagagccactttcaagctgcactgacaccctggtcctgacttccctggaggagaagtattcctgttgctgtcttcagtctcacagagaagctcctgctacttccccagctctcagtagtttagtacaataatctctatttgagaagttctcagaataactacctcctcacttgggctgtctgaccagagaatgcacctcttgttactccctgtggtaacttttctga

SEQ ID NO: 245832 - DNA, 499 bp, Homo Sapiens
  misc_feature (81)..(204): n is a, c, g, or t
atagcagctccacctcctgggtgcaagtgattctcctgacctcagcctcctgagtagctgggatttcaggtgcatgccacnnnnnnnnnnnnnnnnnnnnnnnnnnnnnnnnnnnnnnnnnnnnnnnnnnnnnnnnnnnnnnnnnnnnnnnnnnnnnnnnnnnnnnnnnnnnnnnnnnnnnnnnnnnnnnnnnnnnnnnnnnnnatgagccaccacgtccggcccatttaactgctataatactttcctgttggtggttttaccagtgcaaactgagcagcttaaaacaccaaccagttattatctgttttcatgagccaagggtctgggcagggtttaactgggtcttctattcagggtcacaatacggcaaccagagtgtcagttggagctggggtctcattggatgctcagtgtcttcttccaagcttattcagtctgtgaactgaattcaattacttacaattgttgactgaaggccctcaactcctagagctgc

SEQ ID NO: 245833 - DNA, 486 bp, Homo Sapiens
aagggtggagccaagtgcatgtctgtcagagtccactgctatccatcctttccctgcctgccttcctcctacaaggtgctggatcccccagaggatcagcagccgagaggcttctgcgaaagaatgtgctccttcagggccgacttgcatttgtgtctttttttcttggagatttctgtaaaacagcagccgttagcagttatgtgattactgtgtttagaatttgagaagaaagggaaaaccttgtttgccatggaatacatatctgtgttgataagtcttccttattttgaataatggagaattctctgtgtcttagccagctaagagctacttacttttatcatgttgtgttataatgataaaagttactcttcggtgacctaactgcttcacttaatgagttttgattttgtttttagcaggatgcatttcctctccttcaggtataagttctgttggggtcattatgaaatatggacactg

SEQ ID NO: 245834 - DNA, 618 bp, Homo Sapiens
cgtaatcattaggaggtgcatgcctggcccttctgctatttgaaatatgcaatacattattgttaactctagattatgctatcatgcgttagaacacgagaaatttatctatctaactagtagctttgtacttgtggaccaatctctgcctatttctctttcctctgtcctccccagagttctcgtacccctattctattctctacttctgtgagaacagcctttcagattccacatgtggatgaaatcgtgagatatttgtcttactatgcatggcctatttcacttaatgtcttccaggtttatccgtgttgccacaaaagacaggattttattctttttgtggctgaatagtattctatcatgtctccataccacattttcttcatccattcgtctttctgtggacatttaggttgatttcatatcttgcgattgtgagtagtgccacaataaacatagttcagatatctttttcacatgctgatttcatttcctttgggtgtatatccagtagtgggattgctagatcatatggtagttctatttttaattttttgagaaacctccatactgttttcagtaatgactgtactaattaacattcccacctcctta

SEQ ID NO: 245835 - DNA, 683 bp, Homo Sapiens
gaataagataatcggaagtgatactaagcatgtagaaatgatagctacctgtttaatgatgagcttttgttacctccaaggaccccaagaagggacatcctgtaagcagaccattcatacttgattgttaaaggaaaacaaaattccattttgtctttttcatcaacacaagtatagctggctaataaaagtgtaatattcatgagagaaaaagaaaagaacacgcacacacatacactcaacaggattcctagagtcattcccatggataagagggaaggaaaggttgagggcaaagagagaagggaaggaaacagactatgatgggatatcttagggcaaaagaatagggggctgatttggaaggcagcaaacttcatggatacttgatttatttaatgtccctgtcactctggcgtatcttaatgtgtgtggtgtgtgatttatttagtcacttgatccaaattctctaattaagtggagctcagaagatatagtgtccattgtggtcaagggcacaggttttggcttcaacagacaaataagctctctgagcatctgtcttctcatctgtacaatgggaatatcagttcctacctcttcaggttgttgtattcataaataaaattgtgtacaagaaacattaggattgcttcttaccacgtagtaatgggatcaacaaa

SEQ ID NO: 245836 - DNA, 481 bp, Homo Sapiens
catatataagaggtggatatgtagcagtggaaaatacactctcattcgtttccagaacgttacgtgtccagaacatagtggagatgtttgtttctaataccgattgaaagtgctttcctaccaattcccaggcatttcaaggaacaagtattttaagctaagttacttttggcacagaaaccgttaaactttgcaaatcccagcaatatctaggggagaggagaatgtggtacgcaggaaacgtcaacagtattgataattctgagcttcatgtacttcccatattttctttcatatagatcgatataataaaaaagaaaaactaacaaatgcattaccgttgatgttgttattataccagttcttaacagcctaagtttaatcaccactttttccggcaccagagaaatcctgacttgcacaagataaattgggtatacacaagaccaatactattgcaagtcgcgagcacctcttatac

SEQ ID NO: 245837 - DNA, 580 bp, Homo Sapiens
cgtttatctttaaggagctgacccggatccattgagctcctggtttgtgcttcagatccctcagccattggattgctgagtgtctgggctcactggtatgattagtagtctcctgagatgggtatgtatagtagatagtagattgttaggactcacaggtcaccccactcagccttttacttatttattacagtcttgcacatctctagtgataagcagctcatttccatccaaggtagctcatcctttatttgggtagctctgactcttggaatttgctttttacagtgaagagagatcaagtctcctgctgcagttccattccatcgttttgtcttagctcagccactgggcaccacagatcatgtctgtttcctttgtcctgtgacacccttcaaagacttgtaggtgacccggatccattgagctccaggtttgtgcctcagatccctcagccattggattgctgagtgtctgggctcactggaatgattagagtctcctgagatggatgaatagagaagagagtgttaggactcacaggtcaccccactcaaccttttactatttatacagtctt

SEQ ID NO: 245838 - DNA, 397 bp, Homo Sapiens
ttcaatttctacactaggctctcctgaaaaaggctcctttagggtaagatgatcacatctgtcttcttgggtaactggcccaggcctgagtgtcatttttttccctctctttgagccagtagcgtggagttttcctttaccaatgtgtatattaagggggtgaaaagactccaaggaaggtagggtgattccctgagagatggccacatcaacaccttctagaattggtacatttgtgttctgggtgagcattccagagctcagagatgtatcctccataccaagctgatttcctgcatcctgcaaggactgtacttcgaagccagctactctgccatgacttggatcccaggatagtgacaccgaactcaagtcctaacctgggtgtagaaattga

SEQ ID NO: 245839 - DNA, 425 bp, Homo Sapiens
gctacattaggaggtggaaaccattggagggttttttagtcacataatctggcctgtacttttaagaagattactctagctgctgcatggtaggcactagactgagaaggagaatgacagtcctctgtttctaaaactttgtttttaatgtaactaattcatgaatatcttcctgttggaaagctttcatattatatgggaaacgccaaactctccctgccattcagttctgttctttttcatgtcttgtcctggatatttataccttaaataattatctataaaaatagtttaagttgtgtggggtttatttaaaatttatcatctcatatatattcagctccttggtgtttttcatttacaaatatgtattggacagctttttaactccatagtgtttgattgtacatacactattatttata

SEQ ID NO: 245840 - DNA, 423 bp, Homo Sapiens
atgaaacattatgatttgatatgcagaaagatttgcgagagctatgtcaagctattataacattttaaaatagacctactaggcttctgataatatatgttcataccaagtcccagaggtagagccatacttcaagtgccttaatgggaaggtactattgggtacttaatggtctctactggctttttctctgtcattttgcataggactgtggttatccctgggactttgcttgcctgcctctttgctgagtccacattcatcatagtgtctccaaagccctttaaagatgattctcttgcttcactgtggatgggctttagtagtgctcctgtggagatcttaaaactcctacagtattgcttctctcctcatccttcactgttgggagactctttaatttacttcacacctccataatag

SEQ ID NO: 245841 - DNA, 223 bp, Homo Sapiens
tacgaggtgcatgtcagccttaggaggcttagaatttttccagatgagggtttaagaaatgaagctccgtttttctggtgagaaaattcctaaaattagatctagttttcacaaaactcctcttaacagaacagaatctctaagatgtgtgttctgaactaaatagctcatcttgcccttcattattgcagccctagcagcactccacctcctatgataaacg

SEQ ID NO: 245842 - DNA, 356 bp, Homo Sapiens
caagcctggggtctaaatgattctccatctgtatcaatggaatatttcttttgtgctggtgtttctcagtcttcacgactacttcccggagggaaggaggatagtaagggtgtccccattcactgggaaaaaggggtgttctgagaggtcacaccactctccaggaggcccacagctaggaataaatagcagggccacctccgctttcaaccaggagggaccagagggagccaggaggaaaaacagtgccaccttgacagccttccacagcatctccagcttagaggatgtgctaaccggtggggattgcttccttgaccctgccctgcagctatgccagggcttctgactcccag

SEQ ID NO: 245843 - DNA, 497 bp, Homo Sapiens
agaggatccgtgacactcaggagacttaggtaatcaatacttctctcagaagtatgagaccatcctctgcactctgctctgtcatcaaaggctgctgggtggagatacccttattgaaaggtggccttggtgagaggtatggagccaagtcttctaggttgcttgcccacatcactctatctctggcctctgattctcaacttcgtacctgtgtggctcctctagtatagtgcaatgttgactgtcgaaaaagcagcagtatgcttacaggtttgcttagttcggggacaccgctaccaccagaatggctgctctgacaatatgcctagggactttctcatggcttttatttaataaggaggctgggcaccctataaagcctcatgcattcacaccttttgcagcatggtttatgcctcagtgttatgtgcactggaatgttttccacttcacatttccaagtagaaatattagtgttacggagtgcctatatcccg

SEQ ID NO: 245844 - DNA, 299 bp, Homo Sapiens
tagatcccccatacacagtaggtaagcggaatacctactgtgcgggattattcaacaagccgattgatcacattcttcagctctagcagtgcaaaggcttcactgaaaaagaacattacaaattttttttgaaagaaatttgggggaatccactgaagacctacatttcccggaaggttaacagcccccttctcagttttcctgctgctcctatcagtgacaaatcagcgtattagaacatgcatgctggctgatcattctgatcaagtcaacaagcttcacaacttactctgtatggg

SEQ ID NO: 245845 - DNA, 296 bp, Homo Sapiens
cccatacagagtatgttcagtttttaaacaaatagtgaaattattttccaaagtgcctgcatcagtacaaaagaaatatagaaaggttacctccctttatatcctttgaccctccttcatctgtaacataatgccttaaatatttccaatatatatactgaaaaccaaatcagtgctataattcttgcttcaaccatcatacaatttagaaaattcaaaaggaggggaaagtctattgtgtttacccatattttactctttttattgttcttctaccctacgtgtatggggatctt

SEQ ID NO: 245846 - DNA, 319 bp, Homo Sapiens
  misc_feature (92)..(106): n is a, c, g, or t
atcgctctagaggatcctcctgtaatccaagcagtcgacttgtgaaaaaatattcaaatatggaccacatagggttgtatttgccaaacacnnnnnnnnnnnnnnnaacatcaggcaatcagtcagtctacatcgctatctttaacacagagtagctaaattatcaatgtgcctcaaaaagcagtgccaaggaggcagcagtggtgaaatagagccccccgcatgtggcagagttgggtcagaccacctcccagggtctctgcacagtcatagttccacatacgactgcttggattacaaggaggggatcctctaagtg

SEQ ID NO: 245847 - DNA, 325 bp, Homo Sapiens
tctagaggatccctccttttattcaagcagtcgccatgtaaatccctgaataaccatacttcacagtcttaatatttttaatcgagttacccggattctctatgtgtacttatttgtaaagcccaacaacctagccttccctccccacacacaattatttaactgctttaaaactttcgctgcattgtctctatgtaaaacaaaacactcagattcattcttttgaaaattcagttgtgacaaaattgtttcgaaaggattacattctgggaaataaataaaaacactttgagaaactgttcctcgactgcttggattacaagga

SEQ ID NO: 245848 - DNA, 270 bp, Homo Sapiens
tagaggatcctgaaaagtgcactcttctatatctacacctccaagacactacagcttctcactgacctctccatttggtacagtagcgtaagggaagctagtgaagcttagtgcggtacagttcatgttgaagcaatcacacgagcgagcactttttcatttttgggtattaacaatcagtccaacctgacagacatgcggtgtcggactaccttctacacagcacttgggcgtctcctcatggtaagattatagaagagtgcacttttg

SEQ ID NO: 245849 - DNA, 482 bp, Homo Sapiens
ccaaaaagtgcactcttctatatctacttccaaagagtcacatgttcctttgcataacaagattaaaactgaacacctaaactcacaaaaaggcgaggtgatcagatgtactggggcctccgaacccctcgcacacaccaacgtgccaaccgtagggactgtttgcagagccggagcactcaaacctctattctctaaaggaagagaatgctctttccttttcagtaccagcaaaagttcattttcaaagcatctgaattcctaagtttcctttttgcaccatcgacaccagccatccctcttgcccgggctccttggtcttggaaggccatcgtccatctgatggggtggtagatatagaagagtgcacttttgaaaagtgcactcttctatatctacttgatacccaactcatctctcatttatttccggcttcttttattccaggcattatgtagtgttacattttccctttctttttc

SEQ ID NO: 245850 - DNA, 309 bp, Homo Sapiens
gaccatgactacgcatttcacctctgttactccctaacgtgcactcttctatatctacctagatttttaaaagaacaattttaatgcagccagtatatttacacaagaaaacgaaacaagtgcagtcacttagcctaaatgggaaaggacttttaccacgcttcaggcagttgactttcccctctgggtccctgcaagtccaagaggaggaaagcagccctcagggaggttctgagctcccctaggaagaatgatgcatctagcccagtcggcatctggtattaattaacctactgtactatacgctcg

SEQ ID NO: 245851 - DNA, 301 bp, Homo Sapiens
caaaagtgcacttttgaaaagtgcactcttctatatctacactgaactgagacggaagcataaatatgaggcacctgatgaaaacacggaacaattccacaccagccaaaaatgctctcaggcccacaaggcagcaagagggtgtttatggaccacatctggggattctgaggcataacttgaggttgctattgtctccttaattttgtggtttatgtactattctggcctttccaatatcacatccgcctagtgccctgagcagagaagaaagttgttagccttggagatatagaagagt

SEQ ID NO: 245852 - DNA, 363 bp, Homo Sapiens
caaaagtgcactcttctatatctacccaagaataaaggtgaaataaatacagactcacacaagagaaatcaagagcgttcttcctcaggagacatgagctgattggtatagaagaggtgtttgaaacgtccttagagggagggctagagacacagggaggagaaaccttcagaacacaccttccattgagggccaaaaaagtcaactatcgattctttgaaagtgccccaaactcgtaaatctctggtgatgctgaccaaaaaaacaatgaaggaagcaccctgcgatggggaaggaaaaggggagattgctggagatctgtagatatagaagagtgcacttttgggtatcctctagggtcac

SEQ ID NO: 245853 - DNA, 378 bp, Homo Sapiens
ctgactagccaggaccttaaagtgcactcttctatatctactagtgggctactttacttaccatggtcaggtatcaagccagttcctggcctcaaaagaagaagaactttatttccaccagcctgaatgagctcaattgctcgagtatgtgtgattccttgtgtaggttccccattgatttcaacaatctggtcaccaacctagacagagaacattcacaggaacaacatgaaactatgcatcctttgtaaattctgcttttgtcagctcttgagccattcaaccttgctaagtgattctttcgtttgtaaaatacctaacgtgtacccagtactgccatgtgagagtagatatagaagagtgcacttttggggtacc

SEQ ID NO: 245854 - DNA, 404 bp, Homo Sapiens
caaaagtgcactcttctatatctactgtcacatccctagttgtaatgtccccactgtttctcacctgaactactataaacaaacagcctcctaaatgctctctccatacctacccctgaccctctgatccattttctacaacacagtagtgaacattgaaaagcagattaagaaaaggaagggaatctagtcatttccagtccctctcccgatcactgactatgttctagtgacaacagccttcttttggctcctcaaatgcaccgagctcctttacacatggtcagatgctcccactaactggaatactgttaacactacctcttcatctaagaacttctagacacatttctggtctttgactcaaagtagatatagaagagtgcactttttgagtcctggag

SEQ ID NO: 245855 - DNA, 318 bp, Homo Sapiens
caaaagtgcactcttctatatctaccaacatagcgtattaggaagtaagaaacgatgaataattaaaacaggaaaagatactaataagtgctagaggtaggcgggtcaccatgttaaaaccttactcgaaagatgacatcgaaccatacacttgaaagaggtagagaacttttccatggggatgtaagtgggaagagcgttccaggcacagagaacagccagtattgaggcctaaagtggttgtctacaagggcagtatggtgagtggtacagagagagtagatatagaagagtgcactttaagggatccgctaggtc

SEQ ID NO: 245856 - DNA, 269 bp, Homo Sapiens
ctctgaggatccccaaaagtgcactcttctatatctaccatcccaaattactctgattgaatgtttttactgggatctgtttctgggagagactaagagagtgactaactttggatagattctgaatgttagagcaagcagcaagactcactgaaaggtgggatgtgcaattcttgacaaagaaaataagtaggattgactctaagatttttgctttgagacaaatggtcgtagatatagaagagtgcacttttgaggtcctctagagc

SEQ ID NO: 245857 - DNA, 263 bp, Homo Sapiens
actcagaggatcctaaaagtgcactcttctatattacgatctgtaacatggaggagctggaaaaaggtgcgccaaagtcctgatctttcccgtggtacagcagttcacagaggcctttgttcaggccctccagataccagatgggcccacatctgacagtgggtttaagatggaggtcctaaaggcagtgacagccctagtgaaaaacttcccaaagcacatggtgttctccatgcagcagattctgcctattgtttggaaca

SEQ ID NO: 245858 - DNA, 546 bp, Homo Sapiens
  misc_feature (15)..(15): n is a, c, g, or t
cccaaatctctcatngcgcaaggcatattatgtaatatttaaaagcaatgtagaataatacatacatataaaactatatttgacttattaagtcaatcccaataaataaaatcccaaacaactggttgtccgcaatgagagatttaaatctctcattgcgcaaggaaaatattgccaccatttgtagaccacgtaaccttcaagtatgtgctacttttttgtccctgtatctaactcaaatcaggaactgtattttttttaatgatttgcttttgaaacttgaagtcttgaaaacagtgtgatgcaattactgctgttctagcccccaaagagttttctgtgcaaaatcttgagaatcaatcaataaagaaagatggaaggaagggagaaattggaatgttttaactgcagccctcagaactttagtaacagcacaacaaattaaaaacaaaaacaactcatgccacagtatgtcgtcttcatgtgtcttgcaatgaactgtttcagtagccaatcctctttcttagtatatgaaaggacagggat

SEQ ID NO: 245859 - DNA, 350 bp, Homo Sapiens
cccgtcatcggcgtaatcacacaagtatatagttcctaaaaatgaactacgggtcccacaacatggatgaatctcacaaacaatgctgagccaaggaagcaagacacaaaaaatagtgtgcagccaagcatggtggctcactccgtgtaattcccagcactgttgggagcacaaggcgggacaatcacttgaggtcaggagttcaagaccagtctaacctacgtggtaaaatcccgactctactaaaatgcaacaattagccgggcgtggtggtgcatacctgtaatcccagctactcgggagctgagctggagatcgcttgagtccagagttctgtacgtagtgcgtac

SEQ ID NO: 245860 - DNA, 404 bp, Homo Sapiens
caaacgcagagaggatccatgtatgaaaacaaagtgtagactatggaagaactgcttgatggtcgtaaggcttttgagtacagatggattttaaaaggaagacagactatgatggtaagtgtcaccattaagaaatctcgacttgtcgttaacatgttttccgacaagttcaaggagttgactgcggtgaggctttctcactcgtagcgatgctaagagtctgttggaattatattagcaattactgcattatgttatgaaatcgttgcatataaggatgtcaaaacattgtttctcgatggttttcttgaggaaaggttgtatgtgatacaaccagaaggttttgactatcctgaaagatgcaaacgagtatcctctctgcgtttgggaacctctagagtcac

SEQ ID NO: 245861 - DNA, 800 bp, Homo Sapiens
  misc_feature (473)..(506): n is a, c, g, or t
tatgtctaaacatgtctttattttgcctccaatattgtacataaaattctaagttgatacttattttcctcagcactttgaagatacttttctactgtcttctggactttatggtgctgataagaaagaagtttgctgttggtttaacaatgattaccttgaaaattatgtgttttttctcactggtagaatactcacatttaagtagacatttgatgaatgtgcatatttattgataagactccacacaggactcctaattccatagattatgcggggaggatcatggtacaaacatccttctcccttatgaaggggcatggcagaaaatgaaggctattgtgactaaaaggaagctctgcgagattaacaacatataactataaccttgtctccaagggagatctaagagtgcccccacaagaatctgagagactgtaataggatatgaagagaacagctgaggaccctcnnnnnnnnnnnnnnnnnnnnnnnnnnnnnnnnnncagacatcagtgttacttgccaagaccctcatttttaaactccaacgagttattacgttcctttccactcttgctttccaattcctacaccaagacaactctgtattttgagtatatgagtcaagtatggcaaaaagtacagtaccttaaaaacttttattttagtccttcctggcccatgctaaaacttatatctagaaatacggcaaaacaaaatgaaacagatctctccttgtacataaaacagctaaaaatttggcctctttattgatcttatgtcatgtatttggcttg

SEQ ID NO: 245862 - DNA, 436 bp, Homo Sapiens
gttcgctattctcggcacccattggtggccactgtggctacagaggaagctgcacctattacaaagttcagagctaccattccgatatcaacgaatggagcctcatcacctccagtccacatccagaatatggattgtgctcagttccgtttgaaaattagctctatctagtcggtggacaaactacaatcacagaatgctatgaccctgaaccaaatgaatggagagagatagctcccatgatggaaaggaggatggagtgcggtgccgtcatcatgaatggatgtatttatgtcactggaggatactcctactcaaagggaacgtatcttcagagcattgagaaatatgatccagatcttaataagtgggaaatagtgggtaatcttcccagtccatgcggtctcatgggtgtgtttgtgtgtagaaactgaac

SEQ ID NO: 245863 - DNA, 339 bp, Homo Sapiens
gggaatctccaggatcccccgcaaatttccttccactcgtattgtgcatagtacttctacatagctcacgccaccagcaacaggagtgtgatggcctctactctttttacctagttatctaacacacacaacaattattacagccacgccaaactgctataaaagtttctaacacctaatctcagtgtgtgcgtttttctttttgcagacagtgaataaacaacatttagactgcaccattccacggatcacaatcccaccccacttcccagcttctattggtctctgattcatctgcctgtcgagtggaaggaaatttcgagtggaaggaaatttgcg

SEQ ID NO: 245864 - DNA, 534 bp, Homo Sapiens
  misc_feature (55)..(55): n is a, c, g, or t
  misc_feature (81)..(81): n is a, c, g, or t
  misc_feature (90)..(90): n is a, c, g, or t
caaaatccaaggctgggttgccccaagccctcaagtttcttgtttggtgggcccncatttcccttggcaaagaaggtaaangttcacagnatgccggaagagctgtgactttctcttgtgccctgggcccaaacttatgaagaccttgacacacttatgctaaaagtccaacgctgggtgctccccagagcttcttgcctcaccgcttctgctgagggaggaatgaatactatgtcctcccagagctttgggagcttgtagcaagcagcctccccagcgcaaaatctcttggaaacctctaactgtgtctgaaacattagtgcaaatgttgcatcctatttcccatatgtccgcatgttttagaaaaaaaccctcaatttcctaaatatgcaagaaaaatcggtattgtaggacaatgtgactttttaaagaatgttatttaaaaatcttccccacctccttttctgccctccaagactgccaaatacttgttcgagtggaaggaaatttgcgggggatcctggagattcccaa

SEQ ID NO: 245865 - DNA, 535 bp, Homo Sapiens
  misc_feature (88)..(88): n is a, c, g, or t
  misc_feature (93)..(93): n is a, c, g, or t
  misc_feature (97)..(97): n is a, c, g, or t
  misc_feature (113)..(113): n is a, c, g, or t
  misc_feature (116)..(117): n is a, c, g, or t
  misc_feature (148)..(148): n is a, c, g, or t
  misc_feature (165)..(165): n is a, c, g, or t
  misc_feature (181)..(182): n is a, c, g, or t
  misc_feature (197)..(197): n is a, c, g, or t
  misc_feature (224)..(224): n is a, c, g, or t
  misc_feature (238)..(239): n is a, c, g, or t
agggcttgcattggggccccaagtttttaaaccggccttaaataacttggggaaacgggggaaggaaaatttaatgaaaccccttgtnctgcnccantgggtcccttcggccnggnnagtttgaaacttgggggttcagtttaggccntgccccaggatatcccncggtggtcttcggagnncctgtctgcatttgnctgagccagacaaatcgtcaggtgctngagccaaaaggaannaatcaaagaaaggcattgagttttaacagaagggaaaagggaagaagaaaagatttttgcagaatttctcaaaaatcagtttgtggattccagtagtatttatattgagagaaacaaattttagtccttctaactgtgctaaaacttggatatttgtgaaaactccttaccaccatacaagcatcagaagagctctcttgttgttagcacttattgtttgcaagaccagaatacatccttttatccttttatgaagaatgacgagtggaaggaaatttgcgggggatcctgggaga

SEQ ID NO: 245866 - DNA, 315 bp, Homo Sapiens
gagctcggtacccacagcataaactattcctgacagtggctagcaactcaactgttaaaacagctgctcatgctgaagagttgaaaaccaagtgtacatacaattttccctccatttacaactgctccgagattctttcagaatagaagtttctaaacttcatactgacatctcccaatctgtttaagtttttacacttgtattgcctctacctctgaccttcagccaatatttctgccaccgtcaccttcttggtgtttgctctattactactcttccaaaaacgtctcatataattggaatagtttatgctgt

SEQ ID NO: 245867 - DNA, 165 bp, Homo Sapiens
gcatgagtccacccaatcagtttgttagaagccagattcccatccaacagtgtctcgttccaaagcataagttgatacgaaagaggttcttcatcaaagatttgggctgctgccctcctactcctcagttatgtactgatgcttaacacctgcacaggggggata

SEQ ID NO: 245868 - DNA, 476 bp, Homo Sapiens
  misc_feature (56)..(56): n is a, c, g, or t
ctttgaaaagataaataaacttgatagaccattagcaagattaaccaagaaaagcngagagaagatccaaatagctataattttgacatcagttgcccttttatagatggtaatagcctttaagtttgtgattatttacaaatcaaatttcctttttattcctttaaattataagaatttagtataatgtagtattgctatcctaaagccatcttgaatacttgaaagattttgtcatagccattttgaaacccttgtatccctatattgcagggcatcttccaacagggttccattttgtttcagagtcttctatgaagtctccatgtaaacctccattgctgcccaccttatcatgttcattctgtcttgttttacaaaggcaaaccccacattttattttattctgtcactgtcttctcagtgccttctgtgttgtctcaattcagagtatctcctgcaaatagtttatgctg

SEQ ID NO: 245869 - DNA, 580 bp, Homo Sapiens
ctattcaaatcaaatggatttatattaagtgccaaattagatgctatacaaaatttataaccagatacacaaaatatgaagtcaatcatgaatccactgttgataatggataccatacctcacaagtgtgatttccagttaagaagagggagacaattgcttcattgggtttttagtgtgtgctaatcaccatcaccatcacaagttaatcagtttaattacatggtattcagagattaaacacacatgcagatattaaatggacactacaataaaacctttaaatctgcaaaaagacatgagaacacatggtcaataataccactcgctgccacagcttttcagtagacaatgcaaatggcaatcagcgttttaagccaccacaagagaaaaactggtactggtgcacctcctacatatcaaggaaaagcaaaacacagaataatttaatatgctgaataaaatttgtttacaccagatactatacatcacactgatggttgtccagtatgaattttaagggtattatgttagattctgcaaaatatattcctattactacaagtgaggagttgactgg

SEQ ID NO: 245870 - DNA, 722 bp, Homo Sapiens
ctcggtgtctcaacaatggctacaacccgtggacgatggcgtggagaatgagtgcgtgtttgatgagggtttcacgggcgaagactgcagtgagctcatctgccccaatgactgcttcgaccggggccgctgcatcaatggcacctgctactgcgaagaaggcttcacaggtgaagactgcgggaaacccacctgcccacattgcctgccacacccagggccggtgtgaggagggtcagtgtgtatgtgatgagggctttgccggtgtggactgcagcaagaagaggtgtcctgctgactgtcacaatcgtggccgctgtgtagacgggcggtgtgagtgtgatgatggtttcactggagctgactgtggggagctcaagtgtcccaatggctgcagtggccatggccgctgtgtcaatgggcagtgtgtgtgtgatgagggctatactggggaggactgcagccagctacggtgccccaatgactgtcacagtcggggccgctgtgtcgagggcaaatgtgtatgtgagcaaggcttcaagggctatgactgcagtgacatgagctgccctaatgactgtcaccagcacggccgctgtgtgaatggcatgtgtgtttgtgatgacggctacacgggggaagactgccgggatctgccaatgccccagggactgtactacagggcctctgtgtgacgtggcgtaaatccggggccggctcac

SEQ ID NO: 245871 - DNA, 411 bp, Homo Sapiens
taccggttgacgccacgtggggttttgtttgcaagaataatccccttctctgcagctccctggggctctgtcattgcagagggggacatgggatgactggggaggcacgcgccctgctgagggcagccacttctccagcccagcaggctgtaatccgacatccacagggattatcctggtaactggtggtgcatggcccctgtgctgagagggctgcagtgtgcacgccccgtttagagcatcgtatgggttcagcatgtgtccgcggatgggtgcttgaggagcacctgtcagacgggtgcctgtcaggccatatttttggcaatggtagcttcccgggaatgagggatttttcctgggataaaggcccccgtggagggtggtcagcagccctgaggacgtggcgtctgt

SEQ ID NO: 245872 - DNA, 932 bp, Homo Sapiens
  misc_feature (255)..(351): n is a, c, g, or t
  misc_feature (526)..(542): n is a, c, g, or t
gcgtcaaacattgccccaggggcacacagtcgacaggcggggtcttacagttcgcaacagcttgggttctcaccccggacacaccccaccccgggtggcccgaattcccctatagtggccaaagacacgcttccgcggacatgacacacattgcaccacgcacacattaagcagcagctcagtgagcattctcccatccctgggtttccggttcaagagcactttgggggcccggcgccgctggctcatgcctcnnnnnnnnnnnnnnnnnnnnnnnnnnnnnnnnnnnnnnnnnnnnnnnnnnnnnnnnnnnnnnnnnnnnnnnnnnnnnnnnnnnnnnnnnnnnnnnnnccgtaaatccccaaattagctgggcctcggttgggtgcttgtaatccccagcgtaccccggaggcttgaggccaggagtatcccgggaggccggaggttcaccagtgagttgagagttgagatcatgcccctgcaactccaaccggggagacaacagaggccaaaccgtttcccnnnnnnnnnnnnnnnnngcatctgggggacacttctggccaagtggttctttcttacatttgcagagtaaacagaagtggatggcagcagggtgtgttgtggtcagcccgttcccagggagaggccatggtcacatggccccaggcaggctccccaggcgtgggctgctggctcccaggctccctttccatgcaggagcagagtctccgtggccagcaggaaagcccaggggtctgcctccctcccacgggcccccacagcagagctgcagttgggatcagccaggacacggcccccgactgctctgctcttctgcctcttggtcacctcagatgttacagaggacttgaagttttttctggctagcctatctgggaaaattctttttgcataaagtgtaacgcatc

SEQ ID NO: 245873 - DNA, 585 bp, Homo Sapiens
  misc_feature (57)..(57): n is a, c, g, or t
agaaggatccccttcttcttggggcctgtgttatcagttgcgaaaaaaagcaggccncatccagagaatcatgcgctgaagaatcggttcagcatgtggtgatggaagccatccaagagctcatgaccaaagacacttccttgactccctgtcaccagagacgtatggcaactttgacagccagtcccgcaggtactatttcctaagtgaggaggctgaggagggggacgaattacagcagcgctgtctggatctggagcggcagctgatgctcctgtcagaggagaagcagagcctggcgcaagagaatgcagggctgcgggagcggatgggccggcctgaaggcgagggtaccccaggtctcactgccaagaagctgctgctgctgcaatcccagctggagcagttgcaggaggagaacttcaggctggagagtggcagggaggatgagcgcctgcgctgtgccgagctggagagggagtttgcggagcttgcagcaccaggaaccaggcgctgactaccatgcacaggagcacagcactgaagtgagggtggagtatgtgaggctcgggggatcctctataa

SEQ ID NO: 245874 - DNA, 395 bp, Homo Sapiens
gagggcacgatctgtagaacgggtaacattgtataacactgatcaggatggtagtgatagcccacgcagtggccttaataacagtctctcagaccagagtttggcatctgttaatttgaacagtgttggaagtgtgcatagttatacaccggtgacaagccatccagaatcagtctctcaatcattaactcctcagcagcaaccacagtacaaccttccagaaagagacaagcaactacttttctcagaatataattttggagatcttagtgcctcatttcggagcctttataagtcagtttttgagcagtcacttagtcaacaaggtttgatgaacatcccttctgaatttacccagcagtcccacacttcgtggcagcgaggatcctctagag

SEQ ID NO: 245875 - DNA, 320 bp, Homo Sapiens
gactgcacagaatcattcctaattatttccatttttatgataaagtccaaagcttgattccataaagaccttgaaatcctttggaattcttgcttgaaaaaactctaaaagtacattggtaatttcttacattccctctaccaaattcagaacagcattcattctccaatgaattcaataacctctttctctgaatgacttctctgtcgctcataccagccctctttcctgattttccacactgggattctcactccaattctcaggtttcctgatagacctgatgagccgcttcaccagcgccgcttaagcggatcagc

SEQ ID NO: 245876 - DNA, 338 bp, Homo Sapiens
  misc_feature (242)..(271): n is a, c, g, or t
  misc_feature (279)..(280): n is a, c, g, or t
  misc_feature (283)..(283): n is a, c, g, or t
  misc_feature (289)..(289): n is a, c, g, or t
  misc_feature (298)..(298): n is a, c, g, or t
ggaagcctatactttctaccagaagcttgaagggtttggttaagaatattccccaaagcactgagatactaaagaaattgatgacaacaaatgagattcagagtaacatttatacatgatcttaaacattgttttgtagtgtatattacttgtccattcctttaaggggagcagcctgcactcttttgtagattacttttgggggatatattttgagaatgatgaaacggaataaaattacnnnnnnnnnnnnnnnnnnnnnnnnnnnnnnctgtgttnncgngcgcgnctcctcggnccccttcgagaagcttttctaagaccaatttttctttttt

SEQ ID NO: 245877 - DNA, 276 bp, Homo Sapiens
ctacctagaggatccgctgaccgcttaggtgtgtgcataagtcttgtatctgcttagtcagtttccatctggaaagcatttgcttcgcaaacagccacagcttacagactacaagcagtttagaaaccagactaccacctgaatatactacacattgcttcacctggcttgttggtgattggtatgtagttgctgattctttccacaaaaggtacttctttcttggttttctctttagggcttaagcggatccaggggtatcgagcctccaattcg

SEQ ID NO: 245878 - DNA, 275 bp, Homo Sapiens
  misc_feature (164)..(174): n is a, c, g, or t
tcagaggatccgctgatctgcttaagcagttgatacgtttgtcaggtgtttgtgttttaatgtttaactcttgttaccatcaccacagtcaagacataagacatctccaccaggatcctttgtactttttcccagttaacttttaggcttaattttctctctgnnnnnnnnnnnccaaaaaaaccacaaaacttttcttaaagtttagattattgattttagacctcttttcttttctcatctaagtatttaaggatagaaacttccccttaagc

SEQ ID NO: 245879 - DNA, 302 bp, Homo Sapiens
tccgcttaaggcatgatgtcattattcctgaagtggattcttgcaaaggctgggcactcagcagcctgagtcttaaaacccagcagcagtacaaaaacctgatgcagaaccttaaccccatttatataatatggtgaattttttctcaaatgggaatatggtgcattatctttaaaaacaagaagtgatcatgtgctccaggacaccactgatgcctctaagaaatcttattgaattaagacagttaattaattgtctgcatagtcttgactcttgcctgtctctcacttaagcggatcagc

SEQ ID NO: 245880 - DNA, 227 bp, Homo Sapiens
atcgcttaggaccagagagtaaacattcaggaacacaaaagacccaaccaagctcattagctctgtttgcctctaacttatctctatggcaactcacagagggtccagggaaaaaaaggtttttaaaattagatcatcaagaacttcatccagaacagccacaacacaaaactctttcaaaaagcctttggttgttgaaatggtgagggcatgtttcctgcttaagc

SEQ ID NO: 245881 - DNA, 303 bp, Homo Sapiens
agtgatccccggctatcacattatcttacacatatctagctgaagtatgtgaaaacataaacattcatagtgaagggtatacttatgctttgttaattcatcatgtttcatagctttaaaaaaatcgcaagaagatctgtgtatccctttttttctggccctacacttttcttctgccacccctatagactatcagcctgcacactgaaactgttctcacaaaacaaaggcattatcaacttctcaaggtttaggtagtgatttaaggctaacagaccctacactcatgtgataatgtgatag

SEQ ID NO: 245882 - DNA, 139 bp, Homo Sapiens
caggtagacctaacctttagaaaaattcaattcttcatatgttctttggtggattctgctcctggatactgtgcgtataggaatgaagtatttactgttacttttgatctgcttagttacagaagttgtttaaatttgg

SEQ ID NO: 245883 - DNA, 299 bp, Homo Sapiens
caggtagacctaacatatactcattgtcattctaacactgttagaaacttgtctttatgttgagcacaagcccaaattgtgttttatgtcatatgtcacaaagctggcaggtgtgaagttgctagatagaaaacatccagtagtgttagaggacacctaagacatcagttatgtccaaacattttggtttgatttggttagttttttatggtatgtcattaaccaaggaatttaagttatagcttgtttttcttgggttaatattttgtcagtaggttacctgggttaggtctacctgg

SEQ ID NO: 245884 - DNA, 309 bp, Homo Sapiens
ccaggtagacctaacaggggctgcgcactacttaaagcaaacaagaaagagcctcactttaggcaagcctatggcaggaaagcctcattttaggtcttagtacattatacacaaatccaatctgataaaaccaaggcatacatttctttctcaatagaatgttgcaccttacaccaagattctcagagcctcgggctgcctgaggccaatctgggtactctcataatacctcacctggcctgggttctggtccagatgtgtcagcatggacacagggctggatggggcaggggggttaggtctacctgg

SEQ ID NO: 245885 - DNA, 284 bp, Homo Sapiens
atggtcgatctctgaggatccccccaggtagacctaacccaggtagaagaaaagtagctagtagtgagtttatcctaagaagaaaaaggaatgtttaacattttctggaacggaaagcatttttgttttcccttgagatgctattctttctaacatcaaatgcaaactgccattatatactatacatcttctaaaaattgaaaatcataatatccatactttaattttcaactttccagttttccaattacaagcaaagtaccacattcgttaggtctacctgg

SEQ ID NO: 245886 - DNA, 334 bp, Homo Sapiens
caggtagacctaaccccacgatttcatatagccattgagatctgcatcttagttcagtacttgttctactgcgtaaagctatctcaagtactgttcaagcattctttcttttcaaatggaacatgacagacagaatatgaataaaggtagtttgaggaatgcatgtatattgagaaatttgaccaacagatctaaaaagtatctcagataaatttcaaagacctttgcaagtaaatattaacttggtatttttagtttcaagaacaaacagaatagtatttatttttactgtgttaggtctacctgggggatacctctaggagtcgaccatcag

SEQ ID NO: 245887 - DNA, 243 bp, Homo Sapiens
ccaggtagacctaacctaacaaagaaaagcccaggaactgatgacttcgctggtgaattctaccaaacgtttagaaacgaattaacactaatccttctcgaactcctccaaaaagttgagaaacagaaccctttctgagtcattctatgaagccaacattatcctgataccaaagctagacagacaatacaagaaaactatagccaaatgtcccctatgaatgcattatagatgttaggtata

SEQ ID NO: 245888 - DNA, 792 bp, Homo Sapiens
gggagcgcccggataaggcggcgctgaacgcactgcagcctcctgagttcagaaatgaaagctcattagcatctacactgaagacgctcctgttcttcacagctttaatgatcactgttcctattgggttatatttcacaactaaatcttacatatttgaaggcgcccttgggatgtccaatagggacagctatttttacgctgctattgttgcagtggtcgccgtccatgtggtgctggccctctttgtgtatgtggcctggaatgaaggctcacgacagtggcgtgaaggcaaacaggattaaagtgaacatcacctttttatagcattaaattcattttttaaaatgataaatgctggagggggccatctgatttgaataaagttgaaagaacatgttaaagtcagtcttaaggagtcacgtttgagtatgtaaattttgatctttctaatatgttggtttgtatattcagttttaactgtatgaatctaatttgcaaatgagaatttggaaaagttaaattagttacaaagaaatatgttaatttaattagacaatactctggaaggaattttatcttctttcaacaaaacatgttttatagtattctgacttacggttgcttttgagttttactcatttggatatattaagatgcacacagtgaagcaaattaaactccactttacgctggaatgctttctttagcatgaaaataccaggtccttggatttgggattttaatttcctatggaaagttgcttaaattgtgacacgatgttcagtggac

SEQ ID NO: 245889 - DNA, 174 bp, Homo Sapiens
tgaaattcgtgtcctcatccaacaaggcttcttgctactcactacccagctacccctacgtgtggcccgtatcttcatggttcaagatggcagctatagctgctaggtagtttagatctctctcacacactttccttctgtcataattaacacagggttggacacgaatgttca

SEQ ID NO: 245890 - DNA, 185 bp, Homo Sapiens
tctgtgacaacccatattctaatgctgcaccttctagcagaagattctgtgcatcctgacatgcatgtgacacaaatacactttgagtcttcttcctgtacctcctgatcatggtcccattaaacctgggcaaacaactgaactaactagtcagaattgggtagcacagactgggtagtcacaga

SEQ ID NO: 245891 - DNA, 370 bp, Homo Sapiens
tctggactacccattccaaatagtggttagatggctaagagtgctcttaacatttccaaatttagtttgcttttacatcaaagttcatttgttttatgaatgctgtccagtattaataatttaatgaccattcactactgtgtgctcagaacagtaccaagtaataccgaacactgtaaattaaccaagttctgataactcaatttgtatatgtcttatgcacattaacagctttccacttcacaccaaccctcccaactatgtctaggacaggtgacctaattaatccaaaatctctttcttatcctttgagtgcttaaggtaactaaacattcaccatattattttttcccacctgggtagtcacaga

SEQ ID NO: 245892 - DNA, 268 bp, Homo Sapiens
gtctgtgactacccagtctgtgctacccaatggaatctggcctatttctgagtgggactgagtttgtagacatgaaggtccatgtaccctgtgaaaccctcgaatacattgaagccaactatggtaagacctggaagattcctgtaaagacgtgggactggaagcgctctcctcccaatgtgcaacccaatggaatctggcctatttctgagtgggatgaggtaatccagttatattgagatagtaggttgaaatgggtagtcacaga

SEQ ID NO: 245893 - DNA, 465 bp, Homo Sapiens
gactggcaataattgtatctattttcaagtacagctagctgtcaaagcatgaagctcttgtgtatacacactgacacttggttcacgcatgaagaacagtgcctatgcactttgtgtagctataatgtaggtatctaggtgtaatttcagtgaaatggtgtatagatgtattgtaatttaaatgtatatgttatttttggctattcatctaaatgcagtagacatgttgatcggtgttttgcaaacatttctttttcgcttcttagataactagtcgtgaatcatttctcctctttctcagtgtggcttgggaatatatatgacgtgaagaatttatctgtgaatcctttgtactgatgacttgtttgaaagtctgtgtgtgtccagcacctttgtaaatacacaattcagagcgggatggtgggtgtgtgtcctggttcttagtgaagtctcaatcgggccagc

SEQ ID NO: 245894 - DNA, 408 bp, Homo Sapiens
agtatggtccactgcaaggagctgaaagaggtgatagaactacataggagaaaggaggaaagtgctgcaggatgaaaacctgcgttaacaaattggatagatcatgtctggagttaatacactgagacatagcaataggaggctaattaaaggtaagaggtaagtatgaaaaggatgagctaagtagtgacctcagacacatggaggtagaggtgtagtggggaaaagaagagattttattctaagcaggagattttattctaagcctttctgattgatttcctttttaccatgcatagattctactttgataattactcttaacatatttcctgtgattctgatatgcacacatcacacgttacattctctgcccacaataatcattgcccaacgaaatctatacgt

SEQ ID NO: 245895 - DNA, 706 bp, Homo Sapiens
tcacttagttggtgattgtagacaaagtatagcttgcatcgccatttttcattttcatggatggaaattatggcctgtatgccgaaaaaggacagcaaagacatttaaaatgtgagtgtgcaaagtgtacatcatgtgaaccatgggctccaatttataaaattattttacttctgaggactctttgtcttttctgtgtcctcttaacggatgctaggaagtgaaacctttcagctcagttgtcccatgtgccgcaggatgctggcacagatgtagaagagtgaacatctttcatgtacctgatttcattttcagaactgagcctcggatccctttaagagcagactaaatgtgatcaggagctccctgctcttagagtcagagagaaaaagaatgagcaggtccttcactgacacacagagtatttctccagtatgccccacagcctctgcagcctctgtaagccatgcaggatggatctgagaatcagcaagatgactgtgctgggatctctgaattatctcagaggcacaataagagggttacacgccttgtaaaaacattccttggcctaacactatagtagcccaatttccagcccttctccagaagctctgggcacacacagaggcagcacctagagcaaggtcatgtgtggcttgccaaaacagccccggaccagcatcagtgccataattggtagcag

SEQ ID NO: 245896 - DNA, 703 bp, Homo Sapiens
aggatcccctgctagaaggctctgcttttttggctccatcataatgactgtaaagtgtcacaagatagtgaaaatatgattctttaaaacaaaaacaaaatttttttcatctacacatcgtacccaaagttaacaggagagaattataacattttcaaactaacactaaacaaccagtattaccaaataacaaaatgcaactctgcagacacaagtcaaacctgcttagacagactcccacggccaccaccactggggaaggccacctccacatgcaagggtttaggttctctcaccacacgacgcacagaatgggaacattcactctttgatcacaacttcctacatctccactttgtttcctcaacattttcttcttggatcctgtagttctcttatttctgcttcctgcatatcccctcttcacctcctgccttcatatccatcagtggccatcttagactccacagttgaccatttacatcactccagcgactcatgagccttttttgctcctctatcagttcactgcgtggactgccgtgactgcctccctgggtgaacacaagtatcccccgccacagaggcaagggcagctgggctcacggaatcaagatcaggaactgtacacagcagagccagcctcagctgggcctcggtgctgcctgtaaccctcccatattctctacaaaccgttgtagac

SEQ ID NO: 245897 - DNA, 311 bp, Homo Sapiens
gctgtggacattacaaaaagagagacaaccaggcatctggagcctcatgatggaagtgtgtgtcaccgctggcaaaatattcttgccaacaaacggaacctgaatcagatcaagcctctggatttaccaccagtttacaggggatacagagcgtccgaaaatatgttaagtggcagtctaaggaggcaatctgcaaaatccaggctgtaggactgtaggcaaatgacttagtttcttcaacaacaacaaaagcaaggaaaaagagatggcagaacctagattacaacagactcagtgccatatctggggat

SEQ ID NO: 245898 - DNA, 1155 bp, Homo Sapiens
  misc_feature (1093)..(1093): n is a, c, g, or t
cttttattttttattataaaaacacatacaagagttttaagaaataacgaatataagacaaatcaaaaccatggtgagttattaaacccattttctatatacaaatactaaaattcccaaagtggaatatcatccaatgtgagacacatcatagcacggtccatatgtacacggcacacagagctctgcctgcgctcatctgtgaattgctcattacatgtcactgataaaaaaatctgcaagggaactatctactcttcagttctcctcttcctgatgcattgtcacatatttttaaggaactttagggatatgaagaaaatgcattaaagtgggtttctgctaagggctctgcatgttttgctctgatcaattacgcactacatcttgagaaaaacttttgcaactcatttccagcaaagatagcagaaaactctaggtttttgccaatttattttttcctagtcactcattggaacacaagtccaacaacaacagctcaggaaccaaatcatgtttttatattggtaagttcattataaaatgccactcaattttaagaagccactaaaaggacactttctgcagcagaaaaagggctaagttcaagtttttgttgtttgacaaagacacaataatataacccatatgtcacagatcacaacagccttaagtgaaacgtattagatttagggaaaaacgactatgcgactgcttgtttctcctgtctccttgccaaacaataaggagagcctctggtctgttttatctattttatgtctttttgttttgaaacctccctttgtattctgaaagctgatcaaactatttgtgttcaaaatgtgtcaaggcacttctcaagcctcagtggcatcccaggtcagccaagctcctctgtgctcagggcactgacttcctctaggcagctgacaatcgcagacggaacgcttttggaggcctctctccgccaagcttccaggatcttggaaatttctgctggattgctgggactcaagtcacaaagagcatacacggctgctaactgtataccccatggtatatctgaaaagaaatttcagatcagtcatgaaancaagaaaatatctgttattcaaaatttttagtgatgtaacctactgggagtacttattgcaa

SEQ ID NO: 245899 - DNA, 378 bp, Homo Sapiens
cgttcacatgctatttaaatgcacaaaatagacagtaaggatttatctgttcagtttttcttcccagtgaattaatttcagcttatatgggtgtcttcatttgaacatgaggaatattaggttatattttcagcagtggttttttcctttgccctttaaggagtggggataatgtccacggtggcccagcctcttgctgatggcaccttccctgcattgctgcctcccgatgatgtggttcttttcttgtgcctgtggctttgggaatgtaacatctctttcctcctttccttcccttttctctcttcacctgaggtcctaaatactctctgtaattactgtgttcttcaccggtaattagacatcattcagtgccat

SEQ ID NO: 245900 - DNA, 399 bp, Homo Sapiens
gcagagccaaatcattttttaaatggagttcgccagattcttagggcctatttgaacttatatttctagaattgggtgggatctgcctttctaaattataattcataggaagagtgctatggaattggctagtaaagactcttggccgtgaaggcaatgtctcagcaagtggcttcctcttttctaaaacctcattagtgtccttgggagcatttcattgataaatacctatcccacagtccagcttgcttttttctgaatgtaatttcaaagcccggtaacttcagtagatttttttgattgaccacagtagacacagagtatgagaaacaaaatagaatcctcaaactttctacctggtaaacagaggaagtaaggatagtgttttcagtggccatt

SEQ ID NO: 245901 - DNA, 477 bp, Homo Sapiens
aatgaggcactgagattatagacagagtctaggtgatgtgtcactctcagaactccttcccgctcccttccctccctgtctcttgttctatgtctttttttatcagcaaggcagacttttagtgtcccccaatacctaaccctcatatttcatgcccattcccaagctaagcatttgcaagtagaatggagtcaccattattggttgatgagcaccatgctcggaggaggtgaacagatcctgtgagcaaaagcgggaccctgttagagaggaggaaggggacagatggatcttctacagaaagtgaacaatttttgttttctttttccatagaccctgatatagtgttgagtcattggtgggttgattgatcttatgacgtttatttcttatcatcactattaggtaaccagataaacctaatggttagatggatgagatgtgaagttgtggcagatgctatcagtggccatcttt

SEQ ID NO: 245902 - DNA, 436 bp, Homo Sapiens
aaagatggccactgacagatgaaggagccagtatctaacagggtagagcagtgatgttccaggccaacagtctccaattttctgatcgcacactctatgaacagacgatatatttagaccacctcccacacacatatgtattaaaatgcttacttaggaattacatgcatattgccgtacagatttattgatacattctaaatgaaatgggatagttcccttgaccccttcacaggactcagcccacagctctcagcccctcatgggaggagcagcatgcaggtgagtgggtgcaggggctggggtgagtgcttttgggcatcggcaggagtagaactctgtgcagccccccggcagcatctgggtggggctacctgtgaccctggagcctagagggcatatgttacagtgtgctttagatttgcttccacagatt

SEQ ID NO: 245903 - DNA, 583 bp, Homo Sapiens
aatcagctcgctacaattagcaatgactttcccagattatgttttcctttttttgagggggaagctggatataaactggcagttaaaaaaattgtacagaaatcatcttgctcattttcattgtgtatttttgctctcatgcattttgcatgaactgtgtgtggattcattgcctacattggatgatgaagacttgagtgttgctactaaggtaaagtggtctcttttaaaattaatcttctcactctgagtgtagttttgcatagtatttacttttcaaatttagcagtggtttacctatcattgttttatggtggtaatggaaagctggtcagagaaaaacatacacatggctagttgattcaaaaaatgtgtttatactttggtaactaataaagattggtaagtactgtgacagggtgggagctgaaaaataaatgaactggaaaacaagtagtcacaggaaaatcacattaggaaatgctttctccaatagaggagatattaaatttggttacagtttatttggataaatactactactttgacttttaaatcatacgagtgtgactttctaatattt

SEQ ID NO: 245904 - DNA, 2108 bp, Homo Sapiens
  misc_feature (92)..(92): n is a, c, g, or t
  misc_feature (148)..(151): n is a, c, g, or t
  misc_feature (157)..(157): n is a, c, g, or t
  misc_feature (159)..(160): n is a, c, g, or t
  misc_feature (190)..(190): n is a, c, g, or t
  misc_feature (193)..(193): n is a, c, g, or t
  misc_feature (197)..(201): n is a, c, g, or t
tggggggattccccagcccctagttcatggcccgggttttcctggcgtaccacggtatggcccattttcccttcctccccggggcccccgcnccccctaagaatggtcttagaacatttttcgaagggccgagggggccgaacacggnnnncccccncnncgcgccccgcgccgcggggcccgctcccgnccncgcnnnnntttttcaaactcattcatgagatatttattaaaataacacatttagggaaaaaaatcaatacaatgtatacatcattactgaaaactgtataccatcatacaaaaaaggattttattttgggaaattgttttctaatttatggcaagttttactttcagaaataaaaccacaacaacacaatctaattcaatcttaaaggctggcatgctgagcaaggaatgttcttattctttgtaggagctccttctttacactgtcaggtaccagggctctgccttttggagtgatttcagccaccaagtcatcaacagtaacgtgttctagtcctttttctttaattacctctttacagtgtgccttcaactgatccttccagccacattcaattaatttagctctcagcaactctttgaggcgttctctttctccagtttctatcaacttttggttaatcgctgctctcatctgcgcatctttgttcatcttgctaaccaccatcaccgcgggcgagggccgtcccttcccagcgacgaaatgacccttgcgctgaggaccgttacctaccacactcttcggctgcccggacttagaccctcagtagctcgggcacctaagcacacagaaagctagaacacgcatttccggggcggggtctcgccaccctgcctataatgtgagaatttaaccagcgcgggccgcctcctggttgctagggcctctgggtaacagagttcagaccttgccgtcgcgcgcgcgttaagtaccaggataactacatagcccagcatgcaacagtctcaactttttcacggacactacatttcccagaaggcagttcgcaccgcagtgttttctgggatgggaaccacgccgcttcccagtctctgtgcgaggcgtgaagcgcggacctttcaacaagggctttattaattctcacgctgcggccctggaaagcgatggaggtggcggctaattgctccctacgggtgaagagacctctgttggatccccgcttcgagggttacaagctctctcttgagccgctgccttgttaccagctggagcttgacgcagctgtggcagaggtaaaacttcgagatgatcaatatacactggaacacatgcatgcttttggaatgtataattacctgcactgtgattcatggtatcaagacagtgtctactatattgatacccttggaagaattatgaatttaacagtaatgctggacactgccttaggaaaaccacgagaggtgtttcgacttcctacagatttgacagcatgtgacaaccgtctttgtgcatctatccatttctcatcttctacctgggttaccttgtcagatggaactggaagattgtatgtcattggaacaggtgaacgtggaaatagcgcttctgaaaaatgggagattatgtttaatgaagaacttggggatccttttattataattcacggtatctcactgctaaatgctgaagaacattctatagctaccctacttcttcgaatagagaaagaggaattggatatgaaaggaagtggtttctatgtttctctggagtgggtcactatcagtaagaaaaatcaagataataaaaaatatgaaattattaagcgtgatattctccgtggaaagtcagtgccacattatgctgctattgagcctgatggaaatggtctaatgattgtatcctacaagtctttcacatttgttcaggctggtcaagatcttgaagaaaatatggatgaagacgtatcagagaaaatcaaagaacctctgtattactggcaacagactgaagatgatttgacagtaaccatacggcttccagaagacagtactaaggaggacattcaaatacagtttttgcctgatcacatcaacattgtactgaagcg

SEQ ID NO: 245905 - DNA, 554 bp, Homo Sapiens
  misc_feature (56)..(66): n is a, c, g, or t
tcatcttgggcctgtgttatcttatcttgggcctgtgttatcttttttctttttgnnnnnnnnnnngagattttgcatattttataatgagcttcattaagcaagtctctagttaccctgttttcacaatcagagtaaatgcctttaccttagcaagcagtactcaccataaataatggctcaaaacaacgatgtttgctatttttttaatcaaaaagaaaaaagataacatgggtatatgataattactattcttctcaaatggagtttttctagcttaaagcttgatatgtgggaattatgctttcaaggtttacactaatgtggtacagaggacatcctgttcttctaaatgtgcctctgcagttcttttagaagttacagcggcttcccagtctagacaatctatgcacagaggttttgataatagcatagtggagtcagactgcctgaatttcaatctcagcttcaccagagattaactgcatgacctcaagcaagttgttttacctttgtgtggctcagtttcctcatctacaaaatgataacacagg

SEQ ID NO: 245906 - DNA, 275 bp, Homo Sapiens
tcatcttgggcctgtgttatccatcacattcgcgtggcagcgcgcagccgggaccgaagttcgataagcaaaggctcgatggtagcgttagtagctggttccgaagcatccagacgcgcatcgtcggtgcggtcgtccgccacccatatgacacgtcaacaacggaatcccgcgacgagaaaagaggtcagagtgccttccaccgacacggcacatcacaccactgacgagcgagagataacacaggcccaagagataacacaggcccaagatga

SEQ ID NO: 245907 - DNA, 838 bp, Homo Sapiens
  misc_feature (736)..(757): n is a, c, g, or t
tcatcttgggcctgtgttatccccaaccctttctcactgccctgtgtccttagctacctcagccactatgctgattcctgaatactggagacaaaagggaaggcaagatgaaaagggaaggttatacttctttattaattcacatagattacccttggttctgcctgccccattttcatgagaatttcttttatttttcagattccctctctttatagtagcctgagaatctctaggtagttactcattcttagaattgggtcctggttactattttcacagaaagagaaacatgaaaatctgattaccaaaggggttgtgcttcctgcagttcagtgtagtctttgtccactagaaggaagaacattgttctcccagcagcctgacacaccacagtaatgtatgtgtatgctgccattgctggttcagcatttatttctgttggtgggagtgaggctcagccatggtctttctagttctgtagttacagcttcttcagaatacacagacacacaaagccattccttggtaattcactctgagggagtaaatacttcctcagagccaggggattggttgggaaggagtttgcagttctagacagccagatagcattgtttctgaaaagacgtcttgtaaaactttagcattctggcccttgagcatagaacagtcctttctgttctcaaatctattgtcttaagccttttcctacctcaggatcatgagtaactgnnnnnnnnnnnnnnnnnnnnnnagaagtagtagaaaacttgcctcagaatagcctcaataagaaaggaaatgaatgtgctcagataacacaggcccaagatga

SEQ ID NO: 245908 - DNA, 976 bp, Homo Sapiens
  misc_feature (867)..(875): n is a, c, g, or t
aaatcccctttatgcccatccagaggcagccctggaataggattcccaggggtttctgggacccctttccttgctccgtgaggctctgtggccatcttttggcaggaggaggatgcttccttggctctgtgcccagacccgcctggtccccaggtctctcgccttgggtgaagattcagagatgccctgtaaggattttgcccactgggcaactcagaaatacttcgatctcccaagatataagaggcagcagcaaacgtgcctattgacgtctgtttcatagttaccacttacgcgagtagacagaactcggcttttcagaaaataggtgtcaagtccactttataagaacctttttttctaaaataagataaaaggtggctttgcattttctgattaaacgactgtgtctttgtcacctctgcttaactttaggagtatccattcctgtgattgtagacttttgttgatattcttcctggaagaatatcattcttttcttgaagggttggtttactagaatattcaaaatcaatcatgaaggcagttactattttgagtctaaaggttttctaaaaattaacctcacatcccttctgttagggtctttcagaatatcttttataaacagaagcatttgaagtcattgcttttgctacatgatttgtgtgtgtgaaggacataccacgtttaaatcattaattgaaaaacatcatataagccccaactttgtttggaggaagagacggaggttgaggtttttccttctgtataagcacctactgacaaaatgtagaggccattcaaccgtcaaacaccatttggttatatcgcagaggagacggatgtgtaaattactgcattgcnnnnnnnnncagtttgtataacctctaatctccgtttgcatgatacgctttgttagaaacattaattgtagtttggaagcaagtgtgtatgaataaagataatgatcctt

SEQ ID NO: 245909 - DNA, 671 bp, Homo Sapiens
cagtccaccgtttctggcggcaccaccaaccctttttatattgctgaattccaacctccctggggcggaacctggaggtcctgtttcttacggacttgcagtccaggaggatttgaaggcacaatgcaggggctcagattgggacagaattcttttgtgaaatatcagtgccacagattgtaacagatagcttcatgcacactctgcattttattggtttgtatggaaaatgtcggccattgaattattcatagatttatttcaaatagtttggaaattgttgtacttttgaaaacatgctgttcctgtagttttttgatgagagttatagttgttatatatacataaagctaattttcttttcatttttaagagacaattctttttatcctaaatattttattatctttaaatttgtttctgtattattacatgtgctcctgaagcgagcactctttttatctatgatacttccataataatctcttctatttatagctattggtagttccccaccagaaaaaaacataattctggtgatagaaatttttatttgctgtttaggtttgtgactgaattgtgagaattcagttgtgatttttaacatgcctcaggtatatatactaacacgtctaatatatactatctattttattggtttattttgagtt

SEQ ID NO: 245910 - DNA, 364 bp, Homo Sapiens
cgtgaacgaccttacgacctttcactgcttaaaataaccaactttttaatttagcaaccattgtcgtttcacgttcaattctgtaagcaataatagagctctccacgtaccctccacctcctcccctgctggcagcaccttacaaaactcgattctctgtggttttcccagaatcagaacttgtgtacgctttagtcaccccctcattttacagaagaaggaactgcaacgtggtcagtccccccttaaggtgacacggccagctgggaactggacattgccaccacacctagcttagctagactctcaccctgtctggcttctcctctgctgcctgaggtactccccccaagttcttcaccgg

SEQ ID NO: 245911 - DNA, 468 bp, Homo Sapiens
gtacagagtgaatgtagtccgtgaagggagtgcctctctgggaccccctgtgttgttacaggctgtgcagtgcaacaattccagcaaaaataccctatccccgcacttagtcattcgtggtaactaacaattttgaaatactcatataaaatgaacaggaaagtgttagtgattgggtgatttgagctacatcttgttgagcaaggggagtgaaaccacagaaactgttaaattgaacgtaaataactttggaaaacagttttgacactagaacaaggtcgcttctcttttcctcttctctcccaacctgttaacctagtgctagatagtcagctgctgttgcaggtagaaaagctcaccaatgccacatttgttcattctgttcaacctgttttgacctcccaggcatttgaaccaggatgacatcatcttattatatcttactttacacattcactctgtacggga

SEQ ID NO: 245912 - DNA, 512 bp, Homo Sapiens
tacagagtgaatgtcagaggaagaaatatatgtgtgtttcacaaagttgtagctgcatttactgaaaatgttgtatatggttcagtgaatgtaatgtatgtgatgcttaacataaagctatctgagaaaacattctgattcaagactggaaatatctactttaagtatagtcaactattctgtcattgcttagggcagctgtttgtttttaccaaaaatgtagaacctaaagaaatgaaggtctttggacttttgggggaagagatagtagatttttgtagtcttgttttgtaatatgaaatagttttcgggaaaggttatataaataagcatcagatgttgtttacgtttaagaaattgaattactagatgttaacttaatgtcttctttttttcttccatttctttcaaaggtttgggccccatggtatccctgtgacagtatttcccgaaagggaatataaggataaaccagaagccatgccgctccaaagtaatacattcactctgta

SEQ ID NO: 245913 - DNA, 1157 bp, Homo Sapiens
  misc_feature (640)..(1012): n is a, c, g, or t
ggcttacgtgctggttgactctatgatggatccccagtttgacactacagatatcatatgcttgacatatataatggtcaatacttagtttcattattgattctttgtgagagatggaaaataagagtacctgggccctcttctcaagggagctcacagagaattactaaattagagacagtattaaaagctatcattcaatctgcatgaaaaaccaagcccaggcctcagggaattttactctgtaacagcaagagaggattcaatgtttgccttgggaaaaatgccccattctagttgtttccctcctaagtacccactaccacaatgtcttctgtcaaggaattacaagtagcaagggaatgtctgaatgcaaggacagatctaggtaccttgcaagcacttcatatctcccttcttgccgactctgtctacacagacatacaaaatgacatgaagaagaaggcagtcttggtcctcaccccggtatctgtttctttgcagaaagcacagataagtggtgaatgttctttttctgattttcattatgtggactggatggaggctttcaaactggtgccatactgctgcagggcctaaagggaggcccatctttatagctgatccgctacaaccctannnnnnnnnnnnnnnnnnnnnnnnnnnnnnnnnnnnnnnnnnnnnnnnnnnnnnnnnnnnnnnnnnnnnnnnnnnnnnnnnnnnnnnnnnnnnnnnnnnnnnnnnnnnnnnnnnnnnnnnnnnnnnnnnnnnnnnnnnnnnnnnnnnnnnnnnnnnnnnnnnnnnnnnnnnnnnnnnnnnnnnnnnnnnnnnnnnnnnnnnnnnnnnnnnnnnnnnnnnnnnnnnnnnnnnnnnnnnnnnnnnnnnnnnnnnnnnnnnnnnnnnnnnnnnnnnnnnnnnnnnnnnnnnnnnnnnnnnnnnnnnnnnnnnnnnnnnnnnnnnnnnnnnnnnnnnnnnnnnnnnnnnnnnnnnnnnnnnnnnnnnnnnnnnnnnncctatatcaccctctatgtctgaatcctctgcaagaaggcctggagattttgcaaaactgatttattgagaatggcaaggacagcgctgtgacctcttagccttgatgcacagctacacgcccacgggttttcaccagtcacgta

SEQ ID NO: 245914 - DNA, 651 bp, Homo Sapiens
acgtgacacttcagtccattggtagcagcaatgcagcattttctgccagttctaaaggatcgttttatccagcttctttctgaccagtctgatcagtctgtcctcatccagaaacagatattcaagatcttctatgctcttgttcagtatacactaccactggaactgataaaccaacagaacctgacagaatggatagaaattttaaagactgttgtgaacagggatgtacgtaatgaaacacttcaagttgaagaagatgatcgacctgagttaccatggtggaaatgcaagaagtgggccttacatattttagcaagactttttgaaagatatggaagccctggcaatgtttccaaggagtataatgaatttgctgaagtatttctgaaggcatttgctgtgggtgtccagcaagttttattgaaggtgttatatcagtacaaggagaagcaatatatggctccgtcgagttttacaacagacattcaattatattaatcaaggagtttctcatgctctcacctggaagaatctgaagccccatatacaaggcattatccaagatgttatttttccattgatgtgctatacagatgctgatgaggaactttggcaagaagacccttacgaatatatacgcatgaagtt

SEQ ID NO: 245915 - DNA, 348 bp, Homo Sapiens
gtcagcaaactatcttttctgtttttcataatgatgctgctgagttgcataatgtcactacagatctggaaaaagtctgtaggcaactgcatgatccttctgtaggactcagtgatatttctatcactttattttctgcatttaaaccaatgctagctgctattgcagatattgagcacattgagaaggatatgaaacatcagagtttctacatagaaaccaagctagatggtgaacgtatgcaaatgcacaaagatggagatgtatataaatacttctctcgaaatggataactacactgatcagtttggtgcttctcctactgaagtgtcacggtaccggctcaat

SEQ ID NO: 245916 - DNA, 274 bp, Homo Sapiens
ttcgtgtgtgtagcttgtgtggcattatatagcattatattattttctacccttatctactcatacagaaattgcacaggtaaaaacatcaaagtttattcataaaatgtggatctattgcagtcactaaaaatgttgcagaacagattttaatgactgaaagtgttcatgactaatatattcaatgaaaatatggttataaagttttatagtcctttttttgtttaatatctatacaaaagctactgaagtgtcgacggtaccgagctcgatc

SEQ ID NO: 245917 - DNA, 909 bp, Homo Sapiens
acgttgacacttcagggagtttgtcttttctacattagttaatgcttggaaccattcatacttgattaaaatacatcgttgaaaactttccctgtttttgatgagttgatttttgttttaactgatttaaactttttcaaggtttaggcaatgacatcatcacaattgttgattatttggtaaactatgacttcttgcaacagattagtggtcctggtttatgttcttgactagtatgatgttatctggactgggctgtaaaaatctgtgaacactgttgctctgagttaggaacagaatggctggggcagaaccatttttggcaggtgagctgcacttgatatctaaattattagaaaatgccttcatctgtaatcattcatttatggcttttccaaagctggtaggtattagcttgttctaccatgtgtgatccgtttaaatctaagtattgtaggatttttaaagagttgtcaaaactgatggcattaggtattctaccaacattggctagaaaaaaatcttgactgaagagcttgtcattgcagaagtaggatactggagagaatgtatttaaatgccaacctgtgaagtaaagggtcagatgatggtttatgtcaatattgagaatgtaagtactaaaaggattggccatttattttgatagctgtctcaactgaagattctcaaaaacagcaagagtcttaataggcattggatgtttctttgtcatgttactcaaattctgtgttatgaggtgctaacttcactgtgtttaaatccatatattatatattttgctacttaagagaaaaagactaggccatgagtcttgatgaagcatattgtgatttaggcaggttatactcccaacttaaatattttaatttattgtgaacgggggatcct

SEQ ID NO: 245918 - DNA, 596 bp, Homo Sapiens
aaagagtttattttaacttaaagtttccagaacagtcctaacaaaaaaattttctagtgatggatacagtggaggcatataagtgactttttaaacttattaggcatagcaaataagtctttatgtacttggtataaatttgacttttataactgttcacctttcctgatgtattttaacagacatatcctgttgcaatgatccttaataaaatgaaagagatcttagcatttggtaagaccaatgaaactgcttttgtgcccagatcacagaaaagaagctccctgggtatccttccttagaatttacttttatgtctgaaatcaggatgcttcctttttttggttgtcttctttgttttggttttaaatgtgtaggtccccagaccacattctgttttagggcttctgtaaatactcttaggaaagtaagtcatgaaattctgcctcctcgaatttcataaaggatttgtttgccatgtgctctgtcctgattttggcaacatatcaaataagccagactgttgaatgacaatctggttttcagtgtattacatacgcatgtataaatatccttgtacggggtcaactctacag

SEQ ID NO: 245919 - DNA, 659 bp, Homo Sapiens
gagtgatggcgctcctagaggatcccgtagacgcttaaggttactgttactcctgcttatggatctgatgtacagagcagcaagtatattactttcacggagggtcagtttacgtgcttgctatattagtcactgaaatgcttctttcgataggtcagatgatattgaaacaaactagaattctgtttcctgtctgacttgtggaattgcagtatcagtgttcagaaaacttaccagacttttgaacgtaagatcgactagcattcaagtagaattacaaagtccaaacgatatgactcagctgggataaaaagtgctgttttatcttttttctgttccagtgactcagcaaaaacagtgctttggacatacggaaatgtaggcaaacgaatatttctgcatacagggaaaatgtagacctttacttttaggacgactgtttgttagtggaccagcccaaaattcttttcagagttttgcaaatccacctgagtctccacaagtgcaatttcatctgtgggttcttctcttgaaagtgatttaagcctccgtagcaagtcaccccgcaccggcatacatctggggggctcaagagcttaggctgtttctatccagtcatgtgaaatttatagttgttcagttgcctacggttcacctag

SEQ ID NO: 245920 - DNA, 703 bp, Homo Sapiens
ttgacactacagctcctggatggacgttaagcacttaccattactcagaagcctggttggctcttcccaggctgagggcctaaggtctagggcgagggccacccatgataggtgatgcccatctaagttgatggggcttagatgacagagaaaacatatttccatacacaggtagatattagatatataggattaatattatatacataatatttttttaaccaccccagaagtaccactcgttacaagagatttataaataaacgtcacatggctgaaactgaatcgatttggcaatctgggctctaatcttggctgtggctctgtaataaagctggtgacttggggcgagtaaacaggtgatattctttgatttggaaattcaatattcagcctttttagggatgggaaatgagtatttactccagttggttgatgttggctacctaccaggctcaagagagattgttttcattggttagtaatgcatagcttggcctacagtgtggggccattggtgtacatgccatgtaagtgtcatctttgggctgtataatttttaagatctgactttctaaagtataagactgtggttagcagaagttaaaaccaacaaccacaaataacagatagtttattaaccatgaattttcactatcttttcttcacttaatttttaatagcttcgacatttatcttataa

SEQ ID NO: 245921 - DNA, 160 bp, Homo Sapiens
aaaaataacgaaagtaaaaatgtattaaatctggccagacactattgcccagtcgaagcctctgagcctgaggttttctgcttttaaataatgagattaacagccaggtacggtggctcacacctgttattcccgcactttgggaggctggctgcatgcg

SEQ ID NO: 245922 - DNA, 189 bp, Homo Sapiens
ccctaagctttgacagatcttagtgtaaagcaggtgcctgcatttactgctaaacagagaaatgactccaagattttattcttgctcctggcctctccttcgtgatgttttgaaagtgtgttgtgaggtgggctgcggtcggtgcacgcctgtagtcccagtcactactaccgcggtcggaatcacctg

SEQ ID NO: 245923 - DNA, 395 bp, Homo Sapiens
aaaagttacgctactacctttattcttcttgagtgataccaggagaggaaagcaaaggatgacacagaaaattctgataaaagaaggtgacagcaataaggctaaataaactgttcagctagaacctctcaagttgaaatcagaaattttctcctgatgtattgtataatatcagtgtcctcatttgttattacagcattagctactaattgtctcccattgtctatttacctccttcttccttttagcaatagacccatcctcccttgcagttttaggaagcccagcttgataccgcacttcccaaactcccatatggctaggagtcaccaggtgatgacattttagaaagcagaatgtgagcaaaaatgatgtgcccaacttcctagtcacat

SEQ ID NO: 245924 - DNA, 108 bp, Homo Sapiens
tcaatacagagcacctacaagtcttaatattgttggtactaaacaaagaatctccactcaagctctttccacaagaaaaatgcactacaaattcagtcagaggatgcg

SEQ ID NO: 245925 - DNA, 378 bp, Homo Sapiens
ataaaagctacccgccaaagtgagagtgcaggtggcagcatccttccaagctcattaaatctttcagttaaactggcctagtaagccataggctgatactagggatcaatcttcatgacccatatagggaaccaatgttttgagaagctataatgcccaccttatgtaattgggagtttcccctcttctatatctcgttctatgaaataatattttgcaatccttctccagagcagactctttttattttagatatttccatcatgccatggggaatgacaaactagtaggtccaaggatagactttccattgtactatttctttgtcccagatgtggtgtttggggatgcactagagccattctgcgggtagtacta

SEQ ID NO: 245926 - DNA, 428 bp, Homo Sapiens
  misc_feature (36)..(36): n is a, c, g, or t
  misc_feature (42)..(42): n is a, c, g, or t
  misc_feature (50)..(50): n is a, c, g, or t
  misc_feature (68)..(68): n is a, c, g, or t
  misc_feature (91)..(91): n is a, c, g, or t
  misc_feature (107)..(107): n is a, c, g, or t
caggaaaagggggggcctccccccttaaaaaccagngggccnaaagggcngccaagagggttttggangggaagtatggtttggtcccctnaggggtttaccaaatnttaaggtacccctggataccaaaatataccttttaaaccttcataccctttttataaaaagttgttgcagcaaaataatagccctcggttcctatgccatatatgggattagcctataaaaaatgtcaataagattgtacaagggaaaattagagaaagtcacatttaggggtttactttttacacttggccagtaaaatagggtaaatccctattagaattttttaaagaactttttttaagtttccctaaatctgtgtgtgtattgtgaagtggtataagaaatgactttgaaccactttgcaattgtagattcccaaa

SEQ ID NO: 245927 - DNA, 289 bp, Homo Sapiens
taagtccatgctaaaacagatcacagtgggaaagagaagaggcgatgagaacctagcagttggaacacagaactgttcttcaagagagattctcagaataagacatgtctcaaacttagtagatgagagatttagctacccttcagcctaaagagagagcttgtaaggacacaagactagaagtcttgaggcattccttctaggggaccaaataggtaactgtggaaatagaggtatccctgacagtcacgaaggtaaagaataatattcagtagtgtgtagtgcatgg

SEQ ID NO: 245928 - DNA, 241 bp, Homo Sapiens
ctaaaagatgaaccagtcaaaaatgactataacttttcaagacatagcacaaaaagatatgaaacaataaaaagttaaaaagcagagggacaaggttaaagtgtagagtttttttaagtcttgttttcgtttatattgttatgcaggcagtgtgaagcttgttatcaggttaaaataatgggttaaagatagtctctgcaagcctcatggtaaccttacctcaatggggtatcctctatat

SEQ ID NO: 245929 - DNA, 212 bp, Homo Sapiens
attaatgttttttcaaatgctaaaattgataaatagaaaaacctgttaaacctcagtagataaatgggcagaaggtatggacagacagatagaataagagatcaccagtaaatacaatgataaaatatctggccctgctaataattttaaaaatgcaaaccaaacagtagtgaatgactatatttgtcctattaaattagcaaaatctgcgt

SEQ ID NO: 245930 - DNA, 518 bp, Homo Sapiens
cacgcagattttgcacataaccatacaatccagtcagactcaattcctgagaaattaacatacaatatattcatacaactaacgcctaatgaattataattctgttcattatgatttcggtactaattgcagtttaacataatagctgatatacaacagttataattcaaacttttttgtatgtaacgtaaaatatgtactatataaacaagaatactgaatataattcagtgatcattgtacctgtattactcaacgtccctccaggaaaatagaaatgatttcaggtattcatatcataaggaaattttagcaagaaactggttatataagtgatagaggagctataaaggtaatgttacatagaaattagagacagcagcagtcactattatcctctagactagtaaataaatataaggtaggaagtggtattatcagagtcctcagggtactgtagtctactacaaatataagtctggaaccacaattttttccatctatgttctggtatcatg

SEQ ID NO: 245931 - DNA, 376 bp, Homo Sapiens
gatttagagctttatgaaaactggaacaaaacttttggttgtggaaagtaagtgggatacttggaatcaaggcatctctgtagtacagtcttctttattttttagcatagaaagttggggatgtgttaattgtatttttaagaatatattctaaattctgtacttcaaataatagcacagattttacatctgattgacatagtgtatgttaatgtaagttttgctttccagtgattacctgatacgtaagcctatttgaacaaagtgagaatgaacttttgtttctaagaagtctttatcttgaagctatataacatgaaaagtgagctcaaatttttttagttgaagattacatataaagttgtgtaaactgatt

SEQ ID NO: 245932 - DNA, 698 bp, Homo Sapiens
gcgtgagccactgcgcctggccatcaggtaacctttatggctctttcaggaaaagtgaaatcagagaggcgtaccctagccacagctgttgtattctgctcttctttcctttttggtgagcttcatgggtggagttatcagtggtctgtactttgtggatattttgcccagcaggaagtattagacacatcagtctagaagcattgtgaaaaggttgtttccggtgtggctgtgtctgattcgagtgttgctgccaatgcgcaggtgctctcgaaaggaagtggtgtcagcatttcggcgacggggggtagctctcagagtaagtgatgaggtgcaaacgagttccggtgggcatggattcgctaggcagctcgctcaatgtacgccaggtgacgatggctgcaggtattttggcaaccgatggagtgagtaaaacgcaattggataacagtatggcggcggccaatagctatacagatgcgcggttctcggcgttgaacgatagtttcgagagtttgcgtagtgatgtgaatggacagatgcgtcggcaggatcgccggatcagtcgccaaggagcgatgggtgcggccatgttgaatatggcgaccagcgctgctggaatccatacccaaaatagggttggtgctggtgttggcttccagaatggtcaggcagcactttctctgggttatcagcgt

SEQ ID NO: 245933 - DNA, 1104 bp, Homo Sapiens
  misc_feature (265)..(275): n is a, c, g, or t
  misc_feature (397)..(397): n is a, c, g, or t
  misc_feature (444)..(452): n is a, c, g, or t
  misc_feature (1044)..(1044): n is a, c, g, or t
  misc_feature (1046)..(1046): n is a, c, g, or t
  misc_feature (1056)..(1056): n is a, c, g, or t
  misc_feature (1068)..(1068): n is a, c, g, or t
  misc_feature (1080)..(1080): n is a, c, g, or t
ccacccccccgcgtggttaaacggtgcggtaacatttgggcggcgagggggcgtgcgtaggtataaaggatcgcgtgcgtggcagtggcaatgtaagaagggaaaagaagtgaggggggaagggatagggaagggatgaagcaaggtaaattaacgggtcgtgaggcgtatgatgggtgaggaattagggagagggttcgaaggtaaatggggagaggagatgggggggttatataaatgggcgtagggtagggggcgaagaaannnnnnnnnnnctacaaccgcgcccatggtttagggtgaggaggtaagagatggtgcaggtcacttttggggagggccaggtttttcctttatcccacctgcacggaccccttccgcagtgaggaaaaggatntggtccctttgacagtaagggaaattgtatagaaattatccggaggnnnnnnnnncccactgtgacgctacctaaaagaaagagtatttcaatttgcttacacagatttagtcagtacactcctgactgtaagaaatgtatgaagagactgcttacggaactcaaagactaaacagtgaatactactgtggcccagacacggatcgaaaacacttctcccagtggcttctggtgctatgtctgctctcccgagagcgtccagcaaggtcttccatgcagacagggtgaggagccacagagctcaagattgttgaagctgatttagtgagctctgtaaagcaatactcaaacagctccgtacgaaaaggtgtcatttacattattatttatatatagtatctcgaagtaaggaaaaaagcaccattttactgaaaataaaaaggctcacgcaggctttggtcctcctgaaatgacaccagcctgagtgagaagcagttggcccttggggagccggggagatgatggaacgctgtcaccggcaagaagggaggccaagtggcccggcaagccacaagaatggggcaataaggggagcaggtggagggcctcggaaagcagccaggctagtctggggatggagccactgntntgagagatcnaaagtaggtttnccggacttttangagccacttgccacccgggaacct

SEQ ID NO: 245934 - DNA, 639 bp, Homo Sapiens
  misc_feature (17)..(17): n is a, c, g, or t
  misc_feature (31)..(31): n is a, c, g, or t
  misc_feature (57)..(57): n is a, c, g, or t
  misc_feature (72)..(72): n is a, c, g, or t
  misc_feature (94)..(94): n is a, c, g, or t
  misc_feature (98)..(98): n is a, c, g, or t
tggccaatgggacaggncaaaaacaccgtgnagacaccgcaaccctgctccagctgntcctgcaattgccanaggggctattgcctctcctgcnaccnagctcctgagagtgaatcctgacacgggtgattgggacgtgtacttcctcttgactctggtctcaggactgaggctcacaggagcttgagaaccagacaagcgggagctttctagccccttccagttctcccctgctctgaagcctagaaaaagcccctctcaggctactggtcagaggcctggatgagggcagtgggggcagaaggggtctggatcagccttgctgccacccaacacaacacacgtggaagcggtgatgcttagcccacgaggagatgggagactgcagtgctgcttgaggtgttttataaaaagcagaagccaaggccccggggccttctggggctgatttgtgtggtaggcggcacagaaagccgatgccagggtggcaggcatggagaccaccccccagggctctggggtggcacaggggtggagcagagccacacatggatgtaccaggagctctgcccctcatagaaacatctgcaggcctgggggacccaggggtccctggccgctgtcaggagccacttgcca

SEQ ID NO: 245935 - DNA, 397 bp, Homo Sapiens
tgtcttcaagagaggaaggagtggcggtagttagcttcaatccctgtagctgggtttggagatcagaacaccttgtccattgcggctcctgtttcattgttaagagtccacacaggatgttctctggcctggacaccgctaagccagctttcagacaagtcccctcagtaagagcagagtgaactctttattgattatacaaattaccactatttattttaaacccaaagtgacttcaaagttgttttttggtttttaaaggggctacagaaaatggactgaggggaaggaatgggcacaatatctaggtctagctgaatcacagagctgttagctgctgctttcatccacaggtactccttttaccttattattttttagagagtcttgaagacat

SEQ ID NO: 245936 - DNA, 677 bp, Homo Sapiens
gggcttacattttttcttacagcaatcttttgagaaaagaatagagaatgtttaccaggtagaaaaaacctgattccttaacaagacttctcagtcacttgtttctctttccctttcacttttcctttgtgcttttgaaaacaaaggctaaagcaggtgttataaatttattcattcctgtgctagagagcatggaacacatctctgaagtcaactcttcttttggtgtatcacgagttgaatccttaataaatgactgccacaaagaaaatttctaacagcaaatctttttaggaactgctcaggttttgcctttgtcttgacacttcattttaaaatcttggtttctactgatgtgttttcaaaaaagctgacaagctcggtctgaaatgtagacactgaaaaaagtgaaaggaagagaacatgcaatataagttaatcattatcattttaagtgccaccagttctgtttatattaatgcacttgtgaattgctgaatctcatttgatcaacccaattaaacattaaataattgcagccaattatgcaaatatcagcaacaatattaatttgttgatctttttgagcagattagcttcacatgttcctaatgctagaccatcttatgccttaaacgatcaattagtgtgacaataactaagtcttgaagacactt

SEQ ID NO: 245937 - DNA, 467 bp, Homo Sapiens
caggagcatatggtccaaacatcatacacacacaccgcgaaagaaaaactcactgctaatccagatcacagcacactatggacacaccagcgctcaagggaggaggacggttcccccggggagctcactttacccacgcagatttccggaggctcttcctctgcaacagccactgaaagcatgtgagggacagccccacagcaggacagaacgtggaaccacgggataccactttcaccttgcttcccctacatcatccaagccccaggaacagcacatgactctgcaggatgcaaagaaacatattccagacaacagtccaaaaatcccaccttgcggacccatggttcagcgccctgctactatgaagacaacacatcccatggagcctctgcacacagcggacccatctgtggtcccagctactcaggaagctgaggtggaggatcacttgagcccaggtcgag

SEQ ID NO: 245938 - DNA, 351 bp, Homo Sapiens
gcagtggcagccactcagtgatgagacaactgttgagtgtggcaaaatggcgccttgaagaaagaggcctaggagagcagccctgtaatgtatccagtcagctgcatggtactgactgagctgaggagtcaaactcttctttctgtatgacatatacatatacttgtttataaaataatcatttgcccagggaaaaaaccacaacgctgtttcaagctttagctcttatgtgttgaaatgtttttgtaagccttggcatgaattagtgttctagactctgctttgcacagcttgcacttacagtgattgtacatattgtacatctttgtacagagacatcttgaagacact

SEQ ID NO: 245939 - DNA, 446 bp, Homo Sapiens
acctgcatgatgattcctgctactgcaaagtgaattttataaaggcaaaatactggagcactaatgcccatgagattgaacggcacagtgtttgacaggagtggaaaagcggttcatcggctgtttgggaaatggcatgaaagcatctactgtggcggcggctcctcttctgcctgtgtatggagagcaaatcctatgccgaaaggctacgagcaatactatagcttcacacagtttgcgctggaattaaatgaaatggatccatcatcaaagtctttattgccacctattgacactcgatttaggccagaccagaggtttctagaggaagggaacttagaagaagctgaaatacaaaagcagaggattgaacaactgcagagagaaaggcggcgggtcttagaagaaaatcatgtggagcaccagcctcggtttttcaggaaatc

SEQ ID NO: 245940 - DNA, 761 bp, Homo Sapiens
ctcctagaggtatcccgagtgtttcaagacagagctggccggtggttcaaacaccaactctgggattttcagttaggttgttgccaaatcctcaggcagtgaaggtgtatgataactatatagagtagacatttacatagtattatgacatgttagtgataagagtatcgtgttaaccacatttatttgatttaattatcaccaagcatctcttttcatgtaatattttactgtagactttatacataggcagtgtgttgcatcaatatcagtgtagtatgtggaaatcttttacagtagaagtgttttcttttatttggcgcacaatagtccaaatttctttaatccttcttttgcatgtttgtttttcaaccctttctgtttcttccgtctctagaatggctggcttttattgtatagcagttctgtttgttcgtttttaagaagaactcagaagagttgtattgcctcaatttgtaaagcttaaaaatgtttgcctttataatttaagaacaccttggctaggtgacaagtttttacttcttgtgagcggtaggccacaggagtatggtaagagaagcaacaggacaaagagcttgatcttgttctcctttgttgtggagcccttacatgttttaaacatgaactacttagcaacaattccatgtttcagggaggggacaatagcaaaccagaacaatacaccgggcacagcacaactgaaatcatgataatctgagacctgcggtgatactctagga

SEQ ID NO: 245941 - DNA, 628 bp, Homo Sapiens
acagcctgaattttcaaatattccctgcctccaacccctttgggatcctagtcttcaagccaataacagagcaggagtctgaccctgttctgttgcctggcacggctgaatcaaagccattctggaagcagatgttaaggtgaacttgtcacttggtatgtaggtccgactcccatcccagaggtggcagtgggccttggctcaagatcaagtttgaactaaaatattacttggatttttcacaaagagtgtccgttgaaagcaataaggaattccagaacagaactgcacttcttgtccctctctcacacttacaaagcttcagaaaacattaaaaatgcattacctcctaggaattacaaaagatcacccaactgtacaaactagatatcgctgaagcagagactctgattcctcagttactactgtaaagtgctttgccactctttttgagactccagagactaggaaaatggagatgcacagagagacataaggagctgttttccaagacatggtaaatcagtctttcacaaaggcttatttttccaggcaggaggagaggctggtggtcttgagcttttggcctggaattccagtctgaattttcaaatattcctgcctccaa

SEQ ID NO: 245942 - DNA, 406 bp, Homo Sapiens
tggctaaacttattcaaaatgtatttgaaatcaaactacagagttttgtgaaagagcagttagaagaatgtaggaagtccgatgcagagcaatatctcaaaaatctctatgatctgtatacaagaaccaccaatctttccagcaagctgatggagtttaatttaggtactgataaacagactttcttgtctaagcttatcaaatccattttcatttcctatttggagaactatattgaggtggagactggatatttgaaaagcagaagtgctatgatcctacagcgctattatgattcgaaaaaccatcaaaagagatccattggcacaggaggtattcaagatttgaaggaaagaattagacagcgtaccaacttaccacttggccccagtatcgatactctccg

SEQ ID NO: 245943 - DNA, 742 bp, Homo Sapiens
ctctctggaaatatgtccacccaactctttcttatgaaagtatgggttgactaaaaggtaggcctgaatatttaattgttatttccccccagagtctggaagaagaacaagtcaattgtgtgtgtggaccctcaagctgaatggatacaaagaatgatggaagtattgagaaagtaagttaggcataacaaggggtttcagattccaacttgtactgaagagtttccctttcctgggcagtcaaaatagggactagcttgaatttatgagaagttcctaagacaaatgtgtgtttttcactgttattgcttatcagatggagtaggggtagctcattccagcagctcagtaaaccaaactagatgccagtatacataagagtccttgcccggtatctccagaggaaagccacagtttcttgtgtttctctaaacatgacaattttgtttttgtttctgcttcacagaagaagttcttcaactctaccagttccagtgtttaagagaaagattccctgatgctgatatttccactaagaacacctgcattcttcccttatccctgctctggattttagttttgtgcttagttaaatcttttccaggaaaaagaacttccccatacaaataagcatgagactatgtaaaaataaccttgcagaagctgatggggcaaactcaagcttcttcactcacagcaccctatatacttggcagctctgcattcttacttcacacgggga

SEQ ID NO: 245944 - DNA, 396 bp, Homo Sapiens
tctggtgtggtgacgccagctgcttccggaacactgctgcctgctcttgtgccttggataagtggcagtggggggtttttggaggaccaaatgatgcagtttctgttgttaattattaggagagattgaatcatgtccacaggagaaaatagaggaagaaattgggttgtctgtcagtttcctattatagataggaagttttagaaatccttgattgtcttgaaggcttggatttagaaactgtagccagatttattagggcttctaatagtgaagaagctaggtgtgtccactggtttacagttgtaagttaattgaaaaagttactaaacctagcctttcttttctgctgccattatattatgagtttatcattattcagtttttctcaacggg

SEQ ID NO: 245945 - DNA, 542 bp, Homo Sapiens
tccgtttctccccgtgtgagttaggggtaggagacggaacatcgacagaacagagctgcagaccatcaccaatgaccccagactggtcttcacagtgcgagagttcagagagcttcccaacatagaagaaagaatcatgaactcgtttggaccctccgcagccactcctgcacctccaggggtggacacccctcctccttcacggccagagaagaagaaagcagacattgtgttcctgttggatggttccatcaacttcaggagggacagtttccaggaagtgcttcgttttgtgtctgaaatagtggacacagtttatgaagatggcgactccatccaagtggggcttgtccagtacaactctgaccccactgacgaattcttcctgaaggacttctctaccaagaggcagattattgacgccatcaacaaagtggtctacaaagggggaagacacgccaacactaaggtgggccttgagcacctgcgggtaaaccactttgtgcctgagtcagcagccgcctgaccaacggggagaacgg

SEQ ID NO: 245946 - DNA, 358 bp, Homo Sapiens
aaagtatagccagttccttcccgatggcgactatgtttggatgttggatctacactttctcaagcactgtgatcttcaaatcaaaggagatttctcccattatatacttcttatgatcaacaaattccatcatctccccactaagagaaagtactccaagatgatagaatgattttaaagttatgggactacaacagcagccacaggaaccttgaacccctgcttgaaactgcttgtacattagagacagagaggagtccatgagaatcaacattttctgaggactccaactgtgtgccaagagagttcccctgctggtgcctcctctgtagtaaaggaaaggctcctgggaccacct

SEQ ID NO: 245947 - DNA, 918 bp, Homo Sapiens
  misc_feature (174)..(198): n is a, c, g, or t
gttggggcagtttttcaggctctctacggagagagaagtgggccagtaagggagagggctagagaggggacaccagtttacatagggttgactttcacttgtgtgtagtagcagttcagaatttaaaagaaatttccttgcagaaagaatgtcttcctcttggcccctcttaannnnnnnnnnnnnnnnnnnnnnnnnatctttggcagcatagaactgattgtggtcctccgatgcatttctggtgtcgagaacttcctttctcaacctccccttcccccatagccatccccacaagctgtcccatcaaggaatatttcaggtgtaaactgaatatgccacgaggcctcctcttcatgaagtgcttggttggcctacgtatgggtgcaggctggacacagctgaatcgtctttctgggtcaccctgtaactcaagtcccctttcccgttctctcccaacgctacttatccgcaggaattggatgccggctggcccccctgatggttcctggcctaggggctgtcatggcagagggaagccaccaaggtgccattgaggattggtgtctggctctctatgggcaagagcgccaggggacacacagtgggaccggaaccttccagaatgtctcctcagtcaggttttcaagggggagggaatgcggagacaggagaaaaaaagtgctgagggccaaagctggtgcagggtgacggtgcgtctgggtaaggcaaatgagaggcagtgaggtgatctcagaatggcgttgaggcggtcagattaggccgggctggctcacacgagggtcccgggcttggctttttcctgcccgtaccactggacatcagctagttctggatagagggaggaatcggacgcgtggtcgacgatatcccggaattccgggccggaccagcctg

SEQ ID NO: 245948 - DNA, 366 bp, Homo Sapiens
tttccactttttagagataaggttttagaaaggctgctacctagcgagtgggggtgagggtaccattctaagagctctgacctcgtccttcagtgcatgaggagacagatggagcctgcgcgcctcttggtgcaccctttgagcttcgcatcctatttcttctttcatggttggtccaggaccagttacaggagtggatccgcggtaatgtgagtgcatgtgcgaactctgttttcatatttagacgagatggataaattgcaacccgggatcattgacgcaatcaggccgtttctagactactacgagcaggttgacggagtgtctataccgacaaagccatctcatcgttctcacgtcaagcgg

SEQ ID NO: 245949 - DNA, 468 bp, Homo Sapiens
gaagagaaactcacaaagacaggaacatttccttgaactgatagagcaggagccttcagtttgcaaaggtacaccattgagagagactagcttaaaaaatgtaaaaattgccacactgactgaaattttagaacttctgcgataaagtaaaactcccagaaagttcctgtctgggatagggggcaataggagggaaggcaggtagcatactacctttaaaatttaggaatcagaatagtcctagacttaccattaggaacagtggaaacttagactctaatgaagctgttcattcaaaatacaaagtgaatctgattttcaacctaagattgcatgcttagcccaactttgaatttcggagtaaaaatattttcagatttgcaaggtcatagaaaatttgattctttgtaaaagatattggagtgggggatggattagctaaagcatgactttctacagtgaagagaa

SEQ ID NO: 245950 - DNA, 683 bp, Homo Sapiens
gtccacccagaaggcacaaacttgaaagctgggaaggcaacacagttatgaccatactctgcccacgccagaagcaactgagtttctaaaggagagtgacccgcctccaagagctggcaacgaggaggagtgcccagaggaggacatggaaggggtggaggatggagaggaaggagacctgaagacaagcctggccaagcaccgaatagggacaaagaggcaccgagtttgtcttgaaataccacaggaggtgagtcagagtgagctcttccccaagggggatctgagttctgagcagtatgagatgacggagtgcccggcagccctcgcccctgtgaggcccacccatagctctgtgcggcaagttgagggtggtcttaccttcccagattattccgactccactgaagtcaaatttgaagagcttaaaaatgtcaaactagaagaggaggatgaggaggaagaacaagaagcagctgccttggatctttctgtgaatcctgcgtctgtagggggacgccttgtcttctcaggctccaaaaagaaatcatcttctagcctgggctctggctcttcacgggattctatctcttctgattcagaaactagtgagcctctctcctgccgagcccagggcacgggagttctcactgcgcacagtatcccaaacggggagaacgcga

SEQ ID NO: 245951 - DNA, 577 bp, Homo Sapiens
caagtctgatctcaggttctttctggccctacagagtcatgatgagattaatgagtaattttctccttaattcctcatataaagtattataaaggttttgtaaacttatcttggttttaggagggtttaattctagaatggagtgaaagtaaatgtcagtaatatagaaacaaagtatacaatacaataagtatacgtttaattgtatcctttttcttgttaaaaacttttcagttacttcctaaattgattaaattgaggcttgcaaagataatactgtttcttgtatttacatatttttgttgttgttcccaagatcgctttgaactaccgtcaacattttcaattggggcagaatctcaggttcaaataagtagctagtctgttgtaacatcagggcagcaattcagatttctggattctgaattcatttttttctgggtcacagtacactgcctttaggatgtgtctttttaaacttctttttcctctaaattataaaatcagtttataccttttggggaaattgcggaacaagttaaaagttcatgttgtgtattcagtcatatagtctgcc

SEQ ID NO: 245952 - DNA, 493 bp, Homo Sapiens
tcgttagggagttactattaattgttttttaatattaagcatgataaacttcagatgtttctctttttaaagacctggttttcgtatattgagtggtttcacttttgttaccttgccccaaagtaattgaatcagcaacagaagaaagcatgacattttaattgtctacgtcaaattacataatctagtgaagtatgaagactcactgttaaattattaatgacttttgtttattaaaccaagcagtgaaagagatggtatagggacattcccctcatattttataagtcatactactggctaaatagtatcaggattgtttttagctctgcattgctaactgagtgatctgtctaaaaaccttccattagactgtgtccctccatttgcttttaagtcttaaaaactgctgcttaccagtcaaagtctactattatcgttagtatggtatttaaagcttttaagttctagccgcctgctaactccctcaaag

SEQ ID NO: 245953 - DNA, 362 bp, Homo Sapiens
tcgttagggagttaaagatttttgcatcctctgccaaagtcttggaattctttaaagaagacgttttttaatgtggtacgcctttgtacttgtcttaaatcatttttgctgtaagcagataggtttcaaacttgagaggacaagcaagaggggaactaaggagaaaaggatgccagaggctagaaggctcatcattttatgcaaaaagagccactgcagcttcattgatgtactatctcaggtagtcagaaaaatttaatctagaagctttaatgcagtttgtccactttgcatatatctaccttgaggtttagaatggaaaatatatagcaaaatggatttaaagtttttaatcttggtta

SEQ ID NO: 245954 - DNA, 506 bp, Homo Sapiens
ataacaaagatttgtgcagaactaaacagaattgagaccaaaaaattacacacagaatcaacaaaacggaaagttctgtttgtccttctaaagggtaaacaaaattgatagactgccagctagatgaaccaagaaaagagagaagattcaaataagcacagaaatggcaaagatgtcattacagtggataccatagaaatacaaagatccttagagactactgtggacatttttatgtgcacaaactagaaaatttagaggaaatagataaacatctggaagcacacagccttccaagagtgaaccaggaagaaatcaaaatcctgaacagaccaataacgagttataacgttgaatacataataaaatctaccaaccccaaaaagtcctgaaccaaaaggattcatagccagattttactagatgttggtagaagagctgataccaatcttactgaaactattccaaaaaaataaggtggagtgatatcctccctaactcctaaa

SEQ ID NO: 245955 - DNA, 611 bp, Homo Sapiens
tcgtttagggagttatggatcaataaaccaattgaatggagcaatgttggaacatattcaagaagatactgtatctgaattgaacttcatggaagtttattttcagttacactgaattatgtctgttcccaaagtgctggtgggtaacataaagttagagataaacagcattaatattctcacacttactatcccataagagtctatgagctaggctggtttccatattctgtagaataccgtgtgatgcataaagggttcctaaggagaaggattgcttgacggggtgagcaaggtttatggaaaatggcatagtcttcgaatattcaataccagtagaatataattaactctggcattgatgtctttttttaatgaaaataagtaattcaagaccaaagctgttgaaactttaaattattttgagccttaaaagaatgtgattataggacttgagtcactaacagatagctgtaacctaggaagttgtagtatttgtttgcctgattataaattagcctttttccattacctacattgttttttagaatgttgtaaaagactaacgagtgccagagaagaccctttccctctttatttttgatcttcgt

SEQ ID NO: 245956 - DNA, 346 bp, Homo Sapiens
cttcgtgtgcctgctttaatatttccattgtagtgactaaatattggagccaaaattccattagttcaatttattttaaaagtttctgatttgtatatctgtacagataagaatcttaattgaatgacagtaactacaagttttatacctgtggcaaatactgtattagcatctatagatttagggcaatctttaagaaaaaaatggaatggtcagagtctaagttatttcatcactgtactttggttaatgtgaactatgattcatatattttatcctttcaaactgaaattacctgctagagtgagcaaccatctcaccactgtggctctttagcttttcccat

SEQ ID NO: 245957 - DNA, 491 bp, Homo Sapiens
actctagagtatccccgcgccacatgtgaaaaacgaactggttttataggtactccagtacatactggttttgcacaatggtcaagttgaaaaactgtaagtcacggaccacggggacactctatgtacatttagaactaatctaagttcactttcaaatgacactataccacttaacaagtagtacaattactttataacagaatattcccaattcctttgtcctcttccttattgctgtcattcattttacttatccataagctgtaatcactgacacattgttgctattatttgttttgaacaaactgttgtctgtcagttaggaataagaaaaagagtttattttgccttcatttattccttctgtaatgtgctttctttccttatgtaggtccaaatttctgactgaaatcattttctttctctctaaagattatctgttatcatttctagcaagacaaactttctggtgaagaattctctcaatt

SEQ ID NO: 245958 - DNA, 488 bp, Homo Sapiens
aggatcagccccatgttcaaaggagtgggctatggtatgatggtggtgtccacctacatcggcatctactacaatgtggtcatctgcgtcgccttctactacttcttctcgtccatgacgcacgtgctgccctgggcctactgcaataacccctggaacacgcatgactgcgccggtgtactggacgcctccaacctcaccaatggctctcggccagccgccttgcccagcaacctctcccacctgctcaaccacagcctccagaggaccagccccagcgaggagtactggaggctgtacgtgctgaagctgtcagatgacattgggaactttggggaggtgcggctgcccctccttggctgcctcggtgtctcctggttggtcgtcttcctctgcctcatccgaggggtcaagtcttcagggaaagtggtgtacttcacggccacgttcccctacgtggtgctgaccattctgtttgtgcgcgcatt

SEQ ID NO: 245959 - DNA, 972 bp, Homo Sapiens
tggtacggtccggaatcccgggatatcgtcgacccacgcgtccgccagattgatgtcatgtatgaggaggaacctttaaaggattattatacactaatggatattgcctacatttatacctggagaaggaatggtccacttccattgaaatacagagttcgacctacttgtaaaagaatgaagatcagtcaccagagagatggactgacaaatgctggagaactggaaagtgactctgggagtgacaaggccaacagcccagcaggaggtattccctccacctcttcttgtttgcctagccccagtactccagtgcagtctcctcatccacagtttcctcacatttccagtactatgaatggaaccagcaacagccccagcggtaaccaccaatcttcttttgccaatagacctcgaaaatcatcagtaaatgggtcatcagcaacttcttctggttgatacctgagactgttaaggaaaaaaattttaaacccctgatttatatagatatcttcatgccattacagctttctagatgctaatacatgtgactatcgtccaatttgctttcttttgtagtgacattaaatttggctataaaagatggactacatgtgatactcctatggacgttaattgaacaagaaagattgttgttataaagaattggtttcttggaaagcaggcaagactttttctctgtgttaggaaagatgggaaatggtttctgtaaccattgtttggatttggaagtactctgcagtggacataagcattgggccataagtttgttaatctacaattaacgcctacattacattctccttgatcgttcttgttattacgctgttttgtgaacctgtagaaaacaagtgctttttatcttgaaattcaaccaacggaaagaatatgcatagaataatgcattctatgtagccatgtcactgtgaataacgatttcttgcatattta

SEQ ID NO: 245960 - DNA, 447 bp, Homo Sapiens
ccgtcccctcttttcccctgacatccttacatgtaactttctcattctagtctcttaactaagaaacagcaggtggcctgaacacagcacaagctgaagccagcatggcacctgagcacaagaccaagttctccaagaacctgctgtacatgaagttcatgcaaagaagactggactcagaaactaagatatgactagaagaggaagaaaataaaattagttaagagcactggtactcagatttgccagagcttaataagtaaagaatttcataacagaagagcagcatctcttgttatgtgaagatcatttctatgggaggaatttcattcatcagttttactcctgaggttgagaaattagtgcttcaggtgaatactaagaacaaagcagaaattgaagatgaaacagtggaattttacgtgtcaggggagaagaggggatcct

SEQ ID NO: 245961 - DNA, 497 bp, Homo Sapiens
gccaactaatctcgcaaccccaaacacaaagcgttttaaaaaaagaagaaattctttccagttctgacatttgtcaaaagttagtaaatactcaggacatgtcagcctctcaggttgatgtagctgtgaaaattaataagaaagttgtgcccctggacttttctatgagttctttagctaaacgaataaagcagttacatcatgaagcacagcaaagtgaaggggaacagaattacaggaagtttagggcaaagatttgtcctggagaaaatcaagcagccgaagatgaactaagaaaagagataagtaaaacgatgtttgcagaaatggaaatcattggtcagtttaacctgggatttataataaccaaactgaatgaggatatcttcatagtggaccagcatgccacggacgagaagtataacttcgagatgctgcagcagcacaccgtgctccaggggcagaggctcatagcacctcagggtgccgagctcgat

SEQ ID NO: 245962 - DNA, 538 bp, Homo Sapiens
  misc_feature (112)..(112): n is a, c, g, or t
ccgacgtggcttcatttatcatagttttaaatctcagaccaactacatccaggcaaatcactgcaaacatctgttgttatcttttctactaagatcattctccaaaatcccncaaaatgtgggataatctgtaactctgctactgaatgtgtagtcaggaacactggcatcacctatgtgcttgtcagaaatgcagactcttgcccatctcagatttaatgagtcagaatctgcatcttaatcaaaatccccagaaattcctacccacttcaagtttgagcagcatttttgaatgatgaattctgacctagacagcttaactagaaaatttaaataatcaccagaaattccttaaaaatcatttgatatgtccaagaaatggtctttcatcttttctttcacatttaggaaagtaaaatagaaatgacattgcagctaatgaagacatccatattactactcgtcaattaaaaggaagtttcaatgctaatatttattgttggttgtatttagatcaaatcgttttccataccaactc

SEQ ID NO: 245963 - DNA, 783 bp, Homo Sapiens
  misc_feature (170)..(170): n is a, c, g, or t
gttggggggggaattccaaagccccttggtcattggcccggggatttccccttaaggaaaccaggttagtggccccgggtttcccgttaccctactggggcccccccgggccaaaacgaaaaggtcttagaaactttcttgaagggcccgaggccggcccaccacggccnccgcactaacgctacgggtgggtgggcgcaaagatagggtcatttattcacgttatattatttaattttaaaggcaaaaatacagttctgttttgaacaccaagatcagacacagccccctacacaatggtaaatacacacatttgcatacacaggaaatcaaaatacacagcacaacaggtctctgggacatgaaagccgtcatcctggctatgcagagcccccgcccctggcagtcagcagagaccctgtccaggctgaaggccagcacagcatctcctttactgtcctgtgccacctctgccctctctgatctttcccaaaggccagttcacacagagtcaccagcaataggatacacagaaacagaaaagggcacggcacatgacaacttcgcggtcataactcccaggaaaaggaaatgctccctgaacccccagccctgaaatccccagtaaggaaacaggacccgcggcatctcacggaccaggcaaacatccaggcctaactgtgccctggctgtgccttgggcccaggtgagcccatgagagcactatgtcagcaaatggggggagcagtatttcccttggttctaagaacgacccgaggatcc

SEQ ID NO: 245964 - DNA, 557 bp, Homo Sapiens
aatctctattagtgggtttattgacataactggacataacaatgtataacatttattcatctcccactgaaagacttcccagtgaaactaaagtagaacacagatccaggcattaggcattttcagtgatgttctatggctgaaaaggtgggtggtgaggagaaccagaggccttgtccatacttgcaatgggactcaatattaccctgctgggcaaaagaaatagctaggagatgcaatagtgctatgattgaaaaaagccaggagcacaaaaggtgccagatagctccctggttgaaaataagagcaaacaacactactgctctcatgtaccagtatgctctcaatctaaaataagccctggcagcaaactaagaatgacagtctatttcctgtggtttattaagttttggccccgcagacgagactgccagaaaagcagctgtagttttaagtggtctggacatttactcatttgaacataaacaacgatcagctcattcagatggctggttccctactcagctgttgagaagagggcaggcatgggtcaatct

SEQ ID NO: 245965 - DNA, 525 bp, Homo Sapiens
  misc_feature (47)..(47): n is a, c, g, or t
tcgttctgataaagggatgagtttggcccctctcttctctcttgccnctctgcctttctgccaggggataacacagaaagaaggcttctaccagatgcaggccccttgaccttggacttcctaggctccaaacctgtaagtctttgttctttataaattacccagtctcaggtattctattatagcaacacaaaatggtctaagaaaaggtgatagtatcacctcccttcaacagccacaacttactccccagagacatgggtcatggaggtcccttacagaacagactagcttcatcaccaaactctggagggccaggaggcaacactggtagatgcaagaagcaacagcactattggactgattggatcagggctctctccactgagtataagatttgggataggctttgggattggagaacctaaaatgtcatatttatttcactgtccttttgacaactcaggagaaggagggctgaacccatggagggagatactggagaacgatcgggtccgagccgaa

SEQ ID NO: 245966 - DNA, 684 bp, Homo Sapiens
  misc_feature (154)..(184): n is a, c, g, or t
gtgcccccggggttttttctttggggaaaacacaggttttgggccccaatttttccccttttcccctttagggggcgcccggggcgccccaaaaggaaaaatgttttatgaaaaatttttttggaggggccggggggcgcccccaccaaggtannnnnnnnnnnnnnnnnnnnnnnnnnnnnnnggggccttgccccaggattttatttattaggggtccaaaaatggggattccccaagttaataaatgatttatttccagcccacagccaaaaaaaggcttttcctggctaaaaggagtcttctctctaagttatgtaatatccaagaaatccaatttccaaagagatgttcctataagtacattttttacacggcatatatttaaaaaggaggcccccttttaatataaaattccggttatatacctatatggttaattagcatttacactatagtttgaacgtattttaaatagcatgatgtgtatacaatgtctcccgcgccccattggcaaccagggtcgtgggaagcttggtgaggagttaaccaggtcccgtggtttaagcagtggagcacccgggattcctgcccccctttctgctcacacattgcactccattcttccgccttcctgtttctccaaaccacctgataggggggatgggatcctctagactgccc

SEQ ID NO: 245967 - DNA, 456 bp, Homo Sapiens
agtgacatgtcgaaaggatcccaaacttagatctgtgaaactggcagatgactggttacaaaggtcagataaagtaaagcactggcttatattgttttctttgtgttcctgaaacagttcagttagggatggactttcacactgagaaaactgcaaattatcatttttaaaagtgtgattcttggcactttgttcaactaaagaaacatttccaacttcagtttctttactagcatttaaattatcaacagtcatattttccaacgagctagttaagtacaaaggattatttgaacttcctaaactgtcctgtactggaatgttttgaaaatcagacagtgaattattttgaatatataaagaattattcggtgttgtgccctttatgattatggtctttaaatctggtatttctttgaatgcagaatcatctttggaaatgcattcagatgcact

SEQ ID NO: 245968 - DNA, 785 bp, Homo Sapiens
aatagcgtttgatgctagagatttagtgtcacacaaaaagtccaagtcccacccccagtggttctattactatacccaagagaaaagtgaggcttattcaggttaccagtggcactcatggtcactgtggcagactctgtagactgaccaaccccacgtccattcccaaactcttccttgcatgcctctacctcagccgctaaaaagctaattactcatctgccagccagtctttcagctggacttaaccacataacctggacttggccaaagacataagcaaaattatcttgtcctgataaaagctgcctttgcccttccctcctttctcccagcccaccatgtggatatgacgcctcaagctaaagcagccaggttttctttattagaaaaagttcgaagaatcacagagattccagccctggcatcgctgaacattactataattactgtcactgaaaaagatttctcattatgtgagaaaaataaacccctttgtagttttgccactgttactacttaaagctaaatctattcctaacagatacgtcacacagctagcaagtggggaaccaagatttaaacttaaatccagctctcgacaaagcatcaaactgggtaacttttctatgaacatttactccaaactgtaaataatacattttccacaaataagtgcttattccaaagccagacagataatttacagaaacatcaagaagtcacctgagaactctgttctcatgcatcttttacttggttgctgcactattagactttcgggt

SEQ ID NO: 245969 - DNA, 355 bp, Homo Sapiens
tcgccacccgtatctctaacattatctgttatttcggggaaaaatacaactttttagttcatttcatacagatgaaagcgaattacagcaaatcacctctccactgaatagcagcccccacataatgactttatttgcttaatccccaagttaaacgccgtttcaagcgagggtcctgtgttattactctcatcatgtcgagaacattttcctgccgagaccaatttgaataaaacaaggggccttccttgaactcaatcaaggagccataatgtggtgggtaatagaggttgctgatagatttgcaggcaaaagtgttatacctaatgttaagatcgggtgcgagctcgatggt

SEQ ID NO: 245970 - DNA, 541 bp, Homo Sapiens
gcagatttattttaaacgcttcttatgtagagtttttatgcctttctctcctagtgagtgtgctgactttttaacatggtattatcaactgggccaggaggtagtttctcatgacggctttgtcagtatggcttttagtactgaagccaaatgaaactcaaaaccatctctcttccagctgcttcagggaggtagtttcaaaggccacatacctctctgagactggcagatcgctcactgttgtgaatcaccaaaggagctatggagagaattaaaactcaacattactgttaactgtgcgttaaataagcaaataaacagtggctcataaaaataaaagtcgcattccatatctttggatgggccttttagaaacctcattggccagctcataaaatggaagcaattgctcatgttggccaaacatggtgcaccgagtgatttccatctctggtaaagttacacttttatttcctgtatgttgtacaatcaaaacacactactacctcttaagtcccagtatacctcatttttcatactg

SEQ ID NO: 245971 - DNA, 278 bp, Homo Sapiens
ggtattcatgtggctggtagattctgtattagcacaaagatatggaacatttccatcaccacagaaagttctgttggacagcactgcattagaatattttcatactgctcttcctcaattaatttttgttgttaatgttgatgtcttcattggatgggtcataatgttccatgaaacctctcaagtacacaattgtatgttctttgtatcccttaccacaaatatctcgctctgctcatttcttttgcagcttcctataaagtttgtcttcctcatca

SEQ ID NO: 245972 - DNA, 142 bp, Homo Sapiens
cctagataatatttctatttaaaaaatactgcactccctagtatcatataataaaaagcaagataggaagggcgtccttagaatttaaaggtgttagaattcaattagatataacgtatctcctgacctcgtgatccgcccg

SEQ ID NO: 245973 - DNA, 420 bp, Homo Sapiens
gggaagttcccagggagaaggcagcgcgttttacccgagattcagggtctggctctgcttcccaggctagagtgcatttggcgcgatcacagctcactgcagcctcgacctcctgagctcaagcgaacttcctgcctcagcctcctgagcttcctgagtagctgcgactacagaaaaaagaaatcctctttttagaacatctcttggtggtaccatcagaaatgtcttccttaagtggaaaagtccaaaccgttttgggccttgtagagccaagcaaactgggccgtaggctgacccatgaacacctggccatgacctttgactgctgttactgtccacctcccccgtgccaggaagctatttccaaagaacctatcgtgatgaaaaatttatattggattcagaaaaacgcctattccc

SEQ ID NO: 245974 - DNA, 662 bp, Homo Sapiens
  misc_feature (14)..(14): n is a, c, g, or t
  misc_feature (332)..(473): n is a, c, g, or t
ttagagcccccagncttttatgggttagacataagctgagaagattattcagctgaaagtgctatttcttatggaaaggggacaactcagaaggtgcaacaagagtctggagggtggatccaagatccgcagagaatcattccagagagcaggtctcggccctccagccaaggaactggcagcatgtggatttcaggcttgctatggtaatgcctggcgtatagctgtttatccactctttgagtgggaatatcccaagcacttatcccatccctgtattatcagtatacgttggacatatatgaggcaaatacctttttcatattgagagnnnnnnnnnnnnnnnnnnnnnnnnnnnnnnnnnnnnnnnnnnnnnnnnnnnnnnnnnnnnnnnnnnnnnnnnnnnnnnnnnnnnnnnnnnnnnnnnnnnnnnnnnnnnnnnnnnnnnnnnnnnnnnnnnnnnnnnnnnnnnntaatcttaaattcatcttcaggttgatttagtgtcaaaattccctcaaatattattctagattctataaaatgttctagataccattttggcgcttaaaaataaatgtgaaagctctccgctaagatatagttgttcatctatgtgtaattactagttttgtaattttttgtactttcttagtcgactc

SEQ ID NO: 245975 - DNA, 486 bp, Homo Sapiens
tacctaaatggctgtgacacttctactgataaaacctgaagtaccactaatttttctgttatcatataataacaacatgaatactacttggttcatattgaacctgaggacaactaaaatcccgtcttttttatatgaaatgatataaggccaggtttcttcagcccaaacttatacaacttatttaatttaaatgagtatgttacatttctaatctgtttaatttcatctcgatggggtcattctgggactgttttcagttgccactgtcatctattatattagcaatattgggttgctccatcctcaaatcagatgtttctgatgccttcatccaaatcactgattttaaaagtaaggttgaataagacagggccctatgaaatatcaatagagaccaaaatcacattgattcagcagtcaacaatttgtttatctgggtagatgcacatgcactacaacatcaagggcatatttatcttagta

SEQ ID NO: 245976 - DNA, 266 bp, Homo Sapiens
tatgtggtttataatctttcgcaaagtaggtttattcaaaaccattttatttaaatattggcctaattttattttgcttgcagacatttaaagtgtttttgtatctccttaccgtctttggaaaagagtttgagacccacaaatatgtcatggtaaatttaaaatcaggtagcagtttattgtcagagccaaatctggaataaccaatttagttgccatttaactgtgctagaccacacttttgtaacactgtatgcccaagaaag

SEQ ID NO: 245977 - DNA, 498 bp, Homo Sapiens
tcccagagtactacagcagaccctcttgctccctgatttcattacataaacagagattgactttatcagtccccaagagagtgctttagaagtaactctagctgctctgttttcaaaaactgtgtttggattgtgccatgctcagttggcgaggtgagctgagaccagtaaagacaaaggacctaaacatctgaatccatttgtgttccccaaattctgaaagccaacagatgtactccatgtgctgctaggctaagctttgaaaatttaaaaatacatattttttccactgacaaacagaaagtgacggtattctgtatttctttaattaaaatccaagcgttctcaaaggctccgggacttactttaaagcttctttaagactgagctatttattttactattagcaaataacagagaatcaagattctaattcagttttaatcacaatcttttgcttttattttggaaaccctgagttaatcttttttcttctaa

SEQ ID NO: 245978 - DNA, 325 bp, Homo Sapiens
  misc_feature (305)..(305): n is a, c, g, or t
  misc_feature (311)..(311): n is a, c, g, or t
gcatatcaaaattatatccatctttcagaacccaaattcagtgttatttccaaagtgttccaacatctcccactcaaaatgaatcttctccctatactcccattgtttagtacctaattgttcttaccagtttgtcttagagctcagtcattcctacacagcacttttcttcattatactgctgaatttgcattacactgtaagagtggggacaagctgttcttcttgtataccagagagtagtgagtgcactgctgtggaagaaagcaggaactccaaaagttaagattttttgaattgagccntttaantggtgttcttattt

SEQ ID NO: 245979 - DNA, 432 bp, Homo Sapiens
atattagttaggacattcatctaaaaaaatcacctcaaaaatctgtgaggagctccaattctcaaaatgattaattagcaacaagaaaaaatgcttacctctcaagacagccatcttcactatcaccacggtcactgcatggctctaacaatatacctacagactgacaaaaagaacactaccatgtattaatggagctcccaatactcagataagagaagttgccaatctaaattaggatattagaatacagattagtcaaacacccctaattagctatcatttataatagtctgtagtacttagcatctctttttacagagagtaatttatcttccctcaaaacctgggtcatatgaagtatagcaggtactctgcatttctctctattaggtaatatgtatcaccactaccatccacagccatttggta

SEQ ID NO: 245980 - DNA, 746 bp, Homo Sapiens
ggcaaacatcagtgtccttctagctttagccgagaaagaaaccagtcccagggaatgaatggtggtctccccactcccggcagcactttaggcagcccataagctatgcgagaatgtgaacgctcaccttgctccgtcacggttctgacctaccacataaacaggaagaagccagtgaccggaacagctctaggaataacaagtcagaatagaagtgtcctttatattaccagaaaatatgggcttggcctaagtcgctgtctcctaacctgccggggtcattccccaccaaacaccccatactaaggagccatgagccacctggacattcaccttttctttgaccatctggagtctggggcaacttaaggaggcaccacacagtggtgcaggcacatttccaagcgtaggtgtccctggcttttgtggccaaagctagtgttatggtcaacaacaggccagggtctgtggggcactgaccttgaaagtggcaaaatggaggtttcacaggctgtgcgggagcaggacggcttgcttcatctaacaatctcagtttcctttaaaaaaagaaagaaaggaaaagatttcataagcaggtgtcagtgggacagtttaagtacttaaccctttctctttcttcttatggatgtgaactgtgctgtggataaatcatttgtatttcttgaatgttctctatgactaacagtttattaagtcggttgtgtatactgtgtaagtaatgtaac

SEQ ID NO: 245981 - DNA, 265 bp, Homo Sapiens
cctaaatggctgtggctgtgtaatgggccatggtcagtcgtatttggctcagaataaatttcttcaaatattttacagagtttgactcttctttgttgacaccttttcttagacagctactacaagatgttcttcagaaaatggatggcgcaaactgagaacaagtaagaggtggattcagaaagttttgagatccggtgtgtggagagaagtgtagttggtggccagggtgacagccatttaggtaacagcatttagtataagc

SEQ ID NO: 245982 - DNA, 402 bp, Homo Sapiens
tttacatttctcctcatctatctgttgcatgcgcttttacagatacactccaggtctagacctactgtacgacacaatcagcagctaccaagctccaaatgatgacatttcaggctcttatttccctaacctggtggacgccaacactgacattctagccacctcctgggagcatcagcgtgataatgctcaggaagaactccaaagggaacacctacatgaacactacacagatatttttactagcttctcacactttaggtaaagtttgctaacatatgagtgtctctattctattccaatgaaaactatgaacactttctcaggtttgtagtctgctgtggttacaagccaatcaaagcacatgtgtaatgcacagtgttgtgcagccatttaggtaca

SEQ ID NO: 245983 - DNA, 271 bp, Homo Sapiens
agcttgtttccaataatagtccagggctaagtgtatggccatcaaaaccaacctcaacacttgggttagcttgggagtttaagacagctgctctaggtgtcattatttcccagtcacagggaaagagagggcaagaggctagaggagagcactctggcatctctctcctctctccttccctttccctgtcccttaacccccagccccctctcctactcatttgttcttgttctctttctgcctttcacaactcaaatattctctcatatac

SEQ ID NO: 245984 - DNA, 574 bp, Homo Sapiens
  misc_feature (451)..(451): n is a, c, g, or t
tacctaaatggctgtcattttcaatgcagtgctgaagactgtgccctttactgctcgcacccccaagcgtggctctcggtttttctgcgaacctgttctcactgaggaataccattactaaactattactctttctcacctgatgctcttaaaaggttgctacaggttttttgatgtcttatgtccccctctgtgtgtctgtcagggcccaccaacatgctagcatggaattgccatctccatcatgttatattttgtgttgttctcatgctgcatggttttgcatttcaattattattgctcactcactggccactttcaatacatgtatgtattcacattgctgtaacagtctggatgtgtttgacagctgaattcatagaattgttcacagaaattttcagaaaaatagagcaaaaatattaagagcacttctttgagaatcagtatntggtaccaagtagattgcttataagatttttgagctaatgtccttcaacatatccattaataacataactgctatacctaacatgtattaagaacttactgtacagccattaggggatcctct

SEQ ID NO: 245985 - DNA, 315 bp, Homo Sapiens
tacctaaatggctgtatcactgccgaactacataactacattgttagttatccaatgctacttaatttaaaattggatatttgatctcttaatgaatggctgttgtcacatttacccagaattagaatttctcagagctctctggagaaatattggacccaactaatggatttgaagtttcaggaacccagcctaattctaaactgattacaaataaaatcattagatttgttaagccaagaaaaatgtatgatccagtatgtgattgattctgtgtctgcacatttatatgcacagccatttaggtatcaaccc

SEQ ID NO: 245986 - DNA, 262 bp, Homo Sapiens
ttatagctcttgagcctaaaagtgttggttacatcccacataaagcatagagagggaagaaatgaaaaaaggaaaggaaggaaggataatatggcatcaaagaaggtataatttttttccctctaagtgaggtcagaaagggcagtgaacagggattacttcgagatccagaatttggccctcagcctcctgagtgtttttaataccccaaagaagattttacagatcacagccattttggtaacagccatttaggtaacag

SEQ ID NO: 245987 - DNA, 601 bp, Homo Sapiens
aacagactcaagttcatgttataggcacctactacttgttatcgctggccctgatttgtgaagttctgtcatcaatgaggatgtaaccaggaggagctcggttggttccaagacccacatcacaatgtcaggtttgctcacagagcttgtgagaatgatgttgatgccttgtgtaatctccgggatttcttcaactattttgccctgagcaatcaggacccggctccgttccgtgagttgccacgatcccagtgaccctctggttcctgagcctggacactattgtccctttggaatcaaccaaggcctacaacatgggtggacatcagacactctgttggtgatgagcgtgaatttttttgagatcatgccctattatgccaagaacatcattgttggtttttgcaagaatgaatgggaggactgttggtattgttggcaaccaacctaaggtggcctcaggatgcttggatattagttcatctgtgaaaggggctcgttttgtcagattctgtgatgcattcaatattccactcatcacttttgttgatgtccctggctttctacctggcacagcgatttaggtaacagccatttagaa

SEQ ID NO: 245988 - DNA, 506 bp, Homo Sapiens
taattcgtgttgcacgaggaaagacagagaaagctgaaggagcgaaaagagaaagaagaacaacggagaatagctgcagaagaaaaaagacaccagaaggatgaagcacaaaaggaaaaatttacagccattctttatcgtactttggaacggaggagacttgctgatgattatcagcaaaaaagatggtcatggggaggctctgcaatggcgaattctgagagcaaaactgccaataaacgatctgcatctactgaaaaacttgaacagggtacttctgctttaatcagacaaatgcctttgtcatctgcaggccttcaaaattccgttgccaaaaggaaaacagacaaggagagaagctcatctttaaatagaagagatagtaacctacattcgtctactgataaagaacaagccgaaaggaagccacgtggttagttacttctaatacaaattttaaatagtgatttaaaagaggtattttatgtctacacgataagggatcc

SEQ ID NO: 245989 - DNA, 331 bp, Homo Sapiens
caactctccagggtttcttattcgtgttgcctccagcccccagcttgccaacaatgtcccagatttggaaaacgctgactcatatgaaaagctggacaaactaggggaaggatcttatgctacagtataccaagggaaaagcaaggtaaatgggaagttggtagctctgaaggtgatcaggctgcaggaagaagaagggacacctttcacagctatcagggaagcttctcttttaaatggactaaaacatgctaacatagtgctacttcatgacatcatccataccaaggagacgctgacacttgtgtttgaatatgtgcaacacgaataa

SEQ ID NO: 245990 - DNA, 1084 bp, Homo Sapiens
  misc_feature (73)..(183): n is a, c, g, or t
  misc_feature (714)..(771): n is a, c, g, or t
gctcaagtgaaccttccacctcagccttaccaatagcaggtactacaggcatgggccaccatgcctggctaannnnnnnnnnnnnnnnnnnnnnnnnnnnnnnnnnnnnnnnnnnnnnnnnnnnnnnnnnnnnnnnnnnnnnnnnnnnnnnnnnnnnnnnnnnnnnnnnnnnnnnnnnnnnnngtatgagccacagcacccagcccaaacttcaaattttaataggaattttaaacccaaccactggccaaaaatcactcggtcacgaattcctaatccacaatcacatcagtaggaagggaaagcactcattctaacacagatccaagaaccaatggctaccccgggtaccttaacagcatcaactcagaacttaaaaaatcaactagagatcatccaaggaacgtaagtataattctacaaaaaaccatctcatccccattgcagcagggcccaaacttcagtgagggtttcataggccatggagaatgggtttggctcttgtcacagggtagagccccatgataggggtctgaggtagatgaaaacaacagggtagccaggggcatctatagaagatgttacagagctgcctgggcctcatgacagttgcacctcagttacaaatcccagacggctctatttgcttaaaccagtttttccagtgacgcttacatgctgactttcttggtttctatagatgcttggtttcannnnnnnnnnnnnnnnnnnnnnnnnnnnnnnnnnnnnnnnnnnnnnnnnnnnnnnnnngtaacaatatttacataagtatgtcacattgagagattccagcatgaccaaggaatggaaaatccaagaatgtgccctggcctgtgtggggctcaggcctgtgactccttgtccctgtgctccagctgatgtataacagagttttgtagcttccctgaggacgggggtcctagaggtccccacctaatgccagacaatcaagagaagcccgtcttggcatccccaggagcagcttctcctctgatagggtgcagctcacagccaagtggacccgtgacgtgtgccacgctgctcgggaagagcctgaggggta

SEQ ID NO: 245991 - DNA, 445 bp, Homo Sapiens
gacccttattcgtgttgcactcagtattatatatatcagtgagtcttacagaatagatatgcttccataatatgaaatagattattcaataattgagaaactttatgtgtaatcatgagagtataagaatctggattatcttacattgttagccctgtgtatgtacagttcaaaaagttcatttataaaagtagtttcctgttcctagtgtgatgtatcacaaattgtgctgaggttattttagtatgtgtgtttcattcccgtgcttctgttctgaagtcctggaatacagttttcagtgtaattaattcaactgcacttaacactaatgtccgtgttggtatagaaatgtctaaatcctatgactctagttgaggaagatcttccataatttgatggtattacacagggaaagctatgactgcaggatcagtctactactacg

SEQ ID NO: 245992 - DNA, 122 bp, Homo Sapiens
acttacacatagtaccaatgtcctgtccatatacatatcattttgtagaataccctagagtgacacattgccagaagtaggatagtttggtctaagggataatgagcatatttacttgttat

SEQ ID NO: 245993 - DNA, 844 bp, Homo Sapiens
gtgtttagggcctaaattttgggtctttaataaattttccggccaggccaaatgggggttacctttaaatggcaccttatttttccatttaaaagggcaaaaaagggggagaatttggcttccaccagttcgaccaggaaaaaatggccctttttccggttgtcaaaaaattggaaaaataaggccatgggaatttatttaaaacaagtttacaaggtgcttttgttgtttaggtttataatataggcttcatgcttcttaagtagagttcaaaatatttcattggttcaggtataagggattatgaaataatccttaaaagttagtaatgagatgtttcaaagaagaaaaatattgaataaagtcatcatgttcccttataaataactttactgcataattctttccagccaaaccaatattaaccttgtgatgtttagttactggtaaagattaatgctatacaacaggacctatacttgcgtagtcacacaatatatgtttaatagtataagtaaacctattcacagcagcagtatacctagaaatgaatggttaaactgtttctttctaaatctgaaggaacaaaaaggttttcttcaatatgtacaacactaataaattgggacactcctcctattttgctgagtcacttaaaaatctgaatttaagctgtcatattagaagacaaacaatgaaatacaagattaagctaaacttgagaattaagatcatgaccataaataccaactaatttttggtttacataaggtaatttttgatttatggagggaaaaaaacctttaagaatttagaatcataatatagcctccagctgacatcc

SEQ ID NO: 245994 - DNA, 580 bp, Homo Sapiens
  misc_feature (107)..(131): n is a, c, g, or t
  misc_feature (197)..(197): n is a, c, g, or t
gggggtaaaagggaaaaccggttttcaaaattgtgtccgggaaggggcatttttttgggggttaccccttaccggggaatttgggttaaaaatttccgcccaaaaannnnnnnnnnnnnnnnnnnnnnnnntcacccccctttaattcccagttcccttttaaagaaggggttaagcccagaaggttcgcttgaggnccaaggaattggaggtttccagtggagccaatgattcaggccattgcattccaggctgggccatagagcaagtactgcctttaaaacaaataacttcagccaatgtataatttaggtttggtgccactccattacaaaacttaacattaaaaatctacaaaaatcatatgctagtggtatgcacgctgttttggcggtgatggatactgacatttgcaatttaatactgtaactaacatcgttttactacaacagcgtaataatataacgagcacctgcaagcccccctccaacagcaaaaccaggtatttccagtgacttagatctactcgtgtgcttatcctgtctaagtccccagaatgtgcaacacgataagtaagtcc

SEQ ID NO: 245995 - DNA, 1042 bp, Homo Sapiens
  misc_feature (60)..(72): n is a, c, g, or t
  misc_feature (188)..(232): n is a, c, g, or t
  misc_feature (654)..(654): n is a, c, g, or t
  misc_feature (669)..(669): n is a, c, g, or t
  misc_feature (691)..(691): n is a, c, g, or t
  misc_feature (786)..(786): n is a, c, g, or t
gggtggaatgtagagatggaagcagaacgtgatgtttggatacaacagctatttaatccnnnnnnnnnnnnnaagcaaaacactcagttttctaccttattttctaatgttgatttcatggtaatactgacagttggaagtgtttaacataaaaactcattgctaaagagcactgaggaaatgggagnnnnnnnnnnnnnnnnnnnnnnnnnnnnnnnnnnnnnnnnnnnnngcatatatgtgattgggtattttaaaaaccagtatcatctgtcatctccaaaagattataggagtcagcttgttaatacagtagtgttagtaggttctgtatttttaattcagtacttagaattctaggtcctttattgcccaaagtcagcacagttagtttataccacagactctgtcttggggcacagtagtggggcggggtagtgactttgcctaaacatcacccagctggaacagaggctgagcggggctttaggcacttgccagatgggaactgggttgcaccctccttgctccctgtcattttcttgtcactcttcctgcttcccagtgttttattttatgccttgctcgttgtacatcatgatgactgatggtcttccaggttgtgaggaaagccgtctccctgcttgactcganctgctgtcccagagngagagtcctgtgcgacctgagncgggggtggctgccatttccagcatgcaggtgacttccaaagaatgagtcaggtggcactgaaaagccatggggttctgaagaaggcgaatttgnttgaaaagtcccaggggtctgaaatgaaagcatctttaatcaacactcaacactcgcaatattctagaaaaccatatactgtgctggttgaggccaaaggttaacattgctccactgttcaccaaggaagggggcagtggccatccgccgcggcctcacgtgcgttgtaacaagccctcatcacatgtgtgagtcttacgtgcacaaaaagagaaggctttggtactgaaactggacaccttgtgcaacacggggt

SEQ ID NO: 245996 - DNA, 527 bp, Homo Sapiens
  misc_feature (517)..(517): n is a, c, g, or t
ttattcgtgttgcacgccagctgctaagtaccaagctatctttggtcagataccctggaaggactcaacgcctagcaatcttgaactttcttacttgtgagaaggacatagtggaatcttcaaatttctctgataattcttcttgaaagttttcttatgttacttctgcaaaatatctttgtactttccatataattcctttgtcatttctttatttttaatatggagataatcacagtatttaatttatggatttgttgtgaaaattaaatgagttgatatgtataaaaagcttagaacactgcctggcgcatagtaagttctataaaaagtgttaaactttcatcatcatcatcatcagtattacttttcaggccccagaagaaatagctgtgtcaggccctcatcgaagtgagatcctgtaaaagatagaagactgtgccctccacagcacttctgtaataaaatcagagggctatctcttataggttctatgtgcacacgataagggatcctncagagtcacc

SEQ ID NO: 245997 - DNA, 521 bp, Homo Sapiens
  misc_feature (371)..(383): n is a, c, g, or t
gactctatagatcccctgcctgctgtcgctaggaaaggcacattacatttagtcttcctttcgatttttaactctttgaagaaatatgatttttagaagtgagctttccattatagcacaaaatcagccaaagcagaatttttaaaaattggcttttttaggattctttttctccccctcccatcttagtcttaccttgagggaacagtcatatgagaaggaactttgtcacatctaagctgtggtgtcttccccatgtgtgtgtacaacactggtgactccaggaaccattttcacctattaccagtgttgcctggggactccttttaatgtttccaaatgggaaggacagttgatttccaacatgaggnnnnnnnnnnnnnatccagaaatattttcagcaaaactttccaactgagtggagtctgattaaggatttatttgaaaatggtgggattcattggcccataggtacattggaaaatgtatatctctccagctgtactgtagcgacaagcagt

SEQ ID NO: 245998 - DNA, 292 bp, Homo Sapiens
caggcgtggtccttaaactcctggtggctcaacgcagtccgtcccacaatcagcctgcccaaagtgcatgggaacttacaaggcatggagccactgtgccgtggcctaattattcttctttccttattgttagtttgtgctattattttatcagtctttgtgctgttattatcatgcctgtaaattctacgtgtatgtcagacccacaaaccaagtgttgtcttagacagtggtccgttcagatttacccccaggttacccgttctagtcgtccgcatacgcgcggcatggt

SEQ ID NO: 245999 - DNA, 335 bp, Homo Sapiens
cgagcgcggtaccctccccggtatcataagagttggtactgtttaaggccaaaagtaacagtttttatagatcttttagtttcaactcagcttttacaataaaaaggatttgtattgcattgagtttataaacttttggtttgtgaacttcatatttgatcttttctcttccaatcaaatgtctaggcttgtttgacttccacccccaatggtttttcactctttttatttacttcattttcctttaataacttaatctcttcatgttcagtttttacttcactctttattcttttctttgattatgatacgcgaagggatcctctagggtcagc

SEQ ID NO: 246000 - DNA, 692 bp, Homo Sapiens
tgtggatagaagcctaagcaatccaccaccacccatcaattttcaggaatgcgatggtctagtaaggataacctttgttaggaaaaacaagacactctctgctgcatttaaatcaagtgcagtgcaacaactcttggacaaaaactacagaattcactgttcagtccataatattataataccagaagatttcagcatagcagataaaatacagcaaatcctaaccagcacaggttttagtgacaaacgggcccgttccatggacatagatgacttcatcagattgctacatggattcaacgcagaaggtattcatttttcctaggtatttggaaaacagaaattttcaaggtcaagaaaagaaatgaattttgtattttttgtatttgagaagataatgcttttgctttactgagacattatttacttgactatttttggttcaatactactactgttgtcaccatttatgattctgaattttaaagttggaaagttctaagtatcaaagtttttaatatataatgctggtcccatctattcataataatcttcaagttcaggagccgcagagacgcacaactttacacttatcatttctaacagtttattgtataaagatgttactcttctatttactgttatatactgtaaggccttctttaggcctttagctctgttcctccagtaat

SEQ ID NO: 246001 - DNA, 120 bp, Homo Sapiens
ctccaggatccctagggtcttagggaggggagaatgggtttaggttgacacttagcagctgccactatatgtggctatagtatgtatcattggaatagatgtttaactttagggacaaat

SEQ ID NO: 246002 - DNA, 410 bp, Homo Sapiens
tcacaacaggaaaacaagcttatgacccaatgaatttaccgaatttcgagcctcgggtaccccgttcttaagggaaggttgcccattcaccaacactgagtgggtaagaggaagtactttagagaagtttaggggagggggagccaaaattcctgggttgagagttcacagggcaatgaggattcaatagcagcactttgtgaatttgtacaactgttatcaaaggtacaaagcaacactaccctttgtcctttttatttttactctgctaatggaaacccttcaccctaaattaagattattattcagctttgatgttgcattttatattagcaaagtgctttataatccttcattagctatttactctccctaagaccctagaattcctgtagagtacctcagcatca

SEQ ID NO: 246003 - DNA, 284 bp, Homo Sapiens
gtactctccaggattatagggtcttagggagcatcctggatgatgcaggagatgagcagagcgaggcctgccacaaggagctcagtgctgaggtcgggaatcaaccagcatcaacccaaggtcccctgagaagtcacgctgggcacaagatgctgaacaccaagctgccccaagacaatcccattctgaaacctgcatccacccagacaatttggcccctcctatgttcactcataccgttgaggcctcagcaagcggaggaacaactgacaacctccctaaga

SEQ ID NO: 246004 - DNA, 272 bp, Homo Sapiens
cctaggaatagactgttttattgggaaagggaataaacggcagtggaggctagggagaagaggaacactgaaaagatgagtttctcagaaaaagtgtgtatgagatccagcgagagtggctgcggactgattccgaataacaaactcttggcaagtgaagaaggtctccaatgaggtggagtaggatcactggacttggggcacaggacttcaaccctctggctgggacagatcacttcctcgtattcttggcgacctcatctctacaagag

SEQ ID NO: 246005 - DNA, 338 bp, Homo Sapiens
tagggtcttagggagacccagccaaggcgttatcctgatgggggtgtcaccaaggggtagacgccaaggcctcgatgccacctgagtttcccagccggggagagttaagaaaaagtgtatgcgcaaggagcggctttccttcttggaagttaatctgagaggtcccagcggaacccttagtcacgctggcttggacaactcactgagcccttgaggcctggctgctcgcctgcaggccccgtgtcctgtccagcaccaaacacagtgccccatttttctcagaacttaagaactctgtgacaaagtttcctgagtcacaaaccaggtggggatcctct

SEQ ID NO: 246006 - DNA, 1361 bp, Homo Sapiens
  misc_feature (108)..(400): n is a, c, g, or t
  misc_feature (562)..(571): n is a, c, g, or t
  misc_feature (1141)..(1293): n is a, c, g, or t
  misc_feature (1326)..(1326): n is a, c, g, or t
tttgttatatattacaaaccatcacacttagaaatacttccaggaaatgcttttttgaagtgtgaattaataagaaatggggtaaatagaaaagaaatttattgctgnnnnnnnnnnnnnnnnnnnnnnnnnnnnnnnnnnnnnnnnnnnnnnnnnnnnnnnnnnnnnnnnnnnnnnnnnnnnnnnnnnnnnnnnnnnnnnnnnnnnnnnnnnnnnnnnnnnnnnnnnnnnnnnnnnnnnnnnnnnnnnnnnnnnnnnnnnnnnnnnnnnnnnnnnnnnnnnnnnnnnnnnnnnnnnnnnnnnnnnnnnnnnnnnnnnnnnnnnnnnnnnnnnnnnnnnnnnnnnnnnnnnnnnnnnnnnnnnnnnnnnnnnnnnnnnnnnnnnnnnnnnnnnnnnnnnnaaaagaaatttattgctgatcacaaggacagacagttttttcccgaccatactcatcaaagatttacgtttgtatattagtaactagtgcattactagagcaggtgcaggtgaggtctttaaagtttcaatgaaagtttcttctggatctacagaaaaaaannnnnnnnnncaatctaaaaactggaaattctagggtttttgtacattttggatgcactgggaatttattagcacaaaatcattctttgcaactcaaaattcagaagggactctaccatatcttagctcagagcacagaggagtgccttatccccacacttgactgggctgtggaggtgggcatgtgggcccctgggcccaggctggggacagagcccttgttttgtgacttaggattttgatgtggttcccatgttctctaacagggccagctgagcagcacaggccaggaggccacagtgtaagcaataacagatctgccacatgcagaagcaaatatcaggcctgtcgcacacgggcggcatttaaataggaatttctatttttgaaataagggatggtctatgaggcatacagtagatttgatgtgatccttttctccctcccttccataatggatcgtggtctgtgtgactgaacccacacagagtgtcatgggtgacagtttctggttgaagtagctccacgctgggcttctgtggacagcagattcttttccttctcacaaggggctcatttnnnnnnnnnnnnnnnnnnnnnnnnnnnnnnnnnnnnnnnnnnnnnnnnnnnnnnnnnnnnnnnnnnnnnnnnnnnnnnnnnnnnnnnnnnnnnnnnnnnnnnnnnnnnnnnnnnnnnnnnnnnnnnnnnnnnnnnnnnnnnnnnnnnnnnnnnccggccgttggttggccgggcccccttggtagntcccaagcctacttctgaaagacttggaagccaag

SEQ ID NO: 246007 - DNA, 347 bp, Homo Sapiens
aaagaaggaggggagggaaaagagtcagcatgtgtattacagaatgattaggaaatgggaaaggaagtacccagtacagcaaaatcaactatcaaataaacccctcagtgatggggtcaccaaagcccaaaggagctcagtctcctgcagttcaggaatgaggggaagggatcagggaaagaacacacaggtaccctccctctgtccccataaattcaagatttcacacaaagctttggtttctagcagtaaacatggagttatatccttctatctcctattaaacaatcttgtggccactttgacataagtttcttatacccccggaagttccagggtaccgagct

SEQ ID NO: 246008 - DNA, 217 bp, Homo Sapiens
aacttcccggggaccatttccccggatggaagacgctcgtcctcagacacatccaagtctacatacagcctgacgcggaggatttcgagtcttgagtcaagacgtcccagctctccactcatcgatattaaacccatcgagtttggcgttctcagcgccaagaaggagcccatccaaccttcggtgctcagacggacctataaccccggaagttcca

SEQ ID NO: 246009 - DNA, 374 bp, Homo Sapiens
aacttcccggggattaaggcttgcttgcaaatagtattttaaaatcataaccattctcagtatacaactgtctgcatcattttctcatttaatcatctttcatcctaaagaggtattaacctccttaaaatgcctcactgccctacaaactagagatctagggaggaggggctccctaaacaaatttggaaaatggagttccttaggccttattactcatgaaacagattctaacattcctgcaatgaagaggatgggtatggctttttctttttagtctcactctgtcacccatgctggagagcagtggtgggatcatagcttactgtagccttgaactcccaggcacaggtgatccccccgggaaggtggta

SEQ ID NO: 246010 - DNA, 591 bp, Homo Sapiens
ctcggggaaaaaaagaatcaagttttgaaaagtatttcttagctcccacaaacaacaaaatctgccaataaagtatgattatgatcaccaagtgctccaactgcaattactcttctgtgtgtgtgttggggctggtgagggagcggaatacaaacaagagcaaaaactacaaaataaggcgtgagatctaactcaacaatagcatttgtagaaggcaaatagaaggtgaaaacttaagcactttagtaaacggttaagttaaaggaaatgaaagtgtgaaatggctgggggggaaacataaattataaacatgcaataaaacagaaaactgagaactagacaggaaagagtgctgctctcctatgcagtagagtgttagtgctttcagttctaggttctacctttataaatgcataaacaaactcaaacagattcttagaaaatgaccaagatggtaaatggatatcattattagatggttttctagggattctcagcctagagaactgaaatgtcagagagaacttggtaagtcttcaaataattgaaaggttatcacaaggaaaaaggattacatttgtccaatataac

SEQ ID NO: 246011 - DNA, 390 bp, Homo Sapiens
aacttcccgggggtacttgtgcaggtttgttatataggtaaatttgtgtcactgggggttgttgtacagattattttgtcagtcaggtgctaaccctagtactcaatagttattttttctgctcttctccctgggaagagcaagggatcctggccctatttctcaatcatgcacatagctattacctgtctagaaaatgcaagaaaggcagattttcgctcagtgtaagagaaaatgtggttattatttgttttgatgtattaggagataatgagtttcctatcactggaaatacacaaacgattcaatgtggatcccagcaggaggtgggggatttgactagtcatctgtgtttaaaaacagtgttaacatgctacatgcaaatatgac

SEQ ID NO: 246012 - DNA, 414 bp, Homo Sapiens
tggaacttccgggggttttctattagaccgcctgcttccaaagctggtcaagagatcagggataggaacatgctctggaaactacacagtcctggaaagacgggagggctctgtggccaccagattgtcactctgaggacctggtttctcacttctcacaagatgcctcaggggcgaagcttccgaactcctcaggacgagggaggaagctactccccggtgtttctctggagtcactagtgggtttttatctcatgaactctgtgaacctggccactgatctcatttcctttttgctttggccaccatgaagctcagatcagaatttgcagctcactccaagcaattctgtagcactgggttctaattttaccttgtgccctttaacaaatgccacctttatttcctcttttt

SEQ ID NO: 246013 - DNA, 329 bp, Homo Sapiens
  misc_feature (119)..(142): n is a, c, g, or t
tggaacttttcggggcttatattgtgacagtctaattttattttaggtgatgaatgaattaaaagagaaagtactataaattgataaactttcatatctatgtacatatatgagaatcnnnnnnnnnnnnnnnnnnnnnnnnaagctatgctaacactatgagttcagatgttgatgtactcagccctccagaggctgtcccccaagcagggagctgcctctctagcatatgctcaggtctattggtacccactctgaggccatggggtgtattaggaggcatggctggatgtgctgcctgtgcattttcaccactaagtgacatgtcc

SEQ ID NO: 246014 - DNA, 623 bp, Homo Sapiens
  misc_feature (413)..(463): n is a, c, g, or t
tggaacttccggggtgctgtttaaggagaagctgcagtggctcctaccagatggttgtcaccagcatcctttgttctgtaaatactcatccagcacctcttgctggcttggctctgcgagggcttgagacccagggaagagatgaggctaccacagtctgtccatcagggatcccccgtctagggcactggggcaaacttgggtaggaaatgataggggtttggagtctgaggaatccccattagtctgcaagctcaaaggtcatcccccagctgactgtggggtcagccgcccagaatccacagagctggagggggagcagctgccatgagtcctggctttgtgcccgtcgcccagatgggcacttcacatgcaccctctcaccagatagtcctggcagccccctcggaagnnnnnnnnnnnnnnnnnnnnnnnnnnnnnnnnnnnnnnnnnnnnnnnnnnnggggtgtctcctttgcacagttgaaaatgatacaagcaggatccaaacccagatctgcctgattccagtgtcctccctggatcacacagggtgaggctccaatgttccgccccctggagaagtcaaccaaactcctgaaactcacatttctcccccaaat

SEQ ID NO: 246015 - DNA, 418 bp, Homo Sapiens
tcctcttctcttgtcctttaaacgtgtgaatgttgcccttttcttactttcaccccctcctcccatctgatgtcttgctgctactgaaagccttcggtgactgtccattgctcctcaccagggcttctaggcccgggctacctcttgtgccctgctgcactcattctcactcatactgacctcctcattgcctggaacttcaagtgctttcctgccttggcatctgcacttgctgtttgctctgccaagaatggtcttccttcatctcttccctgacccgctctaaggccaccttgctcccctggttatttgtcatgatagacaccggttatttattccttcatagcacatattgcagtctgctgttctgttgtctgcttgtttacttatttgtggtcagtctcccctacataaaacc

SEQ ID NO: 246016 - DNA, 743 bp, Homo Sapiens
  misc_feature (202)..(211): n is a, c, g, or t
ttccctggaacttttcggccaagagtttcttcagtagcctgttctgtctggtgatttttattttaagtgaacctttggatctatctttaactctctttattgtgagtctaaattccaattctgcagcagatcagtaaactcacagtatttttcctgtggaaatctattcaataaggaaaccaagacaggataataaaatttnnnnnnnnnncaactttgaattcccctgcctaggtcttccagttgttttccagcgcatacctcaggtatgactttgctagccggggacaaaattagcaccttccgattctctagtccaaatgaactttgtgctaaataaaaaattattatactacataataaagttacagacagcaggaaatgcaagagctaggagattcctagattatatctgccaagcaaataccttaaacatccacctgaaatcctactaccccctcttctgagataatttgcccagcccttctcttccccacactcactcaatgtcacccccttctaatccccaaaactgtttttgtggtctttgtagcctatagtagttttctcacatctttccccctagacttttctgttttccagtttcagacaaaaaaactcttcagctttttccagtgtgtctccttaacagtaactttaccacttgaaatcttatttcatagaaaaactaaattgggtgtggaaaggctgccacccaataaagtttatattatttatccccg

SEQ ID NO: 246017 - DNA, 358 bp, Homo Sapiens
tattggttggacgatctttgattcctaccttcagacagagatgcacccggagcctttgctcaattccacacaaagtgctccacaccatttcccagacagcttccaggccacccctttctgctttaaccagagcctgatcccaggatcaccttcaaattcctccattctctctggctccttagactacagttactcgccagtgcagctgccttcatatgctccagagaattacaattcccctgcttctctggacaccagaacctgtggctaccccccagaagaccattcctaccaacacttgtcctcacacgcccagtacagctgcttctcctcgtccagccaatagggtaagagctcg

SEQ ID NO: 246018 - DNA, 383 bp, Homo Sapiens
  misc_feature (192)..(232): n is a, c, g, or t
gacgcatattgcctggacgaccattttgttgtctaagcttacgaatgttatcacatttcagttcaatctttctgattctcttctgatggactgctgctctgcttgtatatgtgtctttagtttggtgcctctcatcttttagttatgctgactctagaagtaagaactatgtgtacatagtataattttggnnnnnnnnnnnnnnnnnnnnnnnnnnnnnnnnnnnnnnnnnctcaatgagtcccctacttatgcatgctgttacaatctgagctcagtgaattttctttctttgatcctaatgatgcatcatgccaggaaattctttttgatcccaaaacttcagtttcagaattatttgccattttgagacagtgggtaac

SEQ ID NO: 246019 - DNA, 385 bp, Homo Sapiens
  misc_feature (172)..(212): n is a, c, g, or t
ccattttgttgtctaagcttacgaatgttatcacatttcagttcaatctttctgattctcttctgatggactgctgctctgcttgtatatgtgtctttagtttggtgcctctcatcttttagttatgctgactctagaagtaagaactatgtgtacatagtataattttggnnnnnnnnnnnnnnnnnnnnnnnnnnnnnnnnnnnnnnnnnctcaatgagtcccactacttatgcatgctgttacaatctgagctcagtgaattttctttctttgatcctaatgatgcatcatgccaggcaattctttttgatcccaaaacttcagtttaagaattatttgccattttgagacagtgggttcctcgtcccggcaatatgcgtaa

SEQ ID NO: 246020 - DNA, 447 bp, Homo Sapiens
caattttgacaatccaagcagtaagttaaaatgtatagatacacatgcagtgaaatataatagtaaggagaacactaaggggacttagctatttgttttattagtttaacaacacaccaaaaaaaactttaaagtgcctgaagtaaagtaattttttccaaaatgaaagaaatgtgtttaaaaacaaaaaagaggcagcaagttagattatgctgtcatgtaaaaaaatatttacattcaacaaattattctaaaatctctaaaaaccatgttctctagtttttacgtcaacaccaaaaataactggagaatatgggaacattattttatatactcttcaatctccccaacaggatatgccttgggataaaaataaataagtccctctgacatataaactatacaaacccacagctattttaagatcgtccagccaatatgggtaac

SEQ ID NO: 246021 - DNA, 105 bp, Homo Sapiens
gacgcatattgcctggacgaagaaagggctcactatgtgttgaatcacatgatttaaaaaagtcaagaactcaattattcctagtaaaattttagaactccatag

SEQ ID NO: 246022 - DNA, 331 bp, Homo Sapiens
ttggttggacgactgttagggatgtttgcaggagccagcgacgtgatgtgactaaggtgcacagggcctggcatgtgtcgtggctgttgtggttattagcactactttaattgttcagataaacttgggttcacatcctgtttctgtccctccctagctgtgtgacctcgggcaagtaaccttacctctctgagccttggtttccttgtctgttaagtggaacgcctaatgaagacttgctgttccctgggttgttaagatgcgtgcataatgcggatttgaggatggctaatccccttttctctcgtccaggcaatatgggtcagagctc

SEQ ID NO: 246023 - DNA, 486 bp, Homo Sapiens
  misc_feature (24)..(24): n is a, c, g, or t
gatagaatgtgagcctaggtcccnataagcccgctgttcaagatggcacagcaaactggtcagtcatgtccttgggagcatgacattgtaaccacgtggcagtactttctcttggtctgtgctcttaccacagcagcccaggttctatcctggcttagggaatgaaaactatctggttaatgtctgtgcgacctttattatttgctgattctcttcgccttccacaaacaacttccaagttctcttcttaaatcttccttcctctgagctacttctaaagattctagattttataaaaactgcttctcaccactttgaagatatcttgtatacttgtggttaagttataaccttagttgaggcttgcaggtttcacctgtgagtttaaaatccaggaatattggccactcgcgcatggctaaagccaggcaataaatttaagagcatttttaaaggagtgctatggtcgtccaggcaatatgcgta

SEQ ID NO: 246024 - DNA, 449 bp, Homo Sapiens
agcatgcctcttggcgccactcacccctcagggagggagggtgctccttggctgcttgctacagagggtgctgagccctgggccctgtgatcgtcggctacaaggctgtgcacacaggcaccatctagacccatcacagcacatctcccatgggcatgggctggggaaccagcactattatgctgatgctaatattgtttgctgtgctttgagcagaaatggtcttgtgctttgactcatgaaatcttgcctacttttggcaggcaggcaggtttactcctggtcatctcttgtgagtgtgggattcttctctgcccctaacagaatgttcttctcttgcttcccacaccctccccaagtatagctttggctgcccttcttgtgcctcccgtgcaccgctgtccccattcacctcatgacagctaccaagggttcctcgtccaaccaat

SEQ ID NO: 246025 - DNA, 540 bp, Homo Sapiens
tgaaagcaccaccccctctaggtgtttttggaaggcgcatttgagccttgtgttctaaaatggaatggatttaatatttcctatctggcatttccatcttgcccctggtacacaagtcactggcctggaactcagccttgattcactgtccgtcttcacggattagctgtgctgttatgttgtctgtgctgcagattggcccatgtgggaagtcgggggggacctgatttcctgcttggaagacttgggggactgccgagcatatcaaagtgtttatagtcaccaagtgaactgcagcacaaccatctcctctccagcaagccctgaagtcagtagtgcctgcaggtgaaaccaaccagccctgtgttagaggaggaaaagcggagatgacatggaagtctccaagcctgtgccatccacctgccaaggaaaagcacaaggtgctatctacttttctctctaggatttagattatcatttatgtgctgttgcacagtgaaacctcacctgtgtgggtgtgctttctcagggaaccgagct

SEQ ID NO: 246026 - DNA, 246 bp, Homo Sapiens
gctcaggggctagtttcttccttgccccttagtaaaacctcaggtaggtgggttcctgtagcttctccagacactcagaaaaattaaaaagtactccagtcatttttagtcataaaacagtctcataatagtcaaaactctgaactttaaggcaaatttttcttctttctctccttccccagcccaagccgattcaggctggaagctgaatatactcagaggttcattcaggagggtgtgctttca

SEQ ID NO: 246027 - DNA, 590 bp, Homo Sapiens
ccttaatgtgatgaaatttgtggaatctattctgagcaacaatacaacagatgaccactgccaggaatttgtgaatcagaaaggactgttgcctttggttaccattttgggtcttcccaatctgcccattgactttcccacatctgctgcctgtcaggctgttgcaggtgtctgcaaatccatattgacactgtcacatgaacccaaagtccttcaagagggtctccttcagttggactccatcctctcctccctggagcccttacaccgccccattgaatcccctgggggctcagtgttgttgcgagaactggcttgcgcaggcaatgttgctgatgctaccctctcagcccaggccacacctctgctgcatgcactcactgctgcccatgcctacatcatgatgtttgttcatacttgcagagttggacagagtgaaattcgttccatctccgtaaaccagtggggctctcaattgggtctgagtgttttgagcaagctgagccagttatactgttccctggtgtgggaaagcactgtcctcctctctctgtgtaccccaaacagcctaccatctgggtggcttctca

SEQ ID NO: 246028 - DNA, 388 bp, Homo Sapiens
tgtgaaagcacacttcttctccccctacctatttatctagatgtttgaggtaatttagattttgtaaagttttaactacttaaaaaaatgagggagaataaaaagctctcttttgcatttttcttctttttggtaacttagactctgttggaaaaggggaaatagtatttcttgttcagctactacatattgtgttactttcaaatctgttgtttttaatactgtaatgcaacatttttacaagacagcgagtataaactccattgatcagatgaggaaatagagatatgagatgactggcccaaggccatacaagtgggaaagggtagcaccaaaatcgatgcagttcactctaatatagactggcccttgccccatttcaagcatg

SEQ ID NO: 246029 - DNA, 428 bp, Homo Sapiens
  misc_feature (379)..(379): n is a, c, g, or t
tgtgagagcacaccccttatctcaagctaaattctttctctggaggaccttatctaatcctaggatgttgtatctctagctctaatctctcttctgggctccagacctgtatatcctcttgtctacaagacttttacatctgggagtcctataagtagtttaaattcaatatattcaaacctcaactcattatcaatctctgtaagatcctttttctgtgttcctgatttaaagacactgcagctcagtcattcaagtgtgtggaaacgtagaacttttgtaggctgggctgtctgtattacaagctcctgcggtataatgagtatttcttcagccacattctttaaattttaatttaatagttctgggattggccagngaatacatactttataatttccccaggtgcttttgataatcaactggtt

SEQ ID NO: 246030 - DNA, 378 bp, Homo Sapiens
cacccgtctctgtcaaaaaaattttaaatgctttttaaataaaagacaatcagtgtagaagctttagtaaaaatgaccactcttttttacacctaatcagtgttaaacatttcacgtataacgtttcagtattttttacataaacatatgcatttttacaaaagtagtatttttaaaaacaacagtgtgtcagttgggcattatagcatatttctaagcttaatgcatcatgaaaatactctgagtaagtagaattctacaatgatgatgaccccttgtatctagaatcaagagggaagtatgtgttccctactcctctgggaagctcctcttgggatatgatttcccaagtctctcctatgtctatgaggtgtgctt

SEQ ID NO: 246031 - DNA, 518 bp, Homo Sapiens
  misc_feature (484)..(484): n is a, c, g, or t
ccacagaacagtcaccaagatgtcccaagacttttcaaagtctcagtgttgttagaaagactacacagaaatctactacagcatacttataatatgcttgatatttcaaaaagtacacaagccaatgacgacaacctataataaaacttcagcaaacaagcactagggaaaactcagcggtgtccttggtatttagaacacccagttctaaaggtttggagtgaagagaccattccaaatcccagtttctccactcacaagttctatgactttgggcacgtcatctcttagctatttcagtccctgtttagtggagctaacatacctatgcatacataaagctcagtgcttgacactcaatgtgaagcagaagctcagtaaagtcttcttccccacctaatgcgctgtggtctgtacctgcaaacatcctttctcctccaataaccctagcagaaaaatgaaccgttggctcctcatttgcccncagctggcccaaactacatttccttcactctgac

SEQ ID NO: 246032 - DNA, 569 bp, Homo Sapiens
aatagcgttttagatacaagtcattttggttacatggatgaattatgttcttaattctgagattttggtgcacccatcacttgagtagtgtacattgtacccaatatgtagtagttttacccagtatcactgggtatctagtattggtcgctgcatcgaatggtagacctacttttggttctttaaggactctccatactgttttccatagaggctgtactggtttacatttgaaatgcgttgttttcttgaatagccttgaaatcacaggtgctaacacataagagctagcaactgtacgtgaaccctgggctactaattgctcatcagactcctctaacccctagcagaaaaatgaaccgttggctcctcatttgcccccagctggcccaaactacattccctccactctgacaacacaacagcatctattctataaatgaaagatcctcaaactgtggggatttagctcagtaacgctattttgcaattacaataattttactttattggactttcagatgggctttgtttggcatttgattatttcagagccaatttcccacata

SEQ ID NO: 246033 - DNA, 506 bp, Homo Sapiens
  misc_feature (463)..(463): n is a, c, g, or t
ctttaagtcaagaagctgtctcactttgggttatgtagagtccacaaaaaagtcaaactaaatatagtgagtctaaaggcagtattagcatctttgtcaaatagagaagaagcaaatgaacatttctaagttggtcaatagtccttacagaggctaagaaagttaaatgtatttaatccagaaatatctataatttttataaaatacttaaaaaattcttgatatatttaacaacatgtctattacacattttaaaatttgctatcatccttgcacctcccctaaacctgcttctccccagtgtaccatctcagtccttggcacagccatccatctctagtggttcggaccaactgaatcatctgggaaccatcctggattgcttcttcccttattgtcctcatccttggttctcttttgcattaagccacctctcaggacctccaaagctagcatagaacanagtactactactagtcttcctgctttcattcttgccactctat

SEQ ID NO: 246034 - DNA, 275 bp, Homo Sapiens
tgggataggttttattaaacaaagtagttctttaagctctaccatccatggtccccggcatgcagcactgcttttaaaatatcccatgttaaatgggtgcatggaccaagcaagactgaggaattcctgtcctcattagtagtgcttttcagcctgtgaaatatcaccctgaaataaaatctatacctgagttaacagtactgtatcaacatcagtttcctggtattagcaatgactgtttgtattgggtcattctggtttttatatgttttttg

SEQ ID NO: 246035 - DNA, 367 bp, Homo Sapiens
gctttatctccctataggccttgttctgatgccattaaaaaatggcaggagctgtcaccagaaaccagtggaaaaaggaagaagagaaaacaaatgaaccagtattcttacattgatttcaagtttgaacaaggtgacataaaaatagaaaagaggatgttctttcttgaaaataagcgacgacattgtaggtcctatgaccgacgtgctctccttccagctgtgcaacaagagcaggagttctatgagcagaaaatcaaagagatggcagagcatgaagactttttgcttgccctacagatgaatgaagaacagtatcaaaaggatgcagctgattgagtgtcctgctgcataggagataaggggc

SEQ ID NO: 246036 - DNA, 373 bp, Homo Sapiens
tgtgaaagcacacctataacagtaataaggtaaggacccagaatttgctgccccaaactataaccaccagggtcacacaatgacagatgagaagtaaaggaaaaacagagacacccttttcattcagcaagcaaagtctgctcacctggctttgtttctcctctcctatagacacattcaatcaagaccaagccatgcccatcctcacgctgctgctactacaaccgctcttcccaaccaggtcctatcacaatcctgctcaaccttcaggacccaaatgccaccaacttacaacctgttctattcagttatctgcccactcaatgcctattactaacgtatcacttccctaaatgagagcaatttctccgca

SEQ ID NO: 246037 - DNA, 509 bp, Homo Sapiens
tcaagcacacccacctttgcttttagtttatcagtcacatacttgacacagagcttgggcctggaaacccaaagaagtgcctgcctcagtgtggagagtctggatggacactgctcagccaactgaccagaattgacggatgaaaggcaagaagttgctctgctggagggtgactcctggaagggcctgcctagatagaggacatccagtagcaggtcctttttgtctagggtacaggagacaaacctggaagttaaaatgatttcctatctcaacacacggtgcagagaaagcagatttggggcatccagtgcccactccttctgtattgcagagaactgtccatcagactccacagcagcctttagctttggagggcctggaccttactgtgtcgcagcagcctgtagcctatctgactatcctgctatctatcatgtatcactctctcatctcctgtgtttccatccagggctgcacgaataccaatactctatgctgtgtacttt

SEQ ID NO: 246038 - DNA, 678 bp, Homo Sapiens
agggcgaactttataggatcccttgttaaagcacacttttgcaaacgctaaagagctatcaatcgggcaatcctgaccgtgtacgggccggccgaggtttcctcattagtgtttctgcgaccatacacacacatttctgggtttattagccaaacagaaacctgatcatgtcatttttccactgaaaactctggaatgcctttccaaaacacttaagataaaacccaaagttcttaccatggtcttcaaggccctgcaagaccttacccttgcctaactaatcatctagccacgcaattatcctccagccaggttggcctttctgatccacatatacctaacaccaaccttatttaaccacctcagggcttttgcacttctgtctccctccttatacactacagaaaataagctatactagagtaggaactctggctagctccaggacccacagcagtatctatctatcctacagtagatactcatcagtaagtatttagtgactgacttaacattgaagccacaccataatttttacttttgtctgtctaccctgtaaactatggggtccttgaactagggctggatattgtctctgtatcactagtattagtactctcgtatatagctggtactaataaccatttgctatacaaatggtgaatgtgctttcacaaa

SEQ ID NO: 246039 - DNA, 387 bp, Homo Sapiens
tctatttttaaggaaaaaaaattagaggcgcagcaaatttcaaatactatttagcatggggcagtttttttggatttataaattggattgaatctcaaaaattcattgaaatgatgtgtgatttatggaacaaactaaacatatggagcgtttgtagagtaaaggagtttcattttcagcagttgtagaagtcttgctgaggaggcgacttgtcgagcagcttgagattattatggatttttacagtaagagaaaattgtaggtaatagcctaatatggtctaatctcaactttaccagtccctgcctccataagagtataatagtttatgtgatggcttgaatgccggatgcccaggtgcagtgtgtgtgaaggtgtgctttcaca

SEQ ID NO: 246040 - DNA, 297 bp, Homo Sapiens
cttagcagatcctctccccatatgttaatattcaacatttggtcactcttcctcttaccggttactttttcctctcactttctctgtttataagctttttctacctacttttgtgtgagaaaaattagcgtgtgttggagggtatttctgcttatgggggtataggtcatgggtcttgggatatgtcccttgtacttatacatatgcccatggggccccatccttgctggcactggtgtgtttctctgcagccccctctgctggggtctgctgctgtttctgagggtgtgctttcac

SEQ ID NO: 246041 - DNA, 393 bp, Homo Sapiens
tctcatgtgtaaaatagggataataatagtaacagttttttacaggtatggtaagagtttaataagttaacacttgccgtgtccttagcatgtagtaagcactaataaaggttagttacccacattatcattatcatgattattacaactatccagatctcttgaatatttttactctgtggctcccctcagaataattttttcatagtgatcttcagttgcagagagaatggttaaatgaagccaggtgtactttactgaagaagacaggaatgtgtgtaattttgaaatatttctaaatagtgaaagtaaaacaagtcctagtgcttaaagaggttttcagtaggagacaagactaccacctgtaagtagagagaaggaagggtggaagaa

SEQ ID NO: 246042 - DNA, 365 bp, Homo Sapiens
tgaaagcacaccccataataatttcctttgaatcagtttgcattttaaattaagttttgaaaggaaaactgacaagagtatggcaactggaaaacccagctcccctggccataaatataatagaaggaaactgcaaaaataaacacattgaaaacaaaacagtgttgtttccaggtggttaccactcgggctgaaggccccccaggcttgaggcctgctccctttgttagaaagggattggcaagtgttggtgaggtgttaaagacccaccagcaccacgcagagactttctctttgaagtcatcaggtttacaagagaatcaaaggaaataactttctcaatgtgattcagggtgtctttcaca

SEQ ID NO: 246043 - DNA, 347 bp, Homo Sapiens
ctattgtgacttttactgagtaaatacagttgattttaattattcagcgcagttacgtttccgtaaaatcacagtgaatattgaattagcaaatactgaagcattgctcctaggggaaatacagggttaggtttctatgggcctctggtcacattcatcaaccaatcaattataaccttgttttatgtgtgtttctatttaaagacaccttactaactatatgttgttgattcattaacacggcacactcacagtctgaacaaaacttatctagcacacgaattttctttgcaaggcccatcacagccttcttgttcttaggaacgccagacactgcttcagcacta

SEQ ID NO: 246044 - DNA, 372 bp, Homo Sapiens
tgtgaaagcacactcttgccaacaattattttttaaatacagcaagtaatacaagctttataaaaagtttcaatagaaattaaaagaattgtaaatctaatgtataattctcaatattgctaattgcttgcaagtgttcattggataacagcataacaacgaaggactcctttaaaatgcattgtttttcagctttatttcaaatgctgtgtagcataagaacctagccgtcagacatcattttttagctatgaaaaatatgaaacaaggcatattctaaagtgctgaaggaattaattgccctattagataacgaatacctggaggaatggacagagtgatttatggcttaaagtgcttgggtctgatcat

SEQ ID NO: 246045 - DNA, 292 bp, Homo Sapiens
tgggaaagcacacccttcctttattctcttaggatcctatgcatttccttcatagtcattatttgtataaatttgttttcctgttcctttgtcccaccccatctctgacccaatttaagccctagttgggaggagattatgacttgttttataaatctgtgtgtggaaatacctaccgcatttctgcttatataataatttataatagattaatatatgggaaatgaattttatgtgggaaatgaattttttttaatcttcaagcattgccttaaattcatggtgactttcc

SEQ ID NO: 246046 - DNA, 334 bp, Homo Sapiens
tgtgaagcacacccatagcgcaagctggtggtagaagtgagacagaagctaagtctcctgattcccagcaagtggctctctctgcagttccatgttgcctcctcatgtgggttcagccaccgtgccttcctcttttctcctccaccctgcacttgaatgtctaaggtgttagcagggcccccacagctcctacctcattgtttatcaaggcctaataaaacctgggtgcaacagcatggagaggttgaggcttcttatgtgcaggctgttttgatttgtatttagtgacttaacactgttgagttgccgttattctgttttatgatgtgtctta

SEQ ID NO: 246047 - DNA, 408 bp, Homo Sapiens
tagccacgaactgttgccagtcgtgcggtgcgctcattaccgcaccttttcacccttaccggcaccgaagtgcttaggcggttattttctgtggcactttccgtaggctcacgcctcccaggcattacctggcacttcgccctatggagcccggactttcctcccccccctaattttcatagagggcagcgactgtccaatcgactctccgccgcgcaggttaacggcacggcggcttgaggacaagtattaaaagtgcggcattgccatcacgttcagacgaaatacagatttgcccctggaactattcggccttctgcttatcgagcgcgacctgatacaacacattcttgcgcacaccggtaatttccgctgccagggcggcggcgcgctttcgggtgtgctttc

SEQ ID NO: 246048 - DNA, 426 bp, Homo Sapiens
  misc_feature (361)..(361): n is a, c, g, or t
  misc_feature (377)..(377): n is a, c, g, or t
aatctttacatttttctttgattctttttgcctcatgtctttatagacattttttttcaatcattgagttttggatttttctatccgttttaccttctcctttttctacctgttgttgttaaactggaaaacaaaataactattgattagcatctctgtcagagaaagagtagtcacagataaagaggagaggtgaaatttttgtttcttgtttatttgttcaaattatatttctattataaagtttaaactgttggctgcattaaaccatgatttgggtatgtagcaatatttttcataaaatattattttcttggtggtgccctcacttgagtgatgattatattgtttccttctgaantctgtagaaaacacanaatgagtcaataatcagagccttctatgtatcttcttttaatggctact

SEQ ID NO: 246049 - DNA, 299 bp, Homo Sapiens
cagcatccaaatctcttggagaaattgttaaaaatgcagacatctgggacccatcccagaactactgggtcagaatctctgggggtttagtgctctggaatccgtgtttagcaagttacaggtaactgatacactttgcaaagcactgctttaaaagaccaggtgaagagggaagagtgggaggaagaatgactcattgtgctgttatagaaaaaaaccatgttcttgtcacacgaccagaggaagattaggctcgtggacacatagaagggtgaggagtggaatttacgggtgtgttc

SEQ ID NO: 246050 - DNA, 403 bp, Homo Sapiens
tccccctatatctgttgggtttttgttgttgctgttcagtctggaaatgggtggtgtgtggtgagaggtcattaggtcatcagggcagaattgtttgcagagctgggagctacatcctcacggaagtgggatagatgtgctggggaggggtgtgcagagaggagccaggaatgatgtaccattagtggccagggcttgttatggtaacaccaatgttgaaaccaactgtgcattcacatatacaaaagttttgtgtcttaattcatgccagaatacatgcataatcaaatgtctcagttaaggtggagctacagaaacactgggctgaatgaagttctggggttttctttgtcttcgtgtgaggcctctgggctgggtctgggtgtgctttcacggggtttcg

SEQ ID NO: 246051 - DNA, 1089 bp, Homo Sapiens
aaaagattctgccttgtgtacccaagcactcactcttgggtgaactaatgcttctggctgcctagcaagtgaagatctgttgagaaactgagaacgctccaagagagaagctgctctcccctccttgaagaagccgcggacacgggaaacccacggcgggcaagggcccagctgtgtgctcctttcctgtcatggcatctgctgatttgaaactccatgacgaacacgttgaactaaacatttttatttaaatttgtatcatgttcgtagttgctctcttgttgagagagtcatctgtcctgtttgttaggggtattttttcttgttaaaatgtatctcctgttgaatactcgggaaattcaaagggaagtgtggtcagcacacactgagcgttcttttctggagaggccggttttagcctcgtacctttagcaggaccgacagcgggtggaagggcccgtgtgctggatgggggtgtcgcctcctggatggcacaccctcccgaggacatccagacaggctgtgtcaccctccagcactttatgtgcctgctctgaggtgtcctgaacacacagcaacggctctccttcatcacaggccgggattcctttgtgtttctgtataacatcgatgacgagctgaagctgttgtcacttcactgccctctttggaatttcttcattgtgctgactgattctatttaggggctaacaataaaggcagtctacccactactatcatgcttgggaaacaagcgtcagcttgtacatatgacaagagaggaccctgaatacaccctctcttcatcagcccaagccttactgaggtgggatgaagacctcattctctgttctttaaaacatgtttcgtgaactaatattggtccatgtattttttgtccttttgggactctaagtgggtcaagaagcaaaaacatccatgtgttgttggggggaattggcaccattttttcctgactatgtttcaattaactaaagaataaatgatgaagaaattctccttgtagcacaactgtatgctgtgtaaattggcgtgagctcaaagcccagtcatgtgttttacctgtgg

SEQ ID NO: 246052 - DNA, 282 bp, Homo Sapiens
ttcgacggaagcactgattcatttttgctcttttattttttaggcagatggctggtttttgtaggattaagcagtgaggaaaaacagcaaactaaaaatgctacttcaaatatagcaacagtcactacataaggcttaaatcaatatattgcaagtaatttctatgaattttgaacaatacaatgtagtgtatgtggaaagatcttgcctaataagtttcattctactcctcaaagttactggagtcagtcaactattaataacagaattgtttttatagaa

SEQ ID NO: 246053 - DNA, 234 bp, Homo Sapiens
tccagtgcgaatattaagggtaattatttaatgaaactttcattccaatgatatgtacattacgcacatacatctacatataatagatgatgttatgttacacatgacataaaatatatattttatattccattatatattgtgtcacataatatatgaattatacacttttaaaatacatagaattgtaaattattgtataaatatgcacacgatggattacataaactctgc

SEQ ID NO: 246054 - DNA, 279 bp, Homo Sapiens
atctcatagaggatccccccacgtcgaatatcttgctatagtttctttgcacaacaggctaccctgttgggtgatatcccgtcatgacaatgcaagcccagctactcttccatagtcaaagccatgtgaagaaattcacatccttttaccatgtcaataatgggagggcaggttgctatcagtgcttctcttctctcatcctgccattttgggtgctcaagccaacctttcgcctcctgaattccccaggggggaaggacttatctattcattcaacaa

SEQ ID NO: 246055 - DNA, 327 bp, Homo Sapiens
gtataaaacagttaattatatacataaataacataaaataattctcataaattaaaagtcaaatgatctcccactattcattcaactgagaggtgagagctaggcgcgagtgatggtgggtaaggtgaggaggtgagccccacagaccctcctgcatgctgcctaggggatgaacattccttagattcatgaaggcatatattgcacaaaacaaattccagccctgtcctcaaaagtctgctgtttggagtgaagtgctgagaaaagttgcgttttgaaaaacacaatcatcctttgttctgctggcaacatcaggactgctccgga

SEQ ID NO: 246056 - DNA, 294 bp, Homo Sapiens
tccacctatcaagtcaatggagggagaatgagaaagagaacatggaaaggcctaggacattccatctctggggtcttcccaatgttgcccatcaacaattgccttcgttgtctgagggattgttccggaacaccccatcttggagggacgttacacacttgttttctagggatgttcctcgttctcaagatacatcacttgggaatctagcgctagcctgggctcatttgggtagcctggcaagacactggttgaggggaatatctgctcatataccacaactatccattattc

SEQ ID NO: 246057 - DNA, 191 bp, Homo Sapiens
cctctggcagagctctttaagagctagaaaaacatacaggagtgctctgtggattacttggcaaacaataaaagctcactatgtattagacagcaacaataacaatagctctgagtctagaagactgatttggtgtggaccatgaaatcacagagatcagtcctatctgcactccaccccagctctcacag

SEQ ID NO: 246058 - DNA, 315 bp, Homo Sapiens
cctcatgccccacctcggagggggaagctgctcgtgggtttttttgccccgccttcaatcttccctgtgcgcatccggggggaggaaggctgtggaaaagtgttcaataatgagtgcaggtttctcttgtcctcttgtgtttggggctcccatggattccaggctggcacactagcccacactttaagaacccgttaaaaggttggctgctttccttttatctacttttacagtggccatttcccctttccttgctatgccaaagataaaacggttcaattgttctgccttcagagagtcatgtcaccaatatac

SEQ ID NO: 246059 - DNA, 1166 bp, Homo Sapiens
  misc_feature (875)..(884): n is a, c, g, or t
  misc_feature (1095)..(1095): n is a, c, g, or t
gggaagcagtctctttggtcagtaacaagtgcaatggaaagaaaacgatcccttccttcttccactttcacagcttttctctgaactaggagaacctgggggtggatttgggtgggtggggccaaagaggaggcttctattgataaatccagagcctcaaggggcccagccacgtcaaacttctctccctcagggactctccagcaccaaaaggcagaaggtggaagccgtttttcccccagagccctgtgtttttgtgaaagcctcactgtggctcctctgttttacatactcattagtaagtgggaggtccactggggcaacagacactgccacaatttcagtgttgtgttcagccaaggggacggtctgggcaggcagcttaagtgtgagtttagtcacaactcctgagtgtcccgctctcctgcttacctaggaggtgagtgccaggaaaatacaccaaatgcttctagtattgtttccccacttaaaatagtcctgcttaaattcacatggtgtggtctgatgttctgagagcatcaggaaatacaacccttttgcccatttacccttctccccggatcccaaggtggtctgttgctctggcttcctttcattgtcttaggccttcatggagtggatgctgcctcctcctggctgtttttgtgcctgtttgaagctactgctgcctccatttctgggaaagacctttgagagcctagcccaggcctaagggctatgtttggtaccagtattttgtctttagcttttctatgtgattgtgccgtcattctgttttaagctcatggatcaatggatttgtttacaatgtgatattttctattaaatccagtattttctaaccccacccattnnnnnnnnnnttattaatatggccgggcccctccgcccctccaaaaaacttttccaaaacattttgctttggcgccccgggccccagaagggaaaatggaaccttgggccaataccttgtcttccctaaggaaaatcctggctcagtgaacacacgggctttggaattcttccccacgataaaagaacgcgcccgcgggcggttaatcccaaaccgttttnggaaaacacaatacgccaaaaagggagagttcctggaaggggcttatacaccgggtggaacttacttccac

SEQ ID NO: 246060 - DNA, 303 bp, Homo Sapiens
aattgtttatgggacaaccaggtagattttttaacagtggctgaaaatgtgtcatggaactcagaagggacaggaatgtggaacagacctttaggcaccacccacagaggtgatggctgaagcctggaatgggacaaggccacccaggaagagaggggtacagagcgccaagtgccacttttctctcagttcaccaacatttaaggaggaaagggatgatctgacgcctggacccacagtcatctatcaacacgacctgaaaaaaacaccaaaggaagcaaaggaagtaagactagagctgca

SEQ ID NO: 246061 - DNA, 278 bp, Homo Sapiens
ccactgtgccagcctgatttttaatagtgagcaggaatgctggtcgttccctctggtttgataggttccttcatcagattttctttgttgtccctcatgtatgtcacaaagtcaagaaaaagcatggactttgaaattagaggacacagactcacatccctgctcgatcacctcctatttaacttgaatttggacatattttcttaaccttgattaaactaccttatagttgtattgtcagggttgaatacgaatacctttcatcgatcgggggatcc

SEQ ID NO: 246062 - DNA, 445 bp, Homo Sapiens
  misc_feature (58)..(58): n is a, c, g, or t
  misc_feature (343)..(343): n is a, c, g, or t
  misc_feature (361)..(361): n is a, c, g, or t
attaagcccaggtcaagtgctggataattgacaattgcttgtccttatctgatcggtntctaaagaaggaaaggatggtcaggaaacatttatcataaatgtagcccaaggatatctattagggtagacaagaataggacaaaaataggccagagctcctgaggaggtgatatgggtctcttgatttgcagaaaatgacagccctatccaagtggccccagtgtatgccctcccagtagcagtgggcatgtaaactgcagcgaccttatttttaaaaccaaaaacctagtatgtggacaaagaacatgacaatatttggtaactgagattggttactgagaancctggggcatgtggctgnctgtggttataggtaatatttaagacattcataaaaatctgatattcttttaccgcaaataaccccagtatcatctactactta

SEQ ID NO: 246063 - DNA, 426 bp, Homo Sapiens
gtatggcagaacttcatcaggaaaaacccacaccatggaggggtaagcttgcatgacccccagctcatggggatcatcccacgaattgcccatgatatctttgaccatatctactccatggatgggaacctggagtttcacataaaggtttcctattttgagatctacttggacaaaataagggacttacttgatgtatccaagaccaacttggctgttcatgaagataaatacagagtcccgtatgtaaaggggtgcactgagcggtttgtgtcgagccctgaggaagtcatggatgtaatagatgaaggcaaagcaaaccgacatgtggctgtgacaacaagggaagccatatgtcttcgacacagcaggaccttcccacacgagacgagggcagacgacagcgacacagccaagaatcaatgt

SEQ ID NO: 246064 - DNA, 284 bp, Homo Sapiens
aagcagtggtaacaacgcagagtacgcggggcagccagccagcccagcgcagacccttggccgccgccatgctgaccgaggacgaaaagcagctgatccaacatgtgtgggagaaggtgctggggcaccaggaggactttggggccgaggtcctggagaggatgttcacctgtctaccccttccaccaagacctacttcccccacttcgacctgcaccatgactcggaacagatccgccatcacggcaagaaatggtgagcgtcctggggacccgtgaggcaat

SEQ ID NO: 246065 - DNA, 560 bp, Homo Sapiens
  misc_feature (52)..(52): n is a, c, g, or t
ttggtgacattttcatttatagtggcatttatatatacacatacatataganggtgaatgtgagatatattccttagggcttttgataaaacccatatctttatccctagttcatttacaagagagcagcgtaatggtaactttgagattttccttttgacagtaatttccattatcatttgaatgggagaaattcttaggacatgatttggaatcatttctagaatataaatttcatataatcttattttataatgagacaaaactgtgtctttgtaacaatacgtgataatttaagcctatgttttaatggttattgacaaagtttaatggcatccaaaatactcttatgtctatctgaatttttttcctgtactcttcttttttcttaaaagcatgatagacccctctgcaaatacagagcctttgttgttgctttgctgtactttggtaccttgctgtttattccttagtctagcagcatccttagtttgtagtatatcttacttagttgcaactaaaaaaaattgctagcctaggctttaactgggagtttctat

SEQ ID NO: 246066 - DNA, 258 bp, Homo Sapiens
tcctctgttcatcctctggttgctgccttgtttatgtgtgtatttggacagacattcatttattgtcattcagtcaataggtagagtatatgtgtctattttttggcaggcatgtagatgcttgaggctaatgggaaaaaaccagcatgaactctgactttagttagtgctaagtaatagataattttaaaaaatgacaccgttaaatagaaaatggcatgcatactaacagttgcaatggagaggctgtgatgctac

SEQ ID NO: 246067 - DNA, 188 bp, Homo Sapiens
gggacccctttgctttactacttgcagggattaggagtccactatttaataggagaaccccatttcatttaccccactttattaaaaggttagaaaagtactctccatattaagtatatggcttcatgtaactttcacctgatggtcctttagagataccaaatgccatgggtcctctagctagccac

SEQ ID NO: 246068 - DNA, 354 bp, Homo Sapiens
aagctcccaacaagacaatttgaaataattcattgttcatgccaaaattctaagtactgtttttcttagcaagtgtaacataatcaggaacaatgggtacaagtaaaacattctttggatgatattcaaagccttatttagcactggcacctgaataatagggtcattttgcctcactcatttgcccaaagtagccatttctaagttaaggaagtttttagataggctcatagccttgtatttcgtttttagatttgtaagctctatggcagggatactatattggtaattatggttttcatatagcaaccaccactagtatattcttgttggagctaagggtcctctaaggca

SEQ ID NO: 246069 - DNA, 322 bp, Homo Sapiens
gctgacctagaggaccccaagctcccaacaagaaaaaaagatcaatggcacaggtaggaagagaaaagggagggtgtgccacagaagggctgacataaatccaagattatgaaaggagttatgtggtgttgaggaaacaaagtagcctgactaatctctgtctatccttaatttattgcacggtttcaagcaacatttgcttgcaagtttagtcaccaggtcctgcaaatttggagcttatctatgttggggaggcttggggtacccggaggctcggaaatttcgtaaatcactgggtcataagctggttttcccttgttgt

SEQ ID NO: 246070 - DNA, 284 bp, Homo Sapiens
aagctccctacaagagacataatcccggtccttaggtagtgctagtgtggtctgttatatcttactaaggcctttggtatacgacccagagataacacgatgcgtattttagttttgcaaagaaggggtttggtctctgtgccagctctataattgttttgctacgattccactgaaactcttcgatcaagctactttatgtaaatcacttcattgttttaaaggaataaacttgattatattgtttttgtatttggcataactgtgattcttgttgggagctt

SEQ ID NO: 246071 - DNA, 944 bp, Homo Sapiens
  misc_feature (924)..(924): n is a, c, g, or t
gacctctttggttgtttgttcctttaggaactgtctgtctgcagatacttaagaagatcgggatctctggatgcgtaaactcaatcaagttcttgttgatattcgcctctggcaacctgatgcttgctacaaacctattggaaagccttaaaccgggatatttccatgctatctagaggtttttgatgtcatcttaagagacacacttaagagcatcagatttactgattgcattttgtgctttaagtacgaaagggtttgttccaatattcactacgtattatgcagtatttatatcttttgtatgtaaaactttaactgatttctgtcattcatcaatgagtagaagtaaatacattatagttgattttgcttaatcttcatttaaaagcctcattttcctagaaatctaattattcagttattcatgacaatatttttttataagtaagaaattctgagttgtcttcttggagctgtaggtcttgaagcagcaacgtctttcaggggttggagacagaaacccattctccaatctcagtagtttttttcgaaaggctgtgatcatttattgatcgtgatatgacttgttactagggtactgaaaaaaatgtctaaggcctttacagaaacatttttagtaatgaggatgagaaactttttcaaatagcaaatatatatttggcttaaagcatgaggctgtcttcagaaaaagtgatgtggacataaggagggcaaggggtgaaaacttggggggttcaatattttattataggaagagttaataacgcacatggttttacatttacctccagctactataatatgccagtgtgggggcaccttttttcacagaaattcctgggcttccttaaagaatcctttattttttgctgccgtaagcttaccgaactttaaccctanttaagtttttcttccacccc

SEQ ID NO: 246072 - DNA, 284 bp, Homo Sapiens
ctcaagctcccaacaagataaatggttacaaaagtttagttttaaaaaagatttctcttctttcattatttataagtcaaagctattggggaatgtgtgttaaacaacgactgaaccaaaattggttgtaataaaaatggctaccatagtaaaggaatatgaacataaaatatcaaactatttgagaacttctggtcaagatttttttggttcccagattcaagttctgaatcctttggtatggttcacagttgatagccaccttggaaccttcttgtggggag

SEQ ID NO: 246073 - DNA, 409 bp, Homo Sapiens
ggatttgttgtggaccctgttacatctagtggttgggtttgcagtgctttccctgactgttggccagaccagcctcttgtcctgcagagatgcccctccttccagatgtgtctggtactttcttatagtgttgtttcagcttagtcccctgtcccctgagcttcttttaaatgagaagttctactgaagggcccagttgattcaagttaaacattttgggctagaatatatatgatgttctatgcttcttgtgtcacttcagggaccccagtcatattttgttgcttcaatacaatagatggcagtctggtctttgtgtgcattatgttctttctgtggactggaatgcaatgcttttaacacctgttgatgatcctggtcctagatggtagttttatttgggggcttg

SEQ ID NO: 246074 - DNA, 454 bp, Homo Sapiens
tcctgtgtcgtggtgaggctgcttccctcttagattcctgcatcagttacctgaagagtgccctgaaatttcaaggcaagtcatttaaaaaggtgcaactgtttataacgacttagttttgggaatcgaatttcccaaatattgttcaatagaaaacaaggcatggcgatgacaggctagggactctgtggggctgttgcttcacatgcagtccctgactccaggctgagtgtctgtcagcacacacattgtctgctctgcagcgtgcaggggcctgggaacacactgcttcaccaccacctcatttgggcccctgtgtaaggttttatttgcgggagaacatttctctgctacagaaacgtgacgagcctggtcctgagggcaacaaacgcacctccctctgaagttcactcacagaaggctccatcttcccctgaccacgacactaatcctt

SEQ ID NO: 246075 - DNA, 204 bp, Homo Sapiens
cactgtgtcgtggtctctctgcatcccaaacgtaaacaagtgacagaattgttacttagaaaaggagcaaatgttaatgaaacaaataaagatttcatgactcccctgcatgttgcagccgaaagagcccataatgatgtcatggaagttctgcataagcatggcgccaagatgaatgcactggacacccttggtcagaccgtc

SEQ ID NO: 246076 - DNA, 178 bp, Homo Sapiens
gccgttgtcagtggctgactcacaggctgaggccaaactgagcagtttctggcagttgattgtggatgagaaaaagcaggttttcacttctgagaaattcctggtcatgtcttcagtaggatgtccctgtgtactgtgttgcatctgacagagagacttttccttgacatacggcata

SEQ ID NO: 246077 - DNA, 468 bp, Homo Sapiens
agctccgtaccccccaggagccctgctcctgggtgccgtgcgctggtgtgccccttgcccgcccgctgcgagacgcactaggtgcgctcctccgacgttgcacagcgcctggcctggcgctgtcagtgctggcagtaggcggtcgacttataacagcagcccaggagcggaatgtgctggccgagtgccggctggacccagctgacctgcagttgctgctcgactgggtgggtgcaccagcctttgcggcgggtgaggcttgggcacctgtgtgcctgccccgcttcaaccctgatggttttttctacgcctacgtggcccgcctggatgctatgcctgtctgcctgctgctgcttggcacccaacgtgaagccttccatgccatggccgcctgccggcgcctggttgaagatgggatgcatgcccttggtgccatgcgtgcccttggggaggctgccagcttctcta

SEQ ID NO: 246078 - DNA, 401 bp, Homo Sapiens
ccgttgtcagtgaaccccgggccatcgctgttgaccccctgcgagggttcatgtattggtctgactggggggaccaggccaagattgagaaatctgggctcaacggtgtggaccggcaaacactggtgtcagacaatattgaatggcccaacggaatcaccctggatctgctgagccagcgcttgtactgggtagactccaagctacaccaactgtccagcattgacttcagtggaggcaacagaaagacgctgatctcctccactgacttcctgagccacccttttgggatagctgtgtttgaggaacaaggtgttctggacagacctggagaacgaggccattttcgctgacaacggcctcactgacacgccttactacacgcctcactacacgcctaa

SEQ ID NO: 246079 - DNA, 186 bp, Homo Sapiens
tctcaattgtcttacgttatttaagaccccatcttagcagcctggatgctgggacacttctgcatgtgagaggcacatgtggaaggggatctacaggagcctcttggagaggagcatggccctcagcatgacagccagcaagaaagtggagcctcagtcctgtagctgccgggaactcagttctgc

SEQ ID NO: 246080 - DNA, 1437 bp, Homo Sapiens
  misc_feature (313)..(352): n is a, c, g, or t
  misc_feature (933)..(933): n is a, c, g, or t
  misc_feature (1041)..(1041): n is a, c, g, or t
gcgctgtgggctgcctccccgtgctgtgtagcgggacggaggtcatttataggggaggcagtgttccctaaacaccttaccagcagcttccattatggcatggaagagtgttctcggcaatggccatttgtcatcactgggaaccagagacacccatccctacgccagcttgagccgtgcactgcagacacaatgctgtatttcttctcccagtcacctgatgagccagcagtatagaccatatagtttcttcactaaattgactgcagatgagctgtggaaaggcgctttagcagagactggtgctggagcnnnnnnnnnnnnnnnnnnnnnnnnnnnnnnnnnnnnnnnnaaggatctgaacaggggtcagatcattggtgaagggcgttatggttttctatggcccggactgaatgtccctcttatgaaaaatggagcagtgcagaccattgcccaaagaagcaaggaagagcaggagaaggtggaggcagacatgatccagcagagagaagagtgggaccgaaagaagaagatgaaggttaaacgggagcgaggatggagtggaaactcatggggaggcatcagtcttggcccccctgaccctggtccctgtggagaaacatatgaggattttgataccaggatacttgaggtaagaaacgttttcactatgactgcgaaagagggaagaaagaaatcgatccgtgtcttggtggctgtggggaacggaaaaggagctgcaggtttttctattgggaaagctactgatcggatggatgctttcaggaaagcaaagaacagagcagttcaccatttgcattatatagaacgatatgaagatccatacaatattccatgatatttcattaaggatttggaaggacgcatatcaagatgaagaaacaacccaaaggttacggccctcgctgncacagggccatcatcaccatctgccggctcattggcatcaaagacatgtatgccaaggtctctgggtccattaatatgctcagcctcacccagggcctcttccgtggngctctcccagacgggaaacccattcaacagctggctgataagaagggcctccatgttgtggaaatccgggaggaatgtggccctctgcccattgtggttgcgtccccccgggggcccttgaggaaggatccagagccagaagatgaggttccagacgtcaaactggactgggaagatgtgaagactgcacagggaatgaagcgctctgtgtggtctaatttgaagagagccgccacgtaacctctctggccttgtgcagccagttcctgtgctgccctgcacctaggagagactcagcccctcacagcttgggatgttaccttgccttttgtttgttttgagggaagtttaatctttaaactctttggaaataaataattatagctttcaaaaaaa

SEQ ID NO: 246081 - DNA, 438 bp, Homo Sapiens
  misc_feature (308)..(308): n is a, c, g, or t
  misc_feature (312)..(312): n is a, c, g, or t
gcattaatttttgtaccttgcttcttttatgtttgtaatctgtaaatgaacacatggcagaaaataacccctgattggtaggatcatagttctaaatggaaatgtttgtaattctttgatgtgctacaaacctgaaactggtaagacaagcacaaagcaacgtgcaataaaaaaatcgtatctcaagggaaaatactcaaagaaagaaaagtggcagcacttatattagttttataacgggataaagtcttgtgtatagcaaagtagttgcatctgtttattttctatttattattgttacaataggntaantagttatagcaaattatttattgatttgtaacaacttgtttttaaccaaactttgtagcatggaaaaaattttccatccacagatacaaacatgaatgaatacattcagaatgctgacggggatcc

SEQ ID NO: 246082 - DNA, 563 bp, Homo Sapiens
tgtggtagcaacaaggagggatggactttgaattagtgttcagagtcacagatcctacgtatgtgctcttcagtagaggattttctgtgatcctacaatgaagggaaagctatataatttattggtacttcctaaagatagagactaaagtcatggtagtattggccaaattaattttaaaactgaacaagtcatgaattttcatataaatcaaagaactttttccttataaaagcttccatttttgaaaagttggatcagttgtaagacctttcatctttagtattgtatgatataattctacattgaaaaataaacacttggcattaaatgggacttggagtcaaaagatctggttttatggtccatctttaccaatcatttgctgtggatctgctttaaaggtcctggaacctttgagcctcagttacctcacttgtaaattggcagaaatacctacctcacagggttgttgtgaggattcaatgagctaatgtatgttgaaagcacctttgtgaattgtaaaggtgctacacaaatgttagttgttgttgctaccacca

SEQ ID NO: 246083 - DNA, 402 bp, Homo Sapiens
ctaatattataatcgtttcacttaaattgaaatcatgttctctgaattgtagtttaactaaaaatcatatttgaaagatccaaatatgtgtctattattctgatttatacgtagagatataaatttcacaaatatttactctgcacatactatgtatgctagacataatgcaagcagcaagtgtcaaaaatggcaatattttgaatgccatctatgcacatattttaaagttataataaaaatcctcagtaaatataaatacatatttattaccggataagttataagcacagttcttccgtactgaaatatatttcttctcctgctctaggatttggggtggaatctggttttcattgtgtccattttcttgttgctacaacacgggagtcctctagagtc

SEQ ID NO: 246084 - DNA, 452 bp, Homo Sapiens
  misc_feature (259)..(284): n is a, c, g, or t
tcagggtactagatatagaactaggtatttaatattcagcgtggttgggagaaacagaaatattaacaagaaacacaatcagtcccacatgttaacaccatgttgtaaccaagttgatgatccaggacacaccagagagcagacatagaccctaccaaacttttaataattataataagcaagtattttctgtttaatctgctgagtgttctgttacagttaccttggagatgagctattctggtatcggtgacagttnnnnnnnnnnnnnnnnnnnnnnnnnngaagactgagccaacagttttctagtactatgtgcacaaaaagttaatataacaggcctgagactgcaaatcttagaaaggactgcttataagactggcctttagctggtgttaggaaacacggagtttgagagggttgccaccattccataactggtaggcatggtt

SEQ ID NO: 246085 - DNA, 774 bp, Homo Sapiens
ggggaggaagagcgttttggggacgggggctggtgaggctcacgttggagggcttcgcgtctgcttcggagaccgtaaggatattgatgaccatgagatccctgctcagaacccccttcctgtgttgcctgctctgggccttttgtgccccaggcgccagggctgaggagcctgcagccagcttctcccaacccggcagcatgggcctggataagaacacagtgcacgaccaagagcatatcatggagcatctagaaggtgtcatcaacaaaccagaggcggagatgtcgccacaagaattgcagctccattacttcaaaatgcatgattatgatggcaataatttgcttgatggcttagaactctccacagccatcactcatgtccataaggaggaagggagtgaacaggcaccactaatgagtgaagatgaactgattaacataatagatggtgttttgagagatgatgacaagaacaatgatggatacattgactatgctgaatttgcaaaatcactgcagtagatgttatttggccatctcctggttatatacaaatgtgacccgtgataatgtgattgaacactttagtaatgcaaaataactcatttccaactactgctgccgcattttggtaacaacctgtagcgattcgttacactggggtgagaagagattagaggaatggaaagaggagagaaatggggacatcctaatagtcccctaagtgcctattaaatacccttatttgggaccagggccttggcttccc

SEQ ID NO: 246086 - DNA, 439 bp, Homo Sapiens
  misc_feature (242)..(322): n is a, c, g, or t
  misc_feature (374)..(374): n is a, c, g, or t
tccactagtgtaggccttcccaagccgccagccaatccagttccctcatgtgaccagagagctgagctagcactaatgatgagctcacagcccacccttgatatgcacatgggaataggtgaaaccagacagcatgcttccgtggtgcttctcaatgagacactgagctatgtcttttatggtttattatgctattgaaatatgattcacatactataatattcacccttttgaagtgtatnnnnnnnnnnnnnnnnnnnnnnnnnnnnnnnnnnnnnnnnnnnnnnnnnnnnnnnnnnnnnnnnnnnnnnnnnnnnnnnnnagtgtttcacccacctcagcctcacaaagtgctaggattacaggcatgagcncccacacctggctttagatatgtttagatacacaaataccattctgttccagtcgcctacactag

SEQ ID NO: 246087 - DNA, 1167 bp, Homo Sapiens
  misc_feature (324)..(337): n is a, c, g, or t
aaaggaccatacttcctcatcctgagtcaactgctcttaacttactgacaacaggtggtgggcaataggccagctccctttcccagacctgaactggccttagtagagagagtcctggcatcaagggcctgcagtctcctggaataacagcatcaggccttcaaccagcacactgtctcacatataggcactcaaaaaatctgcttcctgaatcaatggaagtatattatttcatttgaaagcatactgcaaacttcagaggctctgtaatgggcccaggaacaggtaaaaaaaatcccattagggagaggggtaagggcaggnnnnnnnnnnnnnnaaagtacccaactcgggtacctcctttggtagacagcaggctgcagtttctgctgggccctgccttggacaccagtctcaccagcagcagcaccagggtgtctttggtgtggagggtcaggttatcacttctggatgtgctcagagccttctggggaaaaggctggtttttagatcatacagacaggacagggtaggccagaatcatttcaggctataaatagaatggcagataagccttccatgccagtgtgactcttaaaaccttcccatctggagtcctgtattttctctgcccatgctgatgtactgctcatttgtgctttagctctgcacacagcctggcctctagctagagttagaactgcaaagctgcctaaaccactgagactggcttcaaaggtcacagaacacccaaaggcagatgcttctgtttggaaaaggttcttacgaccagatgacacaaacaggaagcgcactccacagcctactagtttttatgatggcaagaaatgaaagtgaccaagctagaaccccaccattcagagtcaccttaaatgtagccatcttacccagggtcctgagggaaaaagcaatttcaacatggagccagtatggagagattgcaagattacctagaaagttaccaaaaggctatgctctggaatgtctttttatattccaacacttcaatgatggaatggtctcttctcattttatctaacaacagtttagttttataaagaggtatgagctacatttggctttatttcctataaatctatgaacgtcttcaggacacatgctgactttctgaggtattgagagacg

SEQ ID NO: 246088 - DNA, 899 bp, Homo Sapiens
ggggtatttaaaaagtgtttggagacttttcacctgtcctataaaattttgaattgtgtatgtgatctacatagaaagaatattaaagagtaggttgaactctttatagccaaatacagccttaaatatgcttgtatagcatccactggcagaagtaatagttgtgcctcagacttgggggttgcatgtggccctgggggagttactacccttggtatgcatgagcggttcctattagcatcagtgggaactcagtactctgtatgtatccacaaaagggaacttgagacccacagttattcttaatttctgatattaacaaccgtacatactgctgaatttaactcaaaatatttcaggtaagtgaaagtggtgcttaatgtagactatagaatgactttcaggtgttttcaactgaaagtatatatccagaactgcatccttatagaaatacaagtaagacttaggataatttgccttcaaaacagttttcctaatctcagcagtatccagtgagtgaagaacacttgactgactcttgggccacctctgttacttactgtactatggaagctcctggtgaatgtttacaattatgggatgtagtatttctatttgtactttaagtcaaatgcttatatgaaatatgtgacaacaaatagagaagactggctctgttagtaattatgcagtatgtactctatttaaggatctgtggtagtataacatgaagtggaatgtcattaattttgaagtaataactgccacatgtgggaagtaggggagtaaggagaatgaattccaatctgtgattaaaagtgtaaactatagactctactgtagtacatttcaggatctagaagtttacttttataaagatgtgtccgtcctatgtattc

SEQ ID NO: 246089 - DNA, 347 bp, Homo Sapiens
agtgctacctccacaaacagagagaaaatgttcaagggcaaacgggctgggacagaacttacttgggactacaactacgaggtgggcagtgtggaaggcaaggagctactctgttgctgtggggccattgaatgcagaggacgtcttctttagaggacagccttcttcccaacccttcttgaactgtcgtttcctcaggaactgggtcttcctgattgttgaagcctgacccgaagtctctgggctagctactccccccagctcctagttgatagaaatgggggttctggaccagatgatgcctgtttgtggaggtagcactctgtttgtggagtagcaatgaatcc

SEQ ID NO: 246090 - DNA, 647 bp, Homo Sapiens
  misc_feature (421)..(508): n is a, c, g, or t
aaaaaaagggggggagcggcccaaaagctccagctaattcaaactcaaggccaaccataaattatggaccctcttttaaccctcaaacacaggcaagaagctgcccatacattccccaaagcaggagtgcactctgccacaggcctagatgccgtcaacctcctggaccttgaactccctaaattaatggcctctgtgtgagtatgtgtaagcagcccctctctgtcccagtccatcctaaaatcactcccttggagccaccactgcccctctcatcttctagaatttctagaaagataaagagctagataagcatctaggtacctttcttctgctgttagctctaaagacaagtgaatatatcctagctaggatgtactctaaggaatgcagaagtaggccgagtgcagtggctcattcnnnnnnnnnnnnnnnnnnnnnnnnnnnnnnnnnnnnnnnnnnnnnnnnnnnnnnnnnnnnnnnnnnnnnnnnnnnnnnnnnnnnnnnnctacttaaaaacagcaaccaaaaaaattagcagacatgatggtgtgtgcctgtaagtcccaggtactcaggaggctgaagtaggaggattgcttgagtcccggagtttgaggctagatgtgagctatgattgcaccact

SEQ ID NO: 246091 - DNA, 371 bp, Homo Sapiens
  misc_feature (69)..(69): n is a, c, g, or t
  misc_feature (238)..(238): n is a, c, g, or t
  misc_feature (304)..(304): n is a, c, g, or t
  misc_feature (350)..(350): n is a, c, g, or t
  misc_feature (357)..(357): n is a, c, g, or t
acatgagagtttattatcacatgactactcaggaggggacatgaagcggacagggatggggaaggggtntaaggaatgggcaagtgctgctggagcagggctgtggccacggtcatggggccaggataactggggctgttgaagagcctcttttcctcagtctggttcttcttccagcagtcagatgcagggacgcccggtgcagaagcacagggcactaataatcaggagaggcatngctagattccactcacttccaacatttccttctggtctcttttctgatccaaaggcatagcatggntatggacttccctgggattcctggggctctttgacttgggggccanttggttnggggatagggggct

SEQ ID NO: 246092 - DNA, 823 bp, Homo Sapiens
  misc_feature (407)..(576): n is a, c, g, or t
gggagtgaggtcgggcaggttcgctgtggcgggcgcctgggccgccggctgtttaacttcgcttccgctggcccatagtgatctttgcagtgacccagcatcactgtttcttggcgtgtgaagataacccaaggaattgaggaagttgctgagaagagtgtgctggagatgctctaggaaaaaattgaatagtgagacgagttccagcgcaagggtttctggtttgccaagaagaaagtgaacatcatggatcagaacaacagcctgccaccttacgctcagggcttggcctcccctcagggtgccatgactcccggaatccctatctttagtccaatgatgccttatggcactggactgaccccacagcctattcagaacaccaatagtctgtctattttggaagnnnnnnnnnnnnnnnnnnnnnnnnnnnnnnnnnnnnnnnnnnnnnnnnnnnnnnnnnnnnnnnnnnnnnnnnnnnnnnnnnnnnnnnnnnnnnnnnnnnnnnnnnnnnnnnnnnnnnnnnnnnnnnnnnnnnnnnnnnnnnnnnnnnnnnnnnnnnnnnnnnnnnnnnnngcaacacagggaacctcaggccaggcaccacagctcttccactcacagactctcacaactgcacccttgccgggcaccactccactgtatcccctccccatgactcccatgacccccatcactcctgccacgcccagcttccgaggagttctggggattgtaccgccagctgccaaataattgtatccacagtgaaatcttgggttggaaaccttgacctaaagaccattggcacttcgtgcccgaa

SEQ ID NO: 246093 - DNA, 809 bp, Homo Sapiens
ggtatggggcccgttgtcgccttttacctaaggggcggcccgcgccgccaaacaaaaagggtttcaagaaaaattttccgaaggggccgagggcggcccgacccaagggaccgctcgtcggcgcggccaggggcctgttttccagctggacctcccaagtccaaaactttatttctaattccaaggaaagttaatatttattataccagtaaaataaaaccaaggggaaggggctctgacacttggttttcagagcaagtgtggggctggggcagagcccaacatacctgctgtggggacagggagccctcagccctccccattagaaagcagtgaggacaaaagatccatgctcccccgggaacagaaggcagtgatgccaaatgccaaggaagcagcttaaaacacagcccccggtccactcacctccagctcaacacatcaaaagcctcgttactgacagacattgcaactggcctgagcaccttaccagagcgcctcatacacacctggggcccaatcgagtgtggacagacgcagtacacggagaggttgcccaaaagcccccaaatttaggccccaacagggcagagaatcaccttactggtggctaccaggtttccaaaatcttcccctccttccactgggaccacacagcaccaaggggcagtggcgacaataagtcaaaagggagccctggcagccgaggctgcagcttgtatttcactgctgccgaaaggtagcagctaaggctgaagcgttcctcaaccgccaccctgctcccttccctcaaacccaaacccccaccc

SEQ ID NO: 246094 - DNA, 714 bp, Homo Sapiens
  misc_feature (114)..(114): n is a, c, g, or t
tcgaatgccccagggtgaggagcagggtggggtaggggcagggagcatgaatccagctttgtgccggtggctgggcctacaacagagatgcagccctcaggactgggctccccntaagctgacaagggcgtgggcttgtcttgaggtgggtgatgtgccctggttacagccagcagtcctcaaggacaaacgggaggtgcctggaatcctgcaggggcccctgcagagtggccagcggacgcccttcacccctgagtgcgcatagggccctcatctgcccacctgctcgcagctcccgtctcccgaggccgttttcaaggaggctgccctggtatcgtgccatccctacactcaccggaaccaaccatgcttatcactcagtgacctgtcagccacagagaagggctgccatctgctaaccctgccccaacggtggcagagccatggggtcagcctctccatgctgtaggagaggcaagcaagtccgtcttttcagccaacagatccaccaaatttctacccaacacgggaggccctaacaagcaccctccaaatcgttccttgggcccgagactccggacatggcttaccctctggagggccagtccagcaccccagggattctgtctctcacattggaattaaggccaaatggttctggtgttacagaaggaagcatctcccgaaccttcccaagcctgaagcagggagacc

SEQ ID NO: 246095 - DNA, 665 bp, Homo Sapiens
cagttaaaggacttgaagcccacacaagttcttcttatctctactagaattaaaatgttaagtcaaaacgggctccttttttgcgcctcctagtgaaacttaaccagctagaccatttgagtaccagcatttagttacaaacgtcaaaggcttccggtgctgcttaccttccttttttgttaatgtgcttttatttattaaaaaaaattacaatgaagatgcctgttttgtctctactgtgtactctgatcgtatctttcccaagtgcagactccttgtggaggttttcttaaattgttccctttaaaagaaaatgacggtaccaacaatgatttggcttttatattactgtaagatgttataatgttaatgtggatgtagtgcttttactttacagattgattggaataagattattgcatatgaatttacccacaggactctgaatcatgttacccactcccctcacaatgttgtccacttagtgagttgcattgatctatccgtaccaaatgatgttgaataattacatatctttcttgactatactgatttcttattttggtcactattactaaatctctgttaatattctctcttttaactgaaaagggatgggatagaagggtttgcaatgccatattattggtaagagggctaggagg

SEQ ID NO: 246096 - DNA, 379 bp, Homo Sapiens
  misc_feature (291)..(291): n is a, c, g, or t
tgcccttttctagagatcccgcggcaagaggctaaggcggtgcccctgttgaccaaggagagccagacctgttgctcagggcgagctcctggttgccagcgagtttccacgggacccgtcgcgtgtatggctgagactcattcccagtttccaggggcccggtatttggacactagttgccaagtctggggcctggggattttagggaccagcggttgtgaccatctttctgagcaccaagggcttcccttttgttgccaaaaaggtaagttctcgcgcttgctaggctgnctctcttgcctccccttggccggggcaacaccagttactgtgagcatcaccctggtgtggtgagtcacctctagtcggcctcttgccg

SEQ ID NO: 246097 - DNA, 1009 bp, Homo Sapiens
  misc_feature (192)..(472): n is a, c, g, or t
ccactttcttgtatttttaagggtattcaatacatctatgtttgaacagtttgttctaatatatacatttgctacgggaaaattgaaatcgcacactgaaatatccttttattgcaactcaaattttccaaaaccaagaaaatcaaattattatgctctagccaaattatgtaatgttttctttttcttttnnnnnnnnnnnnnnnnnnnnnnnnnnnnnnnnnnnnnnnnnnnnnnnnnnnnnnnnnnnnnnnnnnnnnnnnnnnnnnnnnnnnnnnnnnnnnnnnnnnnnnnnnnnnnnnnnnnnnnnnnnnnnnnnnnnnnnnnnnnnnnnnnnnnnnnnnnnnnnnnnnnnnnnnnnnnnnnnnnnnnnnnnnnnnnnnnnnnnnnnnnnnnnnnnnnnnnnnnnnnnnnnnnnnnnnnnnnnnnnnnnnnnnnnnnnnnnnnnnnnnnnnnnnnnnnnnnnnnnnnntttccttacaagttacttcaaattcttgatgttgaatttcatctcactgacttcaggcttttaaaacacatgggaatacttgagacctaagaatggttgtgagtcaaataaaaaagtagaactaaagtatactgaagttattcaaatacattcaaactataaagatcccttatagattactggcatcaaggtaggaaggaaaagatacaagaagtaaaatgcaacactcattacaggttgtcaacattattggtatacagtttatcctaacacagagcagccttcttaacctgctccactaaaattaccagcaagaaagaaaagtacaagaataaggttcacagctgaattggcttggtgtcctaattccctattccagtattctcagaaggatcccatctatgatatatgcagaaatcacagccacatttgaatggttcaatcttgattcatactgaactcccttaagcccagcagtttctcattcttaaaaggtaggttattagagccccaaagcaattttcataacaaatctac

SEQ ID NO: 246098 - DNA, 179 bp, Homo Sapiens
tgtttcaggtccagagtagtttctttctgtctgctttaaatggaaacagactcataccacacttacaattaaggtcaagcccagaaagtgataagtgcagggaggaaaagtgcaagtccattatgtaatagtgacagcaaagggaccaggggagcggcacatgcgttgggagcggcaca

SEQ ID NO: 246099 - DNA, 511 bp, Homo Sapiens
  misc_feature (274)..(282): n is a, c, g, or t
  misc_feature (317)..(363): n is a, c, g, or t
aggtctgtttgatgatcttagctcttgacgtcagcactcagactcttagggtcacccaatccatgtgccgctcccagcaacagggaaggcatttctctatcagtttgttggtaaatgattattgacaaacaatgtgctgggaatgtggagtgatttgagtagatctggcctctattctcatggagcttcctttctagaggggaaggcagatgatggatggataaatataaatgattctaataggttggtgcagcagtcattaaaagtaatggcnnnnnnnnnccaaaagaaacggggaggagccgttgctgccgttnnnnnnnnnnnnnnnnnnnnnnnnnnnnnnnnnnnnnnnnnnnnnnncccagtaaccacgggtgtgcaaatgtggcgatgggcaagttccgagtgctaggagagcatctagcttcccggagtcaggagacgggggttggcaacctaaccaaggttaagtccaagtgaggggggtgcgcagggaagcggttattta

SEQ ID NO: 246100 - DNA, 270 bp, Homo Sapiens
  misc_feature (121)..(136): n is a, c, g, or t
  misc_feature (145)..(213): n is a, c, g, or t
ggtcactctagaggatccccgtcagcgccctgggagggggcccgttggtgtttgctgtgtgaaaagatgaattaatcctcccagggttcaaggaccagctaggagcaggattgccatggcnnnnnnnnnnnnnnnnaacgtggannnnnnnnnnnnnnnnnnnnnnnnnnnnnnnnnnnnnnnnnnnnnnnnnnnnnnnnnnnnnnnnnnnnngttaaagtgattctcgagccttggtctctgagtcgctgggatcgcagggcgctgact

SEQ ID NO: 246101 - DNA, 842 bp, Homo Sapiens
  misc_feature (66)..(69): n is a, c, g, or t
  misc_feature (84)..(84): n is a, c, g, or t
tgggccccgcgggcccaaagggaaggtctagaaaggtttctgggggcccgaggcggccgccatgtnnnntctcccccgtcgggnttttccgctttataatcaatataatctcggtgcctttgaatctaccaggaccccggggttcccagacgcctgggaaatgggtctctcaattcccttggttttggagggaggagtttaaacctgtgcatgggagccaggagggactcaaggggtgccagtggtgagtgggaggaaatacactttgggatgactcgttcagccctgagagaggggtgtgagttacccaggggaatgggtagggaaggtttaaagcaacacccaaggaaagaagggaaactcatctcttgtagtgattcaaccctgagaacagatggggagtggggttggctgtcccccatggatggatgaaaggtcacctaatcagtagtcaccaggacatagtggtggaggcacaagtggccaaggagtgctcatttggtggagactgggaaagcggctgttatttagtgtctgtgtagtagagggagcgcagctggtcccagaagaagagggagaggatggtgtgggggccgaggcggaagtaggaggcacctatacccttgtacatgccaaaaatgccctcggtccgagctgtctgcagcagagcgtccagtatcccccggtacatgaggcccttgccctgtgcatctgtgggctggttgtagagccttgtgcaggccacatcaaagggtgccatggccaagacaactgcaatgccactcatcatggcagccaccagcgccaacttccagctctggggaggaaagatctgatgctcc

SEQ ID NO: 246102 - DNA, 984 bp, Homo Sapiens
attagatggcatgtcaaaaaatccttcagggaaaaacagagaaactgttccaattaaagataatttcgaattagaggtacttcaggcacaatacaaagaacttaaagaaaagatgaaagtaatggaagaagaagttctcattaagaatggagaaattaaaattttgcgagactcactacatcagacggaatccgttctagaggaacagagaagatcacattttcttcttgagcaagagaaaacccaagcactcagtgacaaggaaaaggaattctccaaaaagctccaatcattgcagtctgaactccagtttaaagatgcagagatgaatgaattaaggacaaagctccagaccagtgaacgagcaaataaactggctgctccctctgtttcccatgtcagtcctaggaaaaacccttctgtggttataaagccagaagcatgttctccacaatttggaaaaacatcttttcctacaaaggagtcttttagtgctaacatgtcccttccccacccctgccagacggagtcaggatacaagcctctggtgggcagagaggatagtaagccccacagtctgagaggtgactccataaaacaagaagaggcccagaaaagctttgttgacagctggagacagagatcaaacactcaaggttccattttgataaacctgctcctgaagcagcctttgatcccagggtcatccctaagcctttgccacctcctgagtagtagttctgagtctcctgctggcacccccctgcagccaccagggtttggcagtaccttggctggaatgtcaggcctcaggaccacaggttcttatgatgggtcattttccctctcagccctgagagaagcacagaacctggcattcactggactgaatctggttgcccggaatgagtgctcacgtgatggagacccagcagagggaggcagaagggccttcccactctgccagctttatggacaccgtgg

SEQ ID NO: 246103 - DNA, 901 bp, Homo Sapiens
  misc_feature (60)..(130): n is a, c, g, or t
agtcgacggtaccggactatgcccgggaattcggccattacggccgggggtcttcgacannnnnnnnnnnnnnnnnnnnnnnnnnnnnnnnnnnnnnnnnnnnnnnnnnnnnnnnnnnnnnnnnnnnnnncatcctttctattaattcattgtacttatttgcttatttgtgtgtattgagcatctgtaatgtgccagcattgtgcccaggctagggggctatagaaacatctagaaatagactgaaagaaaatctgagttatggtaatacgtgaggaatttaaagactcatccccagcctctacctcctgtgtgatacttgggggctagcttttttctttccttccttcttttgagacggtctcgttctgtcaaccaggctagaacgcagcggtgcaatcatgagtcaatgcagcctccagtctcgacctcccgaggctcatgcgatcctcccatctcagcctctcgagtatctgggaccatagttgtgtgccaccacacttggctaactttttaattttttcgccgagacggtattgctatgttgctcaggctgtttacatgccagcacaatttataataaacactcatctttcctccccccaccccgtaaccatttttcgcccttcatattgtcgtccgcctcggccctttgagaaactttctaaaccccctcgtttgggggcgccggcccccgtagggtaacccaaccttgcccacaccctgctttccccagaaccttccggttcacgccctagggcttgggatttttccccaatacataattgcccgggtggcactacgaccggttctgtaaccacccccagacgcgagttttctgcgccttttcccgggtccccttataccgggagtcccaagggagccccagaaatcatttttt

SEQ ID NO: 246104 - DNA, 823 bp, Homo Sapiens
  misc_feature (727)..(727): n is a, c, g, or t
ggtgatctagcggatcctctctgacgagttcacagaaaagagtccgatcaagagcttcaagaaagcacaaagatgaaactgtggattttcaggctcctttgcttccagtgacctgtggtggggtgaagggaattttacataaggagaaattggagcaaggaatcttggtgaagtgtatacagactgaggatggaaaatggttcacccccatggaatttgaaatcaaaggaggctatgcaagatcaaagaactggaggctgagtgtgcgctgtggcgggtggcccctacgatggctgatggaggatggatttctgcctgatccttcaagaatatgttacaggaaaaaaaagagaatactgaagtctcaaaacaatagctcagttgacccttgtatgagaaacctggatgagtgtgaggtgtgccgggacggaggggagctgttctgttgcgacacttgttcaagagtcttccatgaggactgtcacatcccgcctgtggaagctgagaggaccccgtggaattgcatcttctgcaggatgaaggagtctccgggaagccaacagtgttgtcaggaatctgaggtcctggagaggcagatgtgtcctgaggaacagttgaaatgtgagttcctcctcttgaaagtttattgctgttctgagagctcctttttttgccaagattccatactattattatattaaagaagcgtgtcaagggctgaaagganccccatgtggttggataaaatcaagaaaaagctgaatgagcacggtacccccaaaaagggaagggggtttgtacaagacatggggcctcatctttc

SEQ ID NO: 246105 - DNA, 780 bp, Homo Sapiens
  misc_feature (597)..(597): n is a, c, g, or t
gttcatgttatcttacagtatgattgacagtgtttatcaaaaattgcattagcagccatagctgcctttatgtctgctgtgatcctcacagctgttgctgttattacagtccagcttagaagacaatacgtcaggaaatatgaaggagaagctgaggaacgaaagaaacttcgacaagagaatggaaatgtacatgctatagcataactgaagataaaattacaggatatcacattggagtcactgccaagtcatagccataaatgatgagtcggtcctctttccagtggatcataagacaatggaccctttttgttatgatggttttaaactttcaattgtcactttttatgctatttctgtatataaaggtgcacgaaggtaaaaagtattttttcaagttgtaaataatttatttaatatttaatggaagtgtatttattttacagctcattaaacttttttaaccaaacagaaaaaattacaaaaacttaataatataaaattattgattatattcaattttatattgatatccctttatattttaccctatttcccttcaatctttttcccttacccttttttttaccaacnatcttatacttctaaacatctttacttacccttttctaatatctttttataatcattccactttttttcctcttttatcttatatttctattgcctctttcttattttattttccttacaacttcctcacttttaaaatataatagtctcttcttttcgtctttttttccttttcccctactt

SEQ ID NO: 246106 - DNA, 425 bp, Homo Sapiens
  misc_feature (55)..(55): n is a, c, g, or t
  misc_feature (117)..(117): n is a, c, g, or t
  misc_feature (157)..(157): n is a, c, g, or t
  misc_feature (192)..(192): n is a, c, g, or t
  misc_feature (225)..(225): n is a, c, g, or t
  misc_feature (299)..(348): n is a, c, g, or t
  misc_feature (368)..(368): n is a, c, g, or t
aaaaggcctcaaaatccttcaaggcaattgttgttcattgccatcgaataactgnaaaattggaccaaattatgttttcttgggaaaaagcaagaatacaccaagacgcccccctcncatggatgtgtcaatgatcaccccagaatcccgccacaanctggggtccctcatagagcttcaccctgtcccagnattccaggataggagtatccattggtgctaggntgccagtgggcactgtgccaccatgcctggggccttgcttttccccagccccccttgagctcaccaggcctgannnnnnnnnnnnnnnnnnnnnnnnnnnnnnnnnnnnnnnnnnnnnnnnnngcttttcttcagcctggggnccctagctcgtttgtccagctccttttgcatctcaaagcaccagccgcattccaagc

SEQ ID NO: 246107 - DNA, 556 bp, Homo Sapiens
  misc_feature (461)..(461): n is a, c, g, or t
  misc_feature (478)..(478): n is a, c, g, or t
  misc_feature (495)..(495): n is a, c, g, or t
  misc_feature (511)..(511): n is a, c, g, or t
  misc_feature (520)..(520): n is a, c, g, or t
  misc_feature (523)..(523): n is a, c, g, or t
acagccagggcatgtgctcatttattagggctgactctccgtgtccgcttcctgggaaagaaaatccctgtgacatgaaccgatgaagggacagaagctatcacagatgctacagggctcagagaggggccggggcaatctacactacagaagtaaaagcaacgtaaaatgtttctgggtttcctttcccttcactcaaaaccactatttccttagttctatcaaagtacgtaaggggcataaaatagactcaggaactcggggctaaatcatccaaaaatggagccaaggctctaactagaaactgtctctgtcgtcccttttggcctcaaaaccccgaggtaaaaggctggtctcggcttcttctaggccccctggcttccagcacaagtgccccgtgctctgtgttcatcatcatcggtttttaagagacagggtctcgctctattgcccaggttggncttgaatccctggactnagcgggccttctgcctnggctttcgagtagctnggattctangcncatgccctgggccggcttgcctggtttttgagg

SEQ ID NO: 246108 - DNA, 840 bp, Homo Sapiens
  misc_feature (305)..(305): n is a, c, g, or t
gcctgctctgggctcagatactgtgacatcccagaagcccagcccctcaacccctctggatgctacatggggatgctggacggctcagcccctgttccaaggattttggggtgctgagattctcccctagagacctgaaattcaccagctacagatgccaaatgacttacatcttaagaagtctcagaacgtccagcccttcagcagctctcgttctgagacatgagccttgggatgtggcagcatcagtgggacaagatgggcactgggccaccctcccagggcaccagacacagggcacggtnggagagacttcttccccgttggccgccttggctcccccgttttgcccgaggctgctcttctgtcagacttcctctttgtaccacagtggctctggggccaggcctgcctgcccactggccatcgccaccttccccagctgcctcctaccagcagtttctctgaagatctgtcaacaggttaagtcaatctggggcttccactgcctgcattccagtccccagagcttggtggtcccgaaacgggaagtacatattggggcatggtggcctccgtgagcaaatggtgtcttgggcaatctgaggccaggacagatgttgccccacccactggagatggtgctgagggaggtgggtggggccttctgggaaggtgagtggagagggcacctgccccccgccctccccatcccctactcccactgctcagcgcgggccattgcaagggtgccacacaatgtcttgtccaccctgggacacttctgagtatgaagcgggatgctattaaaaactacatggggaaacaggtgcaaaaaaa

SEQ ID NO: 246109 - DNA, 896 bp, Homo Sapiens
  misc_feature (54)..(105): n is a, c, g, or t
  misc_feature (113)..(173): n is a, c, g, or t
agacattttagaatctaaatctgaacaaactaaaagtaagctaagagatacacnnnnnnnnnnnnnnnnnnnnnnnnnnnnnnnnnnnnnnnnnnnnnnnnnnnntatgtcgnnnnnnnnnnnnnnnnnnnnnnnnnnnnnnnnnnnnnnnnnnnnnnnnnnnnnnnnnnnnntgtcagttccaatgatgcttacaattttaatttggaagagggtgttcatcttactcctttccgacaaaaagtgagcaatgactctaatagagaagaaaacaacgagtctgaagtgagcctctgtgaatcaagtggttcaggagatgattccgatgacctctatttgcccacttgcaagtacattcagaatcccacgagcaattcagatagaccagtcaccaggcctctagctaaaagagcactgaaatacacagatgaagaagagacggagggttctaagccaacaaaaactcctaccactacaccacctgaaactcagcagtcacctcatcttagcctgaaggatatcaccaatgtctccttgtatcctgttgtgaaaatcagaagactttctctttctccaaaaaagaataaagcaagcccagcagtggctctgcctaaacgtaggtgcacagccagcgtgaactataaggagcccaccctcgcttcgaaactgagaagaggggacccttttacagattcgtgtgttttgaattctcctattttcaagcagaaaaaggatttgagacgttctaaaaaaagtatgaaacaaatacaatgaaggtttcgtgggatatcgtttaaattcaatctacacctctttctgttgcttcaggagaggatctgtaagagtacacaaacagagtgagccattgccatagaatattctcttgacaggacccc

SEQ ID NO: 246110 - DNA, 708 bp, Homo Sapiens
  misc_feature (631)..(659): n is a, c, g, or t
gaggatcccggacgaggctaaagatggcggattcgacgaaatctatgaggaagaggaggacgaggagcgggccctggaggagcagctgctcaagtactcgccggacccggtggtcgtccgcggctccggtcacgtcaccgtatttggactgagcaacaaatttgaatctgaattcccttcttcattaactggaaaagtagctcctgaagaatttaaagccagcatcaacagagttaacagttgtcttaagaagaaccttcctgttaatgtacgtgggctactttgtggctgcctttgttgctgctgcacattaggttgcagtatgtggccagttatttgcctcagtaaaagaacacgaagatcgattgagaagttattagaatgggaaaacaataggttataccacaagctgtgcttgctttggagactgagcaaaaggaaatgtgaaacgaataacatgatggaatatgtcatcctcatagaatttttaccaaagacaccgatttttcgaccagattagcatttactttatttatagagacttccaagtatgttgtctttcccatggtgccttgcttggtgctctcactggtggtgacataaccattggttctacagaatcgtgtggtgnnnnnnnnnnnnnnnnnnnnnnnnnnnnnaaataaccgcatgttctaagtgtgcatttttgtcaatcttttgcctcgt

SEQ ID NO: 246111 - DNA, 527 bp, Homo Sapiens
ccagccccttcacatacctcttctgtgccccaggttcctgggagtggaatgaactggatcacatcatggaaatcattctggggtcctaaaactgtgatagaggggatccttcctcatgtcatcttcggtggcctggatccctgaatgcaactctgggtgtgtgtttttgtgggggctcgaagcagtgactatggcctcctttgttcccatttcagggttccacaaactgtcttgcatgtgtgtgtgtgtctggttaccccgaccttctgtgaaggtgggtcttcctgaattaatttatctattccaaatgccttaacgagactctgtttctgggagtctgattttccacttacacatttcttccacctttcctgctagttcccactcccctgtgaccactggggcttcagggaagataaagaaagctgggcctgtcgaaggatgacagggatgtgctgccaggttgctatagaaacccaggctctgcctcttgcaccttgaaggtatttgaccggctgggggtaccg

SEQ ID NO: 246112 - DNA, 495 bp, Homo Sapiens
  misc_feature (187)..(187): n is a, c, g, or t
gacatatgcaacgactcttctggaagcaatgaaaggaggagaatatggatttggagctgcatttgatgctgatggggaccgttatatgatcctaggccaaaatggcttctttgtgagcccttctgactccctggccatcattgctgccaacctctcttgcattccatatttccgtcagatgggggtncgcgggtttgggaggagtatgccaaccagcatggccctggacagagtggccaaatcaatgaaggtccctgtatatgagaccccagctggatggagattcttctcaaatctgatggactcaggacgttgcaatctgtgtggggaagagagctttggcactggctctgaccacctccgagagaaggatggcctgtgggctgtcttggtctggctctccattattgctgcccggaagcagagtgtggaggaaattgtccgagatcactgggccaaatttgccgccactactatgcaggtatgtgagggctg

SEQ ID NO: 246113 - DNA, 825 bp, Homo Sapiens
acccgagaccctcaaatacctaaagaatgtgcagaaaatgcaagctccagaaatataaggtcaggtgtccatagctgtgcccatggatgtgtacacagtcgcttacggggtcactcccacagtgaagcaaggttgactgatgatactgccgcagaatctggagatcatggtagtagctccttctcagaattccgctatctcttcaagtggctgcaaaaaagtcttccatatatttggattctgagcgtcaaacttgttatgcagcatataacaggaatttctcttggaattgggctgctaacaacttttatgtatgcaaacaaaagcattgtaaatcaggtttttctaagagaaaggtcctcaaagattcagtgtgcttggttactggtattcttagcaggatcttctgttcttttatattacacctttcattctcagtcactttattacagcttaatttttttaaatcctactttggaccatttgagcttctgggaagtattttggattgtcggaattacagacttcattctgaaattctttttcatgggcttaaaatgccttattttattggtggcttctttcatcatgccttttaaatctaagggttactggtatatgcttttagaagaattgtgtctatactaccgaacttttgttcccataccagtttggtttcgctaccttataagctatggggagtttggtaacgtaactagatggagtcttgggatactgctggctttactctacctcatattaaaacttttggaattttttgggcatctgagaactttcagacaggttttacgaatatttttaaca

SEQ ID NO: 246114 - DNA, 781 bp, Homo Sapiens
gggaaaaactttattatcttctccttctggattccttaagcccagggacttttccacagaccctagcattgagccccggttcaccatgcttctctgagaactgtaccatccccctctcagcagccatgagttctgcctccatactattactaagctcctgggcctccacacatacctgtactcagccacgcccccagcatacttcttcatggccatttcagaactcattccatagaagagcttgtacttcttgccatccctctcgatgagctcaccacctgactcactgtgcccagccagcatgccacccagcatcacgaagtcagctcctgcccctgccaccatcatggaggggggaaagagattaatctggccaaggtgctcacatggccaccctcaaaagcaactcacaccatattctcagtcctgacaatgattccagcgtcttcctccttctgcttccctagctgacccacaatccacgcaggcctgatctgccctggcctctattcctcagtgggtatgatttccccaagatttaaaaaagagcctctggagagtccctgcctggcttttgctttctccttttgctgtttttaccatcattgtctggtcatttgattttactgtgcccagctaaataagactcatttcatgtgtcccaagagcaaagatccccaactttaatgggagtaatgatctcctgggaagctgtgcaaaatgaaaaatgcagatgtgctgtcccattcctcagagcctatttttaggtatgtgagggctg

SEQ ID NO: 246115 - DNA, 490 bp, Homo Sapiens
cagccatcaaatacctgtagaaaggccaaactcacaccaaaacgtggatgctcttcaacttccaaacctaccatttgcccttctttcatttcgcctcttagttctttttatgcacagttttagggcagtctaagtacaaactgaaaggtctaacttgtctctgattcctcccttgtctatgtgtatatgcgtgagaatagaggcgggtgagagtgtgcgtgcgtgtgcgtgtgtgcaattttatacgtctgtgtattttcttaagtacctgtgcacacgtagagtgcattactgccacctttttcaataagctgttttatcagttacggcttctacaagtttgctaatttagacttctttattgccatatctttaaaactaacaatagatgatttcggtatatatatatattttttgggcttatttataggtgctgtaatattattatctgattgtaaggaagggatgaaaggggcaaatattctttcga

SEQ ID NO: 246116 - DNA, 787 bp, Homo Sapiens
  misc_feature (737)..(737): n is a, c, g, or t
  misc_feature (751)..(751): n is a, c, g, or t
ggtaatgttcctgcttttttcagtcccctgaaaaaatggatgctcaagcatttcttaataacagattcttctgaagacagaattgggaaagatctggccccaacaaggcagtgagttcctgatgctaactgaggtgaaagaaaagcaaaagtcagcttccaaggaattcacttaacaggcctgttcagtatggaagacattatttatctgcctttaactccccccaaaggaccataccaactgcatgaaagtgaacttttctatctacgtaactggtagacggagcatcttgatcactatgtgacaaccttggctgtcatttttagttgccatttgcattgatttgagcagccctatctttaccgaacatacctgaatttgttcctgggctcccactttcttcccagaagagggctaacttcctactaaggtctgaagagtgttgaaagtagactagagcttgggaactcctaacctagaactatctgccatcccacaaggtgattatatgccaaagggatactagtcatacctagtgtttctctttctgaaaagagaacttatcctaaaattagccctgggcctgggacaaaggagtcctctccgcccccaaaatgattattaaattgagatgagtccaggataaaactcagataccaaggataaatgaaacttatttagggataaaaagtgggctgggcgcagtgggcttcactccctgtgatccccagcacttntgggaaggctgaanaacgggcgggatcacaaagggtcagggaagatccag

SEQ ID NO: 246117 - DNA, 794 bp, Homo Sapiens; identical to SEQ ID NO: 64269
  misc_feature (748)..(748): n is a, c, g, or t

SEQ ID NO: 246118 - DNA, 473 bp, Homo Sapiens
gggggttttagaggatcccccaagtactcggactccacctatattcaccgcgatcttaaatgtgacaacatctttatcaccggccctactggctcagtcaagattggagacctcggtctggcaaccctgaagcgggcttcttttgccaagagtgtgataggtaccccagagttcatggcccctgagatgtatgaggagaaatatgatgaatccgttgacgtttatgcttttgggatgtgcatgcttgagatggctacatctgaatatccttactcggagtgccaaaatgctgcgcagatctaccgtcgcgtgaccagtggggtgaagccagccagttttgacaaagtagcaattcctgaagtgaaggaaattattgaaggatgcatacgacaaaacaaagatgaaagatattccatcaaagaccttttgaaccatgccttcttccaagaggaaacaggagtccgagttggttg

SEQ ID NO: 246119 - DNA, 1029 bp, Homo Sapiens
  misc_feature (73)..(119): n is a, c, g, or t
  misc_feature (271)..(426): n is a, c, g, or t
  misc_feature (465)..(477): n is a, c, g, or t
  misc_feature (487)..(600): n is a, c, g, or t
cacaccccaaacccccggggggaggtttcccccccctttttgttttaaaggggggcgccaaagtggggaaaannnnnnnnnnnnnnnnnnnnnnnnnnnnnnnnnnnnnnnnnnnnnnnaggggcccaagggggtaatatcccccgggggatttaaggttttcccaaaccggttggagggggttcccctggggggaaagggttaaaaaattccaccattcctcccaaaaatgcccggggggggcgtaatttaatattggactccgctgggnnnnnnnnnnnnnnnnnnnnnnnnnnnnnnnnnnnnnnnnnnnnnnnnnnnnnnnnnnnnnnnnnnnnnnnnnnnnnnnnnnnnnnnnnnnnnnnnnnnnnnnnnnnnnnnnnnnnnnnnnnnnnnnnnnnnnnnnnnnnnnnnnnnnnnnnnnnngggccccgggccccaaaaaaaggttttaaaaattttttnnnnnnnnnnnnngccccccaannnnnnnnnnnnnnnnnnnnnnnnnnnnnnnnnnnnnnnnnnnnnnnnnnnnnnnnnnnnnnnnnnnnnnnnnnnnnnnnnnnnnnnnnnnnnnnnnnnnnnnnnnnnnnnnnngcctttacttttttcttttattatattttctcaaataaacttccccaaaggaagatattttaagagcattttcaaacatctttggcatcacataaaaaagaaatctcgtgtaaaaaacgaaatgtcatctgagcttttataatacaaaggcgcaatccaatatgaacatataaaatatatacaaatatagtgcatggtcagtcacttaatacagctctctctacaaaaagtaacttcttagaaattaaaaaaacacaaagtaaccacttaatcaaaaaagtcctcttctctcccagtattcaagttcctgtttagagtccggaggggaagagaggtgggttggggagtttaggaggaggggtggcctgagccccctcagttccccacgcctcacatggagtctcgagtaacttgggggaacctctagag

SEQ ID NO: 246120 - DNA, 172 bp, Homo Sapiens
  misc_feature (89)..(89): n is a, c, g, or t
  misc_feature (92)..(92): n is a, c, g, or t
aagttactcagactccccagcttctaaccaccttcctggctgggaggacattgagtcaaaaatccctctaaatatggaggagcctcccngtngaggaaccggaacccaagccagaccgtctccttgtattgaaagtactatggaatgatttcctgatgtgctactcctctcg

SEQ ID NO: 246121 - DNA, 1160 bp, Homo Sapiens
  misc_feature (139)..(139): n is a, c, g, or t
ttctagaggatcccggaattgggggattcagtaacatagcttcattgacccctgggccaggcatgcaatcaccatcttcctaccagaacaacaactatgggctcaacatgagtagccccccacatgggagtcctggtcnttgccccaaaccagcagaatatcatgatttctcctcgtaatcgtgggagtccaaagatagcctcacatcagttttctcctgttgcaggtgtgcactctcccatggcatcttctggcaatactgggaaccacagcttttccagcagctctctcagtgccctgcaagccatcagtgaaggtgtggggacttcccttttatctactctgtcatcaccaggccccaaattggataactctcccaatatgaatattacccaaccaagtaaagtaagcaatcaggattccaagagtcctctgggcttttattgcgaccaaaatccagtggagagttcaatgtgtcagtcaaatagcagagatcacctcagtgacaaagaaagtaaggagagcagtgttgagggggcagagaatcaaaggggtcctttggaaagcaaaggtcataaaaaattactgcagttacttacctgttcttctgatgaccggggtcattcctccttgaccaactcccccctagattcaatttgtaaagaatcttctgttagtgtcaccagcccctctggagtctcctcctctacatctggaggagtatcctctacatccaatatgcatgggtcactgttacaagagaagcaccggattttgcacaagttgctgcagaatgggaattcaccagctgaggtggccaagattactgcagaagccaactgggaaagacaccagcagtataacttcttgtggggacggaaatgttgtcaagcaggagcagctaagtcctaagaagaaggagaataatgcacttcttagatacctgctggacagggatgatcctagtgatgcactctctaaagaactacagccccaagtggaaggagtggataataaaatgagtgagtgcaccagctccaccattcctagctcaagtcaagagaaagaccctataattaagacagagaccagtgaagagggatctggagacttggattatctagatgctattcttggtgatctgactagtcctgacttta

SEQ ID NO: 246122 - DNA, 448 bp, Homo Sapiens
gccacctttccaacctggaaggccagagtgacgaaagagcattattggaccagctgcacactcttctcagcaacacagatgccacaggcctggaagaaattgacagagctttgggcattcctgaacttgtcaatcagggacaggcattagagcccaaacaggatgctttccaaggccaagaagcagcagtaatgatggatcagaaggcaggattatatggacagacatacccagcacaggggcctccaatgcaaggaggctttcatcttcagggacaatcaccatcttttaactctatgatgaatcagatgaaccagcaaggcaattttcctctccaaggaatgcacccacgagccaacatcatgagaccccggacaaacacccccaagcaacttagaatgcagcttcagcagaggctgcagggccagcagtttttgaatcagagccg

SEQ ID NO: 246123 - DNA, 417 bp, Homo Sapiens
  misc_feature (188)..(188): n is a, c, g, or t
cggtccctgtaagtaagtcactaggtccaacaactgcctgcccgagcactcagcccgtggagctcaggccaacaccagagccccggttttaggggccaggagagcaggtgaccaattatttggggaatcttgggtagaatttccgccacacattctccccagggctgcaggggtcttccgaggcaggnccgtggagcaggattcaggatgtggtgggaatagagtgaggggcagtgggtgggcagacctgggcgtcagaggtcctgatgggaaaggaggcaggggctacccagagaggggggctcctttggcacagcccccaccgactccgccgtccccctcccctgtgagcccgggggctgtacatactctactccatccccttgtccatcactgagaccacccccttgtgcattt

SEQ ID NO: 246124 - DNA, 993 bp, Homo Sapiens
  misc_feature (656)..(656): n is a, c, g, or t
  misc_feature (737)..(796): n is a, c, g, or t
  misc_feature (805)..(867): n is a, c, g, or t
tgggagagaaggtggggcttccctttcgccacagtatgtcagctacaaccagagctcctacacgcagtgggacctgcagcctgacactgactacgagatccacttgtttaaggagaggatgttccggcaccaaatggctgtgaagaccaatggcacagtgaaggataaggaggacacccaggtggactctgaggcccgaccgatgaaagatgagaccttcggcgagtacagtgacaacgaggagaaggcctttggcagcagccagccatcgctcaacggggacatcaagcccctgggcagtgacgacagcctggccgattatgggggcagcgtggatgttcagttcaacgaggatggttcgttcattggccagtacagtggcaagaaggagaaggaggcggcagggggcaatgacagctcaggggccacttcccccatcaaccctgccgtggccctagaatagtggagtccaggacaggagatgctgtgcccctggccttgggatccaggcccctccctctccagcaggcccatgggaggctggagttggggcagaggagaacttgctgcctcggatccccttcctaccacccggtccccactttattgccaaaaccccgctgcaccccttccctgggcacacgctggctctggcnccaggcttggggcaggatctccccccatggccagggggccctttgggggggcttggttttggcccgccccattttggggcnnnnnnnnnnnnnnnnnnnnnnnnnnnnnnnnnnnnnnnnnnnnnnnnnnnnnnnnnnnncccccgccnnnnnnnnnnnnnnnnnnnnnnnnnnnnnnnnnnnnnnnnnnnnnnnnnnnnnnnnnnnnnnncccgccccttacggaacacactgggtatgggcacatgattccgaccgcttccgcgcccgattgcccagcgcccgccacacgacagacgtggatagatgggggaaacgagtggcagcgcgctggaat

SEQ ID NO: 246125 - DNA, 653 bp, Homo Sapiens
gcgcgggcgttctagaggatcccacgaaagggcaagtgggggtaaacaaaccagaaaaatcaaaatacaaatatacacagagccaaaatagtatttccgtcagcagcaaaacagaaacaattccaaaattaatgtgcaaatgaaaataaagtagttaacagtcattcatttaataagcttgtgtatttgataatgaaaacgcttagctttccttttctgacctcggaaaagtaatcaccatctttagtaaggtattacttttaaaagtatgactttaacaagtgaataaagcatgtttagagtatgtttatgtttagaaacaataccttgaacactacagaaaacaacaatattctgaaaatccagtttattttccatgtcgtggacagatccagtcagtgtgatcagtttttctgcgtgtgtaataatttatcaaaataagttttctcacaagactcttttccatcaactctgaaaaccctggtctgacaacataccccaataaagcttttgaaaatcacctcttaaaatttggaagaaaatgtgccaagtcttttcctgtaacatttactgcactacaaatggctaaagagcaatttatggtttaaaaggtgaatagtacaacaggtgagttcaggaaattgttttagtcc

SEQ ID NO: 246126 - DNA, 1060 bp, Homo Sapiens
  misc_feature (841)..(994): n is a, c, g, or t
cagtgtgaatcttttgccatcttgtaagggtgaaaagccccctaccaagtcgggatgaacattcatgcgtgtgcttgaggggtagggtcaagaagagtgtgtgagaacagtaatttcccaagactgccctctgtgggactgtatttcagaaaacacactggtggggctacctctcaattcacatgtactgccctagcctctccccatccccggctgacgctcatccataactgcactgttccataacagcagtagaatgttgcagaaagtgctaggattcctccactccatcttcaaagaaaaagtcgctaataaatcacattggtaggttagtgaatgttaaacacattagtgagcaaaagaaaataggaatgaacaagaattggtcatctacctaactgaacacaaatgaactctggcagttcagtaataggaggtaaagaaccacgctaattgcagaacagcagcccccctaccttcccaggagcagtgtgactgggaagcagccccgtgtgtatgctggtgcaggttctaagcaaagtgagctgcccatcagttccgatgagtttgctgatgctagacatatgacatctgttctcttgctgcctgccccagttatctcccaaagttctttactgagaatgaaaagcatctttctctgtgtggtgacttcagtaggccaacaaatatttgagtttaaagcacaagactagtcataggcagagcagggctaccatttacaatttgcttacttgatgctaaccgggggtttgggcatttaacaagtcatatcatctagcccagcaagtcatggaagcataagttgttaaaatcatctgannnnnnnnnnnnnnnnnnnnnnnnnnnnnnnnnnnnnnnnnnnnnnnnnnnnnnnnnnnnnnnnnnnnnnnnnnnnnnnnnnnnnnnnnnnnnnnnnnnnnnnnnnnnnnnnnnnnnnnnnnnnnnnnnnnnnnnnnnnnnnnnnnnnnnnnnncaggaaaatggggggacccggaaaggggagctacagggaacggagacaacgcaaggatccaaccgg

SEQ ID NO: 246127 - DNA, 621 bp, Homo Sapiens
cagttcgcctaatagtcttggtacttccctacagctgctatcttagcggtgtccctccacagcctggcacggtggtcagaatgcagggcctggcctacaatactggagttaaggaaattcttaacttcttccaaggttaccagtatgcaaccgaggatggacttatacacacaaatgaccaggccaggactctacccaaagaatgggtttgtatttaagggccccagcagttagaacatcctcagaaaagaagtgtttgaaagatgtatggtgatcttgaaacctccagacacaagaaaacttctagcaaattcaggggaagtttgtctacactcaggctgcagtattttcagcaaacttgattggacaaacgggcctgtgccttatcttttggtggagtgaaaaaatttgagctagtgaagccaaatcgtaacttacagcaagcagcatgcagcatacctggctctttgctgattgcaaatagggatttaaaatgtgaatttggaatcagatgtctccattacttccagttaaaggtggcatcatagggtgtttcctaagttttaagttcttggataaaaactccaccagtgtctaccatcttcaacatgaactctgtta

SEQ ID NO: 246128 - DNA, 1125 bp, Homo Sapiens
tgcttatatggtgattgtgttgttacagatgctgcttgctgaagaggacaaagctgaagattgatgtagtgttttacttggtatttttgggttccaccctaccgtcactgtacaagtactcggaaggtcagttctgatacattggagaccattgctcctggtcatgattgttgttgaaacagtgaaggtgcagctctgtgcttccaaagagggccttcccgtgtttgtggtggctgacagaagactttcatttcgtccaggatgaagcgtatgatgcagctcaattcctagcaaccagtgctggaaatcagcaggctttgaactttacccgttttcttgagcagtcaggacccccatctggggatgtgaattcccttgataagaagttggtgctggcattccaggcacctgaaagctgccccacggagtggaatgtaattggggaccaagatcagagtttgcatgatgctggcccgcgagagacattgatgcattttgctgtgcggctgggccttgttgagggttgacgtggttcctgttgcagaagccaggtggccgcggagctctcagtatccacaaccaggaagggggcgacgcctgtgagcttggcctttggagcgaggctatcacaagctgcaccagcttctaaccgaggagaatgctggagaaccagactcctggagcagtttatcctatgaaataccgtatggagactgttctgtgaggcatcatcgagagttggacatctatacattaacctctgagtccttgattcacatcatgaacacccatttcctggagacggttgcactggaccaatttttaaacttatggacatccaacagcaactaatgaaaacaaacctcaagcagatggacagtcttatgcccttaatgatgacagcacaggatccttccagtgccccggagacagatggccagtttcttccctgtgcaccggagcccacggaccctcagcgactttcttcttctgaagagactgagagcactcagtgctgcccagggagccctgttgcacagactgaaagtccctgtgattttcaagcatagttgaggaggagaatacagccttcctgtaggattgcgatgcaggggtacctcatgg

SEQ ID NO: 246129 - DNA, 622 bp, Homo Sapiens
ggacccgtaatgggactcattttgacatcgataaagaccctctggtcaccatgaagcctggcacaggaacgctcataattaacatcatgagcgaagggaaagctgagacctatgaaggagtctatcagtgtacagcaaggaacgaacgcggagctgcagtttctaataacattgttgtccgcccatccagatcaccattgtggaccaaagaaaaacttgaaccaatcacacttcaaagtggtcagtctttagtacttccctgcagacccccaattggattaccaccgcctataatatttgggatggataattcctttcaaagacttccacaaagtgagagagtttctcaaggtttgaatggggacctttatttttccaatgtccctcccagaggacacccgcgaagactatatctgttatgctagatttaatcatactcaaaccatacagcagaagcaacctatttctgtgaaggtgatttcagctaaatcaagtagagagaggccacccaacatttttaactccagaaggcatgcaagttacacagaggaatacgaggaaatgtgcttcactggagtgcttgcagaaggactggctacccgattattactgggcacggaga

SEQ ID NO: 246130 - DNA, 790 bp, Homo Sapiens
  misc_feature (756)..(756): n is a, c, g, or t
  misc_feature (770)..(770): n is a, c, g, or t
  misc_feature (776)..(776): n is a, c, g, or t
gggatccatttcttcaacatgtgaacaaagaactgaaagaaaaagcaattcaggctgttgccacaaatcccaaaactacccacgagcttaaatggcctattctgggccagcttttcttttcctctaagtttcagaagttggaaacatttaaacccccaaaggatattgacttaaagtcacttcatctccagaagcctctggaatccacctggactaagaccaacagccagttcctatctggtccccaaaaatcaagcagcccattcacccccctccagaaagaactcttcttaattatgaattcttaccgggacctgttctacccggaaaggactgctctgaagaacggggaagagatccgccatgtgtattgcctgcatgtgataaatcacatcctcaaagccaatgcccaggtgcttggcaacaatagcagacgccgaagccagaagtttggagtgggtgatgatgatgacttcagagaccaagggttaacaaggcccaaggtactgatagtggtgccattccgggaagctgctttgcgggtggtgcagctcttcatcagcctcctcgagggtgacagcaaagaagaaaatcattgtgagcaacaaaaagaggtttcagggagaatatggatcagatcccgaggagagaccacccaacttgaagaggcctgaggattatgaagccgtatttgtgggcaaatattgatgaccacttcaggattgggagtggccatacttcggagaaggcatcccngactctatgcccgnttttanctcctcgggatatc

SEQ ID NO: 246131 - DNA, 1143 bp, Homo Sapiens
gggaaagcacagacttcctgttttgcctgctagcatctccctgtaactctcccaatcttgaggagtgatccctgtcccagcccctggaaaggggcaggaacgacaaactcaaagtccaggatgttcaccatgacaagagccatggaagaggctctttttcagcacttcatgcaccagaagctggggatcgcctatgccatacacaagccatttcccttctttgaaggcctcctagacaactccatcatcactaagagaatgtacatggaatctctggaagcctgtagaaatttgatccctgtatccagagtggtggcacaacattctcacccaactggagagggacttttaacctgtctctttctggtgacattgttcagtcaaattaaccttgcgtgaatatcccaatctggtgacgatttacagaagcttcaaacgtgttggtgcttcctatgaacggcagagcagagacacaccaatcctacttgaagccccaactggcctagcagaaggaagctccctccataccccactggcgctgcccccaccacaaccccctcaaccaagctgttcaccctgtgcgccaagagtcagtgagcctggaacatcctcccagcaaagcgatgagatcctgagtgagtcgcccagcccatctgaccctgtcctgcctctccctgcactcatccaggaaggaagaagcacttcagtgaccaatgacaagttaacatccaaaatgaatgcggaagaagactcagaagagatgcccagcctcctcactagcactgtgcaagtggccagtgacaaacgtgatcccccaaataagagataaagaagaccctcaagagattgccccactctccccttgggcttcttatgccagcagatcagaggataattcttccagaaccaaatgacccagaagagccccaggaggtgtccagcaacaccttcagacaaggaacggacagacacgcacaccgctgtatctggtcaactccaaaaaggagaccatacgaaaacaaagcctcccaagagggacaggctcatctagacacggaatccaaaagaagctcaaaagggtgatcaggttctcaaaagaagatgactcacttgaactccaggagagacagggccaaagggaga

SEQ ID NO: 246132 - DNA, 330 bp, Homo Sapiens
agaccacacagaccgtctgaaattgcgcccgctggcggacagctcccttctgaagcagagaagcctccatggtcacgaagcagcgttgtgctgtgtgtccctcgcaagaagcacaggaaatagaagtttctttagtagccactagacaaccaccctttctgaaagcaaacagtgctgctctttattccaaacaaggcaggaaagtctgagttgggagtgacagtggctggagagaagcagatctgtgcaacgtgcagggcaaccatggcgtgcctctgcctctaagcgctgagcatggccccacccccaccagtacctaccgggatcctc

SEQ ID NO: 246133 - DNA, 849 bp, Homo Sapiens
  misc_feature (108)..(108): n is a, c, g, or t
gtttccttttgtgagcccccgcggcccgagcggaatggttttagaaaaactttttcgagggcccgagggcgccccacaaggttcattttttgttttcttatgattaanaggcccaagcctcccccctgtttatttaacttattcagtgccttataataaaaggaaacgctaacaaacccatgtctattgtgaaatggcaatggcaggcaatttggcccttacccttagcatagtagtccatcctgtgatggggaaagcagggccagtgagagggaaccagaggtaggcagcagtcaggctgagtttaatgatggggaactgggccagaccaaacacagacctctgcccatccccttggcctttggcccatggctccaagaggccagaagcggcccagagggagatatggttcctccccaaggcaggcagccatggtcccttagactttgtgcaaaatactaaatgctaatttggcatcgagggccagctctgaaaagagaaggggcaatcctctgtgcagccagcccaggggacaaggaaaggtaggatacgaggcccctggccaagagaaaaggggtaggtaggaaagaagaaggaaaagacccctccgcccctagcatgggggacacaggcacagggcaagtttctgtaaattcctctggggtagagggcagacatccaagcagtggagattacagatcctcatctccaatgccctcgaaggcgaaattgccgtggacatcactggcactggcatctgtgctgggactgccaattccccgcaagctcacggcactcagcttacttgagagtttgaccatagactccgggtggcatcaggtgaactca

SEQ ID NO: 246134 - DNA, 192 bp, Homo Sapiens
aagaggcagtgcgacggcaagaatgcgctgtaccagtcctgccacgaggatgagaacgacgtgcagaccatctcccacaagtgccaggtcgtggcgcgcgagcagtatgagcagatggcccgggccgcaagtgccaggaccggcagacctctactacctggcggcacctacgaccccaccagtacctacggg

SEQ ID NO: 246135 - DNA, 426 bp, Homo Sapiens
  misc_feature (169)..(169): n is a, c, g, or t
tttcatcccacttaaagtgcttctgcccctagggtttcccgagggagagccgagatgggatgggggagcctgggggtcccccttggcaggggtgtctctttctggtttggagggttgttgctgtaaaaataactcctttgatgagcttccttattaaacctttcagacncagtctgttggagccatgaaggaagagggaaagagggctgccattcctgacagcctcccagccagggctggcgataaaggaccgagatagatggagggggcgagtagggaagtcctcttctaaaatgagagatagggatttggtggggtatggaaggaactaaccccttccctctccacctctgattcagcccttaattcttgtgtctatgataaataaagttcagtagtctcacattccccacctttaccctacgc

SEQ ID NO: 246136 - DNA, 413 bp, Homo Sapiens
gttgttttgtaaccattttgcttcacaatcacctggaatgcccggagcccctgctcatcccgatcctcgccttgtacatgggcgcacttttgcgctgcaccaccctgtgcctgggctactacaagaacattcacgacatcatccctgacagaagtggcccggagctggggggagatgcagcaataagaaagatgctgagcttctggtggcctttggctctaattctggccacacagagaatcagtcggcctattgtcaacctctttgtttcccgggaccttggtggcagttctgcagccacagaggcagtggcgattttgacagccacatactctgtgggtcacatgccatacggctggttgacggaaatccgtgctgtgtatcctgctttcgacaagaataacccacacacc

SEQ ID NO: 246137 - DNA, 1094 bp, Homo Sapiens
tagaggaacctcgaagtcagtcagactcccttgtcctagaaaacaaaaaaacataactggggaggttggcaagaccataacctatggctgtgaacatttaaaccttacagaaaaactgagatcaatgcccccaaagaaaaactacccgagtctttatgagacattgcagattaaaatgaaaaccattcaataatattgaaatgctcaatacaaatcagtaccttagacaagacatacacacatcttgctacctggatggagggcattataaacatcagttagccatcacagctctcacagaagcatctgcaagtcaatggtgtggagagcctgacttcaagcgttcaaaatccagtcagagctggcttataagaagagcccaatcaagcagtcaaacgtgtttacaggtcagctctgctcctggccaagtggcgttggctggggcacgtggtgagtgggtggtggcggaccaggctcctgtgtcagctgcaggtgctgagctggatctgaagtacttgtagctaaatggagctcctctgtttgctcttgatgggcatgaagatgttccagtgtttccttggacagagtgatcacgtgcactggctctgtttgtgagggccccatctggctttcaatcatattgaggctctgaatgtgttctgtttgctcctgttgagctgaaagaattaaattctgcagttgctctggctgctgcgtgagcagggtaagattagcagcctggtctgcagtcatgttttgggaactctctgcagtcacaatgctgattccctggctaggaccgggcatgaaattgatgttatgtacagaatcggttacgagaagctgaatttcctgctctcccgaggtagagagttgatatggctgtagctgaagaatattcctgacctcttctgtattactactgccagaaatgctgctggcatctgaagcatgcttctccttgctatgaattttcaagtgagccttcaagttgtctaagcgagcaaactgtaagttacactcagggcaggagaaaggcttccttgccagtgtgtagaatgcagtgtctccttttgcactggagtctcgagtaa

SEQ ID NO: 246138 - DNA, 545 bp, Homo Sapiens
ccggctgttctagaggatcccagttcgtcacctggggctggtgcgtgaagagctttttctcagaactgcctgacccctggtcccgtataacatgcagatcgacttggtggaagcacacaaaatcaacgaccgggagcagaagttgcatgcccttaaggaggtattaaagaaatttccaaaggaaaaccacgaagtcttcaagtatgtcatctctcacctaaacaaggtcagccacaacaacaaggtgaatctcatgaccagcgagaacctctccatctgcttctggcccaccttgatgagacctgatttcagcactgtggacgccctcacagccacgcgcacctaccagacaatcattgaactctttatccagcagtgccccttcttcttctacaatcggcccatcaccgagccccccggcgccaggcccagctccccctctgccgtggcttccaccgtccccttcctcacttcacgcctgtcacaagtcagccgtcgcccccacagtcgcctccacccaccccccagccctgtgtgacgaatgg

SEQ ID NO: 246139 - DNA, 974 bp, Homo Sapiens
ggggaaggccggcggcggggcccacggcgggagtccaagccagaggagcccccgccgcccaagaagccagcactggacaagggcctgggcaccggccagggtgcagtgtcaggacccccccggaagcctcctgggactgtcgctggcacagcccgaggccctgaaggtggcagcacggctcaggtgccagcacccgcagcatcaccaccgccggagggtccagtgctcactttccagagtgagaagatgaagggcatgaaggagctgctggtggccaccaagatcaactcgagcgccatcaagctgcaactcacggcacagtcgcaagtgcagatgaagaagcagaaagtgtccacccctagtgactacactctgtctttcctcaagcggcagcgcaaaggcctctgaactactggggacttcggaccgcttgtggggacccaggctccgcccttagtcccccaactctgagcccatgttctgcccccagcccaaaggtgaccaggccttcacctctacccaaaccctaggttcccggtcccgagtacagtctgtatcaaacccacgattttctccagctcagaacccatggctctgccccagtcgttagaactataggtctcttctcccagaatcccagccggccaatggaaacctcacgcttgggtcctaattacccagtctttaaaggcccagcccttagaaacccaaagctcctcctcggaaccggtcacctaaaagcagaccaacgttactcagggctcctcccagcttgtaggacgctgaggttcacccttaacccaaggagcacaggtcccacctccagccctggagcctaggaccactcagcccctaggagtatatttccgcacttcagaattccatatcttgcgaatccaagctcccttgcccaaataacttcagtcctgctccagaatttggaactctagttcctctccttgtatccgagtctg

SEQ ID NO: 246140 - DNA, 577 bp, Homo Sapiens
ctcggtcccctccacagcccacagcaggttctcagacctacctcttccttgtatatttgcatacaaccctggtaacccccaggcatgcatatgtacaatgtgaccacacacagcctgacatctttcacctgtcaagtccaattaaaccaggaattgcatttgttaccataccctgccttcttgctttgcagagagcttttctacagcaaaggctgagtccttcccacagtccctccatgcctgctctttagggttcttaccccagcccatgtttttttgggaaggataagagaagcagaggaccctctttgctttccatgaaagtagccatgcccttgctggagggttcaccacagcaattggtgggaaagggtcttaaccaatctgcaacacttttcttctcctgaaactgagaaggggtaaggaagtagctaggtccccttggacggagcatggacatgagacctgtgagtactggtgtctctccttcagagctttcatctttggttcgctgtagactctgggactatcagaagagaactgacccatacctgtctagccctaccttgggctgtga

SEQ ID NO: 246141 - DNA, 140 bp, Homo Sapiens
tgtacaatggcctctttagaccagctcctgctcccagtccttctctccaggccctgaacattctcaggtctccctctgttgtccaaggcgtggagtgtagtagtgctatcagcagctgactgcagcctcaaccttccagg

SEQ ID NO: 246142 - DNA, 613 bp, Homo Sapiens
  misc_feature (448)..(448): n is a, c, g, or t
gaaaaatggggggagacataacaccccggaatgaaaatacagatttaagagaaggacccagtaaagtaggagacagatgtgaaggaaatggaaatgaggcaagaggacgttggaagagagaagtttgctgtcccaggagccaggtctggagcatcagtgtgagggagttcaggtaggctgggcctgtgcctctaggtagggacaagggaggctgggtagccagggctggtgcttaaaacccctgaggccatgagctcattggctgcctttgtagcatcctgtcttcttctgtgctgcctggtttgatctcatctcacctggattcaaagggtaaggtgggcatgggtcttgggcctgacacccaccaaggatgacctgtggactgccatcggatgctgaacagggagatgaaaggaggtcctcttaccatacccctctgccaaccccncagtaggccactgttctgactttgtttccagaatatccagaaatccaaaggggctgttgctgaacagtctgcaggaccagtgacagcacctacctgttgtcccaggcatacaaaggaggcctcaacgctcatgcttctctaatcaagccccaccagtaccctacg

SEQ ID NO: 246143 - DNA, 618 bp, Homo Sapiens
tcaatcactgtatctcaatacccagattaaactacatttttcgcatgaaagctttggaagaagaaaaaaggacgggttggccttggtcacataatttcggtccccacaacacaccactctccatcccgtcggttctatcataatgagctatttcgggtgccactctatgagatcattcccttggaggctgtagtggggacctgctgtgtgttggacctttatacgtattgtaaagggagacccaaaggagtaaaggagcaagatgtgtacatctgtgattatcggcttgacaagtcagcacacctgttttacaagatccaccggaaccgctatcctgtctgcaccaaaccctatgcttttgatcacttccccaagaagctcactcccaaaaaagatttctcgcctcattacgtcccagacaactacaagaggaatggaggacgatcatcctggaagtctgagcgctcaaagccacccctaaaagacttgggccaggaggatgatgctctacccttgattgaagaggttctagccagtcaagagcaagcagccaatgagatacccagcctggaggagccagaacgggaaggggccactgctaacgtcagtgagggtgaa

SEQ ID NO: 246144 - DNA, 506 bp, Homo Sapiens
tagggtaatgtttggggggttgttttgcagaggttcttaattttaatctttcaaaaccaaccatccattctacttttacctattctcttgcataaagatgtaaaattctagcagcaaacgcagtgcctggagctcaacaaatatttattaaatgagtaaatcatgaagggtggataatgctgaaaggtgggaaggatagagtccttatcagggaggggaagtttgagccggcggaactgaggaaaatcaaaaagagaaagccaataagctgtaagtctgcctttcttcatggtctacaacacagccttcctgtactcaacttatcaccagatcctcagctaacagaaaaacgtaagtaagttagctcactgcaaccacagcattatcagtactgcacaaagccctcttcggcacacaacacaagcaccatcctataaaatctccacaagcctttgtttcattgcagtcggctcctttcttgctgacctacccaccattacctacgc

SEQ ID NO: 246145 - DNA, 348 bp, Homo Sapiens
ccccatactttttatttgttaatttcatcacccccctcttcttctgatgtggtccccaccacctctgacatgcacgcattggcagggcctctcacactgaggctccacgcgaagggaagatgcaaagtccagtccctccaggagctagtgatggaagtcttgggaaaggagagtcccaagttcaagaagacagctagggtagaagggagggaggtcctcaaggggtagaggacaggagtccaaggaggtggctcaggtgcggggtggcgcctcaggagagcccagaaatcttccaggcagcactgtctggtacaggctgtgcactgacgtaccgcattttaatcccct

SEQ ID NO: 246146 - DNA, 937 bp, Homo Sapiens
  misc_feature (457)..(457): n is a, c, g, or t
  misc_feature (847)..(847): n is a, c, g, or t
  misc_feature (890)..(890): n is a, c, g, or t
ctttgaaaaatcagatcatggttcttctcaaaataccagcatgtctagcatctatcagaattgtgcaatggaggttttgatgtccagttgttcacagtgtagagcttgtggagctttagtttatgatgaagaaattatggctggatggacagcagatgactcaaatttgaatacagcttgtccattctgtaaaagcaacttcttgcctcttctcaatatagaattcaaagatttgagaggttctgcaagctttttcctgaaaccaagtacctctggtgacagtttacaaagtggaagcattccattggcaaatgaatccttggagcacaaacctgtatccagtttagcagaacctgacttgatcaactttatggacttcccaaaacataaccagatcataactgaagaaacaggctctgcagttgaaccaagtgatgaaataaagagagccagtggnagatgtccaaactatgaaaatttcatctgtgcctaatagtttatcaaagcgaaatgtgtctttgactcgaagtcacagtgtttgggggcccattgcagaatattgactttacccagcgaccgtttcatggcatctcaacagttagtcttccaaatagtctgcagggaagttgttggatccttttaggaaaaagacccaatcctccccttgtttctgtgccctacttgagtcctctagtactccgttaagaacttgaatctttgctagaaaatgaaggtgatcaggtgattcatacatcttctttcatcaatcaacatccaatcatttctggaacctcgtttggtatttcagacgtttggaccttcctagtacttgccaggacttatcctnactctgaacattgtaatgaaggtgtccagcttctttgcatctntgtccaggatagccaaacttgggtatattcagtgtatggatatatca

SEQ ID NO: 246147 - DNA, 897 bp, Homo Sapiens
  misc_feature (822)..(822): n is a, c, g, or t
  misc_feature (878)..(878): n is a, c, g, or t
ggcctgggtggcgaattcggcacgaggaagatggcggagacagagtgaagaaactgtgttccccccttgggttgctatcgatcaagggtaaaattccattctgatatcaaaatgcagtattcgcaccattgtgagcaccttttagagagactgaacaaacagcgggaagcaggttttctctgtgactgtaccatagtgattggggaattccagtttaaagctcataggaatgtgctggcctcctttagtgagtattttggtgcgatctacagaagcacttctgagaacaatgtgtttcttgatcagagtcaggtgaaggctgatggatttcagaaactgttggagtttatatacacaggaactttaaatcttgacagttggaatgttaaagaaattcatcaggctgctgactatctcaaagtggaagaggtggtcactaaatgcaaaataaagatggaagattttgcttttattgctaatccttcttctacagagatatctagtattactggaaacattgaattgaatcaacagacttgtcttcttactctgcgagattataataatcgagagaaatcagaagtatctacagatttgattcaggcaaatcctaaacaaggcgcgttagcgaaaaagtcatctcaaacgaaaaagaagaagaaggctttcaactccccgaaaacagggcagaataaaacagtgcaatatcccagtgacatcttagagaatgcatctggtgaattattcctagatgcaaataaactggccacacctgtagtagaacaaggttgcacaaattaaatgataattcagaactcgagntggacatcagttgggggaaaatctttttcagcacaagatattgggcccactgttcnggggaaccggaaccgtgga

SEQ ID NO: 246148 - DNA, 1129 bp, Homo Sapiens
gaattttgtggggacacagatagtgagattatagtggttgttcatctcttccctgccatgccatgcacacacgtggcaccttgggtttgtctggggggagaatgatgttcccgttatcccgatggtgtccagcttttgtatttgtcatgtcagctgctgggcctgtcttagaagttgctaataacttccactttaatattactcttattgatgcattgggtttttttattgaccaataaataatttaggcattggcaatgttaagaccataacataaaccttttctaagtaatttttccatattgagcttattagcatcttttggtatctgctgggtttttagctttacaacaggcactcacatataaacatgtttatcctatttagatttgtagttcctgggagtcagagttctgtgagcagtcttaacttataaagcatgttcagacatgcttttcagatgattttgtttcattttaaaaggggaaatggcattaacctaataggaattctcctcctgaacctcagaggcagcagatggtacagctctctttgaactttactgcccaggtgaacgttctctgcatttagatcttcaggagttttacagactagtgtggagtggacatgtaaggacaagaggaagaggcaggtttcagctgagctcttctcctccttagagcaggacagtgttgggatgggctgattgtgagtatggagttctttctggaggagctccagcaggagctgggcaaatactgggagctttgactaaggggcatgcattgcagatgaggtttgaccagaggttttccaggatccctgaagaactctgcacttctaagcctgtaaggccacaacaggtgagatgaagggggagttgaacttccagctccttggtgtcccctagggttccccttttgggtccacacaaaggctcttgagcccaatctgaaggtctaaggctatggatatctcctccatttctaagttgggacaaggttgtccagcaaaaagaaaagcaaagactggtccaatcttagagacgtttgttttggaagcagagctgggctattagctttcctcaagaaggaaaaaggagtgctacaaaagttaaatactgattttt

SEQ ID NO: 246149 - DNA, 867 bp, Homo Sapiens
  misc_feature (114)..(114): n is a, c, g, or t
  misc_feature (116)..(116): n is a, c, g, or t
gccggggggcacctttcttccttggggggaggcgttccctgaaaggccccccccaccaagagggcggtggagacctgcccacttgcatggcgcggcccagctcctcctttactngngtgtcggtaggtgcaagccggccgcgctgggcagctgcatcttgtgcgcgcggcccaggttacgcagccggttcagctcgttcttggccaccctttccttcttggcctgaatccgcttggcgaactggtcctccaaggggtcggcattgccgggcacctcaatcagccattctttggtgtcgtcccgggcgcgctggtagccccagcgccgccgccactggccactcacctcgtcccacaccaggttggtcttcttcttgggacggatgcccttgaggcgcgcgaactgctgccagcgtgtaagtggccgcggtcggggcagaggcttctctcgcggcaggcgtgtggtgggctccggcagccgcgccactatcgcctcttccacgcgctccgtgggcagctgccacagctggttgatgagcagttgcgtgttgtcccgcgccagggcctgtagctcggcctccggcgtgggtccggcgcaccgcagcccggtcggggggttccggtccgacgccagcaggttgcccaggtcaaactgcagctccagctccttgtgcaccgtgatgcgttgcaacttctctgcctcgtcctgctctgcctttgcgagcagctcctccacgctctggccctccatggctccggctcggctcactcgctttggggctgcagctgaagttacttttcctacagtggcggcccaaactccggcagcataaccacgtgcagatgccgggatgcccaatccggaaaa

SEQ ID NO: 246150 - DNA, 587 bp, Homo Sapiens
acttccgccgccgtcgggggctgcgcgggggctgtggctccgggactgcggagaacatattgtgatgttcgtgcctcagagctaaaactatgagtgaatttcggattcaccatgacgtcaatgaactgcttagcctgctgcgtgtccacggaggagatggggctgaggtctacattgacctgcttcaaaagaacaggaccccgtacgtcactaccactgtctctgctcacagtgccaaggttaaaattgcagagttttctcgtactccagaagactttctaaagaaatatgatgaactgaaatctaaaaatacaaggaaccttgacccgctggtgtacctgttgtcaaagctcacggaagacaaagagactctgcagtacttacaacagaatgcaaaagaaagagctgagcttgcagccgctgctgtgggcagcagtaccaccagcatcaacgtccctgccgcggcctccaagatctccatgcaggagcttgaggaactgaggaagcagcttggcagcgtggccactggctccacactgcagcagtctctggaacttaaaagaaagatgcttcgagacaagcagaac

SEQ ID NO: 246151 - DNA, 836 bp, Homo Sapiens
aactttacgcgtagggtagacatggagagttagcatttcatatagccttaggacagagtttgttcatccctattttgatggcacggctactttatcttactgtgtttcctctgtgtccaagtatttattaatattttttaagattttcaagtcaaaatggcaatttgagtatatgtatgtagcctgacttcagaatcgggagagacttttcaaccttgagctacccactggcagcgtgagagaaggtgataggatgtcataggctcagcttacacaagtaagcatgcacaagtgtgtaaataggcaaaaacccctttccagattgcaacatttttcccagtcctgagttcagccctttctcaccaacataacaatctatatttcttttaacttttattttaggtttgggggtacatgtgtaggtttgttacataggtaaacttgtgtcatgggggtttgttgtacagattatttcatcacccaggtattaagcctagtacccattagttatttttcctgatcctgtccctctttcatcctccactctgcaaaaggccccagtgttcgttgttcccctccatgtgtccatatgctctcatcatttagctcccatttataggtgaggacatgcagtatttggtttactattcctgtgttagtttgctaaggataatagcctccagctccatccatgtccctgcaaaggacatgatcttgtttcttttttatgtctgcattgtattctatggtgtatatgtaccaacttttctttatctagtctattactgatgggcatttgggttgatttcatgtctttgctattgtgaatagtgctg

SEQ ID NO: 246152 - DNA, 510 bp, Homo Sapiens
  misc_feature (418)..(436): n is a, c, g, or t
  misc_feature (453)..(453): n is a, c, g, or t
  misc_feature (476)..(476): n is a, c, g, or t
  misc_feature (484)..(484): n is a, c, g, or t
tattcatacgtgtacatttctacttcagtttttattatccattacataacatacatgcttgattatttgcttcaaggaaatacacctttataagtaatactcaataactactgggtttgagaatgaaggtgtcagaacgaatgagattgtcctatgaaagaagaggcaggagccagggaggaggatcccacccggccggggctcagccaggaggcagggccattggggcagggtggcagtccaagggaccgctctgggaaggtttgcaaaggtcggggtcccccctgccaggtgatcgaattatcgtggagtgtctggaaggcgggggaagttttgttgagttcaccaaataactcagaccaactggaaaccaagtggagtttctacaggaccaactagaatagggatcagctacatnnnnnnnnnnnnnnnnnnncagggaacggtgtctgncttcattgcagctctgtctgcanagccagcnctgtgatacctcatagtatgtgctca

SEQ ID NO: 246153 - DNA, 1176 bp, Homo Sapiens
  misc_feature (1124)..(1124): n is a, c, g, or t
gtaacaattttcagattaaacaaacaagagactagatccttttctccacggacacccaaacctccaccccccaccccttagtagtgctggggatccgaggccactgccccttcaccagtgcactcgcacgaggctacctcgagcggccctggggtttcctaaatgaaactcaagggtcaggacagagggttgctgggcagcgtggagtgtgtgggtttgatgctgacggcccgaggcccgagtgggaccggcctgctctgtaagcagcagcattgatcagcgagtgtttcctgagaacttctccgtgtctcatgcagcctttgtttctgataccgcttgaaacagtttcttaatgaaatgccatacctaggtgaaagtgccatttaaaaataccttgacatgttctaggataattggtgaggaatcacagaacatttagaactgggaagggtcttagtgatcacgtgatgcaggctcttatcagtaggagagcaaattgctgagagtcagtcccagacaggcttggtgacagctgagattgagatccgggtggcccaatatccaggcccaggcttgtctcaacataccctgagattggcttgacaactttgttttctcaggtagcacttgtagtaaattcatatttatgatttgaccaaggaatgaagtgaacccagttgttcaattgccatttagagaatgattccggggccctgtactggggctttccagaagctcgtaacttcagctttgtagaaaaggtagaacgtccttgaggaaactgcagaggcacattccatagggaagtgaggatggaacagaagtgtgtttgggagaaacagttgccatgaagaaagcaatagctctgcctttgccggggctgtgggtccggcaggctgacacctcatcccgcaagcattttgctggtctgagtcgtggtcgttcttccacgttaactttgatgacagcaccatgggcttggctgaagctgtgtcccttggacagcagtgggaggcctgagactgggtcaggagagagctgctgttgtctctctgaggctgccagttgttgtgtgttaccgatgccagaagccactgggtccctggccttgcatccaccactgntgtgttggtgaatttcccctttccgtctgcgggtcaatgaagtcatgggctg

SEQ ID NO: 246154 - DNA, 782 bp, Homo Sapiens
  misc_feature (24)..(24): n is a, c, g, or t
  misc_feature (31)..(31): n is a, c, g, or t
  misc_feature (48)..(48): n is a, c, g, or t
  misc_feature (132)..(132): n is a, c, g, or t
atcccttaataggccaaggaatanttatttncaaaacccaattaaggnaatcccccctccattttttctttaaccacccattgtcttccttttaccttcctgaatatgcaaccaatttactatgacctgtgnactcctgttccaataccctattcccaaataaccattattttcttttagagagcccctctctgtttgttatttaggttgacatgaagagtgtccagaggtaggaccttgaataggattacttttggacacggtttgtgatgcttagaactggtgtgcagtactcatatgagcccctggagctctctgcttccacggcacaccttttgtcaggccaagactctctctccctctaaaatcaaggtagaacctcttgactttattctggatctggtaaataaaggaccttacatctctcctgggatgacagaagaccttttgtcttttctggcaagtctttcctggtttaaagacaaatgtctttgtggtttgaggacccgagtttctacggaatttacattctgttcgttagacatgtcttttctagggaatttacttttggttttctgtgtgtcaaatttaatattttacgtgatctgcattctacaggctactttaccccaaattttgttccacagccttaattacatataggggcccaattttgtcagaaatgtaatttggatctaattatctttcataaaccagtgagtttgtattactactttataattaaaatctaattatctttcacaaaccagtgagtttgtatt

SEQ ID NO: 246155 - DNA, 1062 bp, Homo Sapiens
  misc_feature (29)..(29): n is a, c, g, or t
  misc_feature (49)..(49): n is a, c, g, or t
actcactggaataaaaacccaattgtaantggggcatggtggggaatgnaagcccttggcccaacgggggaaggttagaaaaaagaccctggtcccttgttaagggtctgaaggaaggtgcccctgggtcgggggtgcgtcttggccttgccgtgcccctcatcccccggctgaggcagcgacacagcaggtgcaccaactccagcaggttaagcaccagggagatgagtccaaccaccaacatgaagatgatgaagatggtcttctccgtggggcgagagacaaagcagtccacgaggtaggggcagggtgctcgctggcacacaaacacgggctccatggtccagccgtacaggcgccactggccatagaggaagcctgcctctagcacactcttgcagagcacactggcgacataggtgcccatcagtgctccgcggatgcgcaggcgaccatcttctgccaccgagatcttggccatctgacgctctacggccgccagcgcccgctccacctgtgggtccttggccggcagtgcccgcagctccccctccttctgccgcagccgctcttctcgccgagacaggtaaatgacatggcccaggtagaccagggtgggtgtgctgacgaagaggaactgcagcacccagtagcggatgtgggagatggggaaggcctggtcatagcagacgttggtgcagcctggctgggccgtgttacactcgaaatctgattgctcgtcaccccacactgactcgccggccaggcccaggatgaggatgcggaagatgaagagcaccgtcagccagatcttacccaccacggtcgagtgctcctggacctggtccagcaacttctccaggaagccccagtcacccatggctcccgggcctccgtctgcaaggagacagagcacgtcagtgtgtcagcatggcatccttctcgttcgcccagcaacaagcctgcagggaggtctgccacgcccgttctaccgcctgcctgccgggcggcccaggtggaggtggggacgatggccggagtgacgcccgcgggagccctgct

SEQ ID NO: 246156 - DNA, 1272 bp, Homo Sapiens
  misc_feature (511)..(561): n is a, c, g, or t
gggattggcaagttcccctgcagttgtttgggctgtccctgtggctggttctggggtgtgcggccagccatggagcgctctgggcccagcgaagtgacaggctcagacgcgtcgggaccggacccgcagcttgcggtcaccatgggcttcacggggttcggtaaaaaagctcgcacatttgacttggaagcaatgtttgaacaaactcgaaggacagctgtggaaagaagtcgcaaaacactgggagcaagagaaaaagaggaagaaatgaacagagagaaagaattaagaagacaaaatgaagatattgagccaacatcctcaagatcaaatgtggtcagagattgctccaaatcatcttccagggatacgagcagcagtgaaagtgaacagagttctgactcttctgatgatgagttaattggccctcctttaccccctaaaatggtaggaaaaccagttaattttatggaggaagatatcctcggtcctttacctccacctcttaatnnnnnnnnnnnnnnnnnnnnnnnnnnnnnnnnnnnnnnnnnnnnnnnnnnnaatcctgttcacaagattcctgactcgcatgagataacgctgaagcatggcactaaaacagtgtctgctttgggtctggatccctcaggtgcccgtttggtgacaggaggatatgactatgatgttaagttttgggattttgctggaatggatgcttcttttaaggcatttcgatcccttcagccctgtgagtgccatcagatcgagtcattacagtatagtaacacaggagacatgattcttgttgtatctggaagctctcaggccaaggtgattgacagagatggttttgaagtaatggaatgtataaaaggagaccagtatattgtggacatggccaacaccaagggtcatacagcaatgcttcatactggctcatggcatcccaaaataaagggagaatttatgacttgctcaaatgatgcgactgtgaggacgtgggaagttgaaaatccaaagaagcaaaaaagtgtgtttaaaccacggacgatgcaaggcaaaaaagtcattcctactacgtgcacatatagtagagatggaaacctcatagcagctgcctgccagaatggaagcatacagatctgggaccgaaatttgactgttcatcctaagttccactataaacagggctcatggactcggggcacagaccactttcttggcgggaacttttttccctattgagggggaattgtccccttggccctcctc

SEQ ID NO: 246157 - DNA, 579 bp, Homo Sapiens; identical to SEQ ID NO: 4085

SEQ ID NO: 246158 - DNA, 910 bp, Homo Sapiens
  misc_feature (711)..(789): n is a, c, g, or t
ggggaggtggagccgcgggacgccggcagggttgtggcgcagcagtctccttcctgcgcgcgcgcctgaagtcggcgtgggcgtttgaggaagctgggatacagcatttaatgaaaaatttatgcttaagaagtaaaaatggcaggcttcctagataattttcgttggccagaatgtgaatgtattgactggagtgagagaagaaatgctgtggcatctgttgtcgcaggtatattgttttttacaggctggtggataatgattgatgcagctgtggtgtatcctaagccagaacagttgaaccatgcctttcacacatgtggtgtattttccacattggctttcttcatgataaatgctgtatccaatgctcaggtgagaggtgatagctatgaaagcggctgtttaggaagaacaggtgctcgagtttggcttttcattggtttcatgttgatgttttggtcacttattgcttccatgtggattctttttggtgcatatgttacccaaaatactgatgtttatccgggactagctgtgttttttcaaaatgcacttatatttttttagcactctgatctacaaatttggaaagaaccgaagagctattggacctgagatcactttttaaagtcacattttccttttgttatattctgtttgtagataggttttttatctctcagtacacattgccaaatggagtagatnnnnnnnnnnnnnnnnnnnnnnnnnnnnnnnnnnnnnnnnnnnnnnnnnnnnnnnnnnnnnnnnnnnnnnnnnnnnnnnttgcatagactgttaatatgtatataatacaagactatatgaattggataatgagtatcagttttttattcctgagatttagaacttgatctactccctgagccagggttacatcatcttg

SEQ ID NO: 246159 - DNA, 290 bp, Homo Sapiens
  misc_feature (61)..(61): n is a, c, g, or t
  misc_feature (72)..(72): n is a, c, g, or t
gctttttcttaggtcatttctacatcccttattccttggttttcctgcagtgtaatggccntgaatgtcctntgagccttcagctccattatggacccaaactagactatacttggataagttaagctcttcttcgtgtactggtctataattagaaaaactgttttaaattagatgttcccattatttatttaaacagctttttgctgagaaagcttagtggattaatgaggcagagggtgttttgaaatccaataaatagttcccacaggctgggtgtggtggcttat

SEQ ID NO: 246160 - DNA, 989 bp, Homo Sapiens
  misc_feature (121)..(134): n is a, c, g, or t
  misc_feature (144)..(147): n is a, c, g, or t
  misc_feature (149)..(259): n is a, c, g, or t
  misc_feature (753)..(838): n is a, c, g, or t
gggggggaaatccaaccctctttttctgtccccgggttttctttgggaacaaggttttgcccctttttcctttcccttttgggggccgcgcgcccaaacaaaggttttaaaaatttttttnnnnnnnnnnnnnncccccaaatnnnntnnnnnnnnnnnnnnnnnnnnnnnnnnnnnnnnnnnnnnnnnnnnnnnnnnnnnnnnnnnnnnnnnnnnnnnnnnnnnnnnnnnnnnnnnnnnnnnnnnnnnnnnnnnnnnnttctagttagaaacagaattttatttttgaaaatagaaaaatcaaacaatatttttaaaatgcaatctattgatgtcatcatatttggtttggaatacctaagaatgcagtgactgaaatgtctgttctaaaaacataaacattttttgatatcagtaccaacccactttaatttatatgtgaataagagaacttcgcttgaaaaatacaaatatacatattcgagagcactaccaaattttgaagcttaatgtattcattgccaacgtactgtacataactaaaagtcattttaaatgttttctaaacagggactgatgtggatatcaacaatggtttcatcctaaaactgagttttagcatttgtttagtatatttacctatttagttaaagcccattacaataatctttcacccattccttgtggcttatgtttattttcattttttttagagatggaatcttgctatgttgtccacgatggattcaaaannnnnnnnnnnnnnnnnnnnnnnnnnnnnnnnnnnnnnnnnnnnnnnnnnnnnnnnnnnnnnnnnnnnnnnnnnnnnnnnnnnnnntaataaagtgccactgagtatcagactgatcaaactgaaaacatcccagaacttcagaccaggttaagggggccaatgagaagatcatgaaaagtgacatcagatgaaagctgagatctgtgaaagtttcaaatcagtttttccaagtacc

SEQ ID NO: 246161 - DNA, 576 bp, Homo Sapiens
  misc_feature (539)..(539): n is a, c, g, or t
gactcaacacatacactttaatttaaatcaagagatgagttccatgtaatagaaatccataattgctagggtaaatgaaataaacagaacctagggacaaagaggcaagggaagttgcagctttgatgcatataggggtaatatgaaactgaaaacagtagaaccttgctacagattgattgtcagaacattaacaaaaagtcagtaagagggcatgattttatgtgtgggaaatcagacaagctagagccaattcctgcagggagggctagaatgggaaagcagctgactcagtcccaagtgctcagtactatatccacaagggtggtcactgccaccactcagaaggttacagagaaggaaatggcaaagtctgatttcactggattctcccatacagttctgccacttactaagcatatctgatatctttctactccaagtatgaacccaaatcagcaagggtggcactggtgatttgtgacaatagtgaccatgtattaagcataatgcatgccaagtgcttttcataaatgganttgatactccaatggcttttttgagggcctactgggt

SEQ ID NO: 246162 - DNA, 1005 bp, Homo Sapiens
  misc_feature (13)..(13): n is a, c, g, or t
  misc_feature (462)..(600): n is a, c, g, or t
  misc_feature (614)..(623): n is a, c, g, or t
  misc_feature (661)..(874): n is a, c, g, or t
accctcgaaaaanatcgcttctcaaaaagggaactttaaccccagccaatcatgaagaaggcaaagaaaaatcccaggtgccggaaggaagcagaaggatgagaaatactggagccggcggtacaggaacaacgaggcagccaagcggtcccgttacgcccggcggctcaaggagaaccagatatcggtgcgggcggccttcctggagaaggagaaacgccctgctgcggcaggaagttgtgtccgtgcgccaggagctgtcccactaccgcgccgtgctgtcccgataccaggcccagcacggggccctgtgaggctgccccacatccccacctggcggagctctcctccgccttgctgagacttacgccctgttcccttcctgccctgtggcccacgggccggccagctgggtgccccagggacgtgataatgcagataaatacatttatatttttaagnnnnnnnnnnnnnnnnnnnnnnnnnnnnnnnnnnnnnnnnnnnnnnnnnnnnnnnnnnnnnnnnnnnnnnnnnnnnnnnnnnnnnnnnnnnnnnnnnnnnnnnnnnnnnnnnnnnnnnnnnnnnnnnnnnnnnnnnnnntttgggggcccccnnnnnnnnnnaaaaattttttaaaacctttttttggggccggggcccnnnnnnnnnnnnnnnnnnnnnnnnnnnnnnnnnnnnnnnnnnnnnnnnnnnnnnnnnnnnnnnnnnnnnnnnnnnnnnnnnnnnnnnnnnnnnnnnnnnnnnnnnnnnnnnnnnnnnnnnnnnnnnnnnnnnnnnnnnnnnnnnnnnnnnnnnnnnnnnnnnnnnnnnnnnnnnnnnnnnnnnnnnnnnnnnnnnnnnnnnnnnnnnnnnnnnntaaatttttaaacctttccgggggagcgggaacccccccaagcggggggtgaaaaccgaaaccccccagggggatacaacccctgggccccctggggaaaaaaatttccccccgcggggaaaagggggggg

SEQ ID NO: 246163 - DNA, 439 bp, Homo Sapiens
atttctcttggagttgggagacttgatattgtccgacctaatctgcagtgctgaatcctgtcccacaactaagggggaccaattctcatgtccttgatcctctttgaagcaccttgggcttgtctgtcccacatcatcagtggcattaagcacaagagataccatcttagcacaatccttttactctaaatgttcaggggaggggtatagcagcaaggagagggggtctctgtgatggcccaaggagatatttttgatactgaagacccaggcccccaggggaactgcaggaagcgtctagctcataggcataggcctttcagtaaaggtcacccatccagggatccaggatgtagctggttccaggtgatgaaatcttcccaccttatgactggggaatgtcaggtctagtagcaaagcaaagagaccccagatggca

SEQ ID NO: 246164 - DNA, 567 bp, Homo Sapiens
  misc_feature (544)..(544): n is a, c, g, or t
  misc_feature (549)..(549): n is a, c, g, or t
ctctcttggatgtatcaaaatctcattgaggcattctaaaccaaagaaacctctgaatttgaaacagggttagtagggacttttatacccagctgggcatcccagaagcctggactctcaggactgtggctagattttgcccatgatctgtagattatgctcttgcaccggagacttgaaagttatgagtttgcattcaaacaaagaaccaccagataaaacagatgttctctaaaactgaggaaaaaaagtttagagatatacactgtatagagaaagaaagctttttgctggattgttctccttgttaaggaaatgtttaaaactagtactcccgggcacctgtgattgcattttataggattctatttagtaatatgatgtctattttacattcagccccaacctacgtcactgaaatagaataggaaatagcagccactatctgagaagtacccagttctaggaaagtttggtgcctcctcaagaagtcactatttccatagtcctcaatcatgaataaggcttggttttggggatatgnacctnttaaccgccaggaaatgc

SEQ ID NO: 246165 - DNA, 897 bp, Homo Sapiens
  misc_feature (79)..(79): n is a, c, g, or t
  misc_feature (173)..(184): n is a, c, g, or t
  misc_feature (594)..(609): n is a, c, g, or t
aataacaagcggcgcgggggagagagagatatttctccccgagagaggcccctccttaaagggtgtccccaacggcganccccccccgagggttgtattccctgcttgttggggggaaggcaccagactgtcagtggtggcccccagcgggttgtccccgtcttatcccctannnnnnnnnnnncaccgccgcggcggccccaccaaagggaaaaagggtggtgttggaaaaaaggttttcctggggggtggccgcgaagcgcggcccccccacagggagtgaggttggtgtgcaactaatatgcgggcgggggacgggatgacattgagcggggctagtcccgagggggtaggtgggtttggagggggtagcggaatggtgttgttggtgtgttttactagataagacatctttattacttaatctttaaaacagtcacttgcctattcaattctgaaactgtttgttttctttccctcccccgcactcccgctctgatacacaaacttgttgtaaaaataatgcagaaacatatacgtcaatctaagtctctgaaatatggccaactctacctcgccgtatatccaacattnnnnnnnnnnnnnnnnggctgtttaagaatagaactcattcccggtttccaccaaattatttccctaattcttaaatcctcaaataagttcttaatctccaaagtctcggttgtgggaaaaacattaatttgtgcagtccaacacttacatactttcttgacggaagggcaatcctgtccctttaaactcaatgaaggcagcggccaggtccttctgagtccccgtataattgcctagaacttaacatttagtattcatagtccttggtttacagacgggtccgacagttagaaactattaccc

SEQ ID NO: 246166 - DNA, 578 bp, Homo Sapiens
  misc_feature (22)..(22): n is a, c, g, or t
  misc_feature (129)..(129): n is a, c, g, or t
atgtcccatgccacatttggancataaagacccaaggttgcccttctgtaaaaggcccaaagaagaaaggaggcatcacaatgtttctgctgtggggggcccttccgagcagcagccaggagcaaggtncaggagtggcctgattctggggtttccctgcccccccctggggtcccttaaactgctgtgtgatatgtttctaactatctggacagctcacccaagagtcagttgttcccagtcgcttcttgctgaggataagccaaaagagggccgggggccaatctggtttctttcaagtgaaattatgcttctcaagcagagaatgattgcccacagcagttaaaccttgtttaatggtaattaaattgcttttcttcactttgaaacatctcttaattttctgtacaaaggcaggaagcatttttctttgattctacaggatgtttctaagtatggtgtaatcagttcatcttaccttgctgggctctgaaagaatgagtgtgtgggatcagatttagaaatgcctcaaaggttagaaagccgagtgctgccgattaactcaagctcagatgacc

SEQ ID NO: 246167 - DNA, 569 bp, Homo Sapiens
gtaatgatggtttattgtctggagagcatttattcaagggctgaaggatgatgcattcctgtgaacagggctcccctggggaatctttgggcaacgtgcagttgccatctgaggccttacggcttgaggaaaagccctttggaatggtcttcaaagcctcataaagagtcacttgcctaaatttgtttttagaagtctcacttccttggcttttctcttgacgctgaatagctgaaaatcgatcagacagatccagaggtttatccatcacacagtctccattcatggaaaactgattatccattggaaaagggaaagcattttctttatcaaaagaagcttgggggcagcttacttcatgttcactttcttcctcagttttcttccttttggatgttcggcctcccaatgatttcaggggctccaaatgttatcaagtgttagaatctttaccgtactcaagtcctattctgtcacctaggggattcacttatatttttaatttataagtatctggtttattagaatgactgggttaatgatcttggtcacttcagacccaagactgg

SEQ ID NO: 246168 - DNA, 1169 bp, Homo Sapiens
  misc_feature (1067)..(1067): n is a, c, g, or t
  misc_feature (1089)..(1089): n is a, c, g, or t
gtcaaggattttgacggtgtgttgcctagcaagtcccgcttattttgagagtgggctttcaccaggttcaggtccaagagagggcctgtaagggaaattggaccaaacactttcctcgcggaatgaaggtggccaaaggcacggcggtgggtaaatcttatgtttgcgaaacctgcgggtttggggtgtcccggtggatatagattccacgttgaatggccctccaggaagctccccttttggggattaggttcagggagcgctcgggtttggccggcggggcggtttgtttataaggggggagatcccaaaccgcttaattccatgggccaggatttttctttagggaacacagcttatgggccaatgtgccgttggcctaatggggacgcgggcgccaaaaggaattgttttagaaaagcgttttggagggccgagggcgacgcgacatgtctattttttttgtccactgtaccatctcggaataaaacatctgttttaattggccagtaaaatacattgcaaatcattagtattttataaacagaaacattaagttataaatccatgttaaaaattgcagctcagtgcagccccaacagctgtgtgtccaaaagtctatttttacaacattttcctccagtatttttgtgacaagaaagttcctatctgccatctagatcaagagcctgaactacagtattttcaaacaagaaccgggagaagtcggtacaaggatacgtcgtgctgtgtatttaaacggcgcttcccacacacctgccgtctgcatcccgggaggacgccctttgggaaaggcctcctcggcagtgtgaggtctggaggggtctgcctggaccccatttttagggatgctcccctccccaataaaacagcagcccccgcccctgccctgcacagcatctgggggttcataacacaggtgcaatactgaccatgggccctggagggacgtctgcaccccgaagcccctgtacctcaaactcagagtttcttcccttctttgattttctggaggacctgcagctggccttcctgagacaggctcnattcctgttccatttgcttccnggcagccttccctttagtgggtataggttttgacgttctgagttactttgtatcaaagagctaattaaaaatggtccttc

SEQ ID NO: 246169 - DNA, 295 bp, Homo Sapiens
  misc_feature (47)..(47): n is a, c, g, or t
  misc_feature (51)..(51): n is a, c, g, or t
  misc_feature (92)..(92): n is a, c, g, or t
  misc_feature (175)..(175): n is a, c, g, or t
gtatttctgggggcttttaaatccatgatggaagttaagtccctggntaanagcattgggtcatttccaggtggtccggttgtctgccttcnagcttttcccttcttattctgacagttgaaattctccttcctgcctaccccccagttagtcagcctccagtcctgtttagttnatcttttttctctcctaatgcctgttaagctggaaacaggattcttgctcgtcgtcatattattttaaataagaatgaaactaaagaagaggtctttgggccaggcatggtagctcacac

SEQ ID NO: 246170 - DNA, 636 bp, Homo Sapiens
tgaaaaccttaaagaccacgatttcttggggggacaagaatttccgttgacgccagagggtttctcaattcatttacgggcatttattgccgaggaggacttgacaccagagcagaagccagtgcgtaataaggatcggggtatggccactattgcccgaagagcttttgcgggtcgttgacatcaacgaggttttcaaagagctcggccgcatggtgcagctccacctcaggagtgacaagccccagaccaggctcctgatcctcctccagtcggtggccgtcatcctcagtctggagcagcaagtccgagaaaggaatctgaatccgaaagctgcgtgtctgaaaagaagggaggaagagaaggtgtcctcggagcctccccctctctccttggccggcccacaccctggaatgggagacgcatcgaatcacatgggacagatgtaaaagggtccaagttgccacattgcttcattaaaacaagagaccacttccttaacagctgtattatcttaaacccacataaacacttctccttaacccccatttttgtaatataagacaagtctgagtagttatgaatcgcagacgcaagaggtttcagcattcccaattatcaaaaaacagaaaaaca

SEQ ID NO: 246171 - DNA, 475 bp, Homo Sapiens
atcacattcattgcacacaagatggatggtcgccagcagtaccatgcctcagaaaatgttattttccttatttggaaaatggatataatcaaaattatggaagaaagtttgtacagggtaaatctatagacgttgcctgccatcctggctacgctcttccaaaagcgcagaccacagttacatgtatggagaatggctggtctcctactcccagatgcatccgtgtcagctttaccctctgaacttctgatcgaaggtcatccctctccagcttgagtggatcaaagatgacaagggccaatggaaccaagtttgagtcttgccaggtcaatacttgggtcctgagtatggtgactagtatctgttttgttatgtgtgtattattccagccagaatgggaaatgctaattcagctcctccagggcagcccaatggggctggtggctttgagattattaaactctttctctgctgc

SEQ ID NO: 246172 - DNA, 622 bp, Homo Sapiens
  misc_feature (434)..(527): n is a, c, g, or t
gcgtcgcgcgggcgtacatagcgggaaagcgaaacccgcccggtccattcaagccccgctgcctggcgccctctagggtcgttcttgggaacgggcggacctttcgtcaacactttgcctgcaagatcccccattgggtgaaccgaggaggaagttaaaggaagatgtgtgtttttgagcgctgctttgtgccaggctcatcttaggtgtgggacgtgtactatctgaattaataccccaccaggcctgtgggacagtcactgtcaccattcgcaaattatggatgaagaaaggaggtaccaagtggtggtatcacctgtccatagtgagctgtccctcatggagggtggccgccccacgcgaccattcagtgtgctctcattcacacgttcattacccaagagcactgctagcactgggggctggctcactcnnnnnnnnnnnnnnnnnnnnnnnnnnnnnnnnnnnnnnnnnnnnnnnnnnnnnnnnnnnnnnnnnnnnnnnnnnnnnnnnnnnnnnnnnnnnnntaaaaaatgtaaaaattagctgggcagctgggcatggtggcacatgcctgtgatgccagctgctcaggaggctgaggtgtgaggatcgcttggac

SEQ ID NO: 246173 - DNA, 463 bp, Homo Sapiens
cttcaaagatatcaaagtttaatggaggagacaaaaaagtaagcaggcaattacaaaacagggataaagtgctttgattgggataaacccaggaaaaacagaaaaggaacacctgatccagtcttatgggattgggaaaggtttcctagagcaagtcaggtatttgacctgaaggctgagtaggagttggccagaagagtggagagagagatgcagcttggagtgtgcaggaaagagcaagtgcaggaaaagaggagggaaccagagctggggagagcggcagaggccagatcatgaatgacctcctcagaaatcacaccaaaggaggttcactgtttgctgctggcaatgggaagcatgacagggctttacacagaagagcggcatgaaaggatttgcctttcagaacgcttgttctagcagaaagggagaaaagactgacgggaatcaaaatagaaaagag

SEQ ID NO: 246174 - DNA, 937 bp, Homo Sapiens
  misc_feature (119)..(155): n is a, c, g, or t
  misc_feature (892)..(892): n is a, c, g, or t
ccaatgaaagcgcagatttattgaggggaaagtacactccacagaagtggaatgtaggtgcgggagcaggcgaccaagcggctcaagaaccccgattacaatgttttttagggttttannnnnnnnnnnnnnnnnnnnnnnnnnnnnnnnnnnnnaataagctagaattttataataccccaagagttctttaaaggcctccaatcctatgaaggactggtgcacaaccaatcagaggctgaagtggagacttctgtcttgttaccacaggagtgaggacgtggcctgtgtgctgcctcatcttgcctagaactagctgcacctgctgttcttttgcttatgccttcattcttggttaccctaattccctattctcctgcctcactctgaggcattagagttggtttttcagtctgccagggacaaaagagaactaatccagataggaccatgccaaggaagatagaggagaggctaaagaaagagtacaaaggtcaatcagtcgttcccatggaaaaacaactctcctgcttatatagtcaattattgtgtccaattcattcagcaaaacatttattcatgtaatatcccttacttggtattctaacttatattttcaactcattttaggaacttgaagtcagtctcaggtaaagaacaatgaaagagaaatctcagcttggtattggtaatgggggtgataatctccacctggagacactaggcgtatgttaaattatcgagcttgttatctttcctgggaagtgattatcatttgtttctcttgtgacagcggggagtgttctgcatgaggaactaatatgataccagaaaaacaggtgaaatgccagttacagaaacttattaccaacgactatctaataactgcgangacagaaataggtcaattgaaacatgagtggatggtgaaaaaaat

SEQ ID NO: 246175 - DNA, 456 bp, Homo Sapiens
catgcaaacctttttaatgggttttacttggtattaaatgatattttccatttattgagatgatcatataatttttccccttcagtttataaacatgaattacaatatctttattagaatgataacagggagggttctattcttggaataagctgaaacttgtttgtaacacattatcatgttgatctatcagtgtgataatactgtggatttcccaatccacgtttacaggggagactaggacacagagagcaacaaaagctaaactacccaaatgctttgttttggcatcaggttactatcttaaataactatattcaattctgttttataagtaaaagcaatccctaaaaattaaaagccaaaatgaaaccacttaacctaactgtgcagtgagttggggggagagccttacgggagcacttatttcagggacattaccacatagaatttgaa

SEQ ID NO: 246176 - DNA, 489 bp, Homo Sapiens
gggggtgatgggcttctttctgcactggagtctcacatctgttagctttgacactcaagcaatgttggaaaatgcagggtgactgagttccctgcccagctttcgggatctctggcccccatccccttgtgtgtgtccctctgcccagctcctgctgtaattagctccacgtgtacccccttcactccctcccaccagctctgcagccagcctatggcaattatattttaagaggtgttcccaggacttttgggacctactaaaacaatgatggttattttagatgtgatgatttatatttatgtagagatatttctggaccactcaagctcttcgataccaaaatcaggagcatcttgggatttattaaattatgtaagaagatagcacagatatcgggatattattgtgtgaaaatgctgcttttactttgatgtgatctcattgatgtacacaaccaagttccaataaagtgctagaatgtgaaaa

SEQ ID NO: 246177 - DNA, 335 bp, Homo Sapiens
ctttttagatttagctttcattttattttagttataaaacgattgccaaaacacaaagttttagaaaaacacacaaacacaagtttttattccttttttagttgcagaaaatatatacaatcacatattccatatgcttgtctacaaaagcatctctaaaaatgtcatttactggacttgacagtataatcttttcggcttttcaattgcaggtatcatacagatcattttattttattaactttttaagcacttggctcaagcaactttggaagaaggctttgtgagcttacaaatcttattccaagtgttattttttaaacagttacaactcc

SEQ ID NO: 246178 - DNA, 436 bp, Homo Sapiens
  misc_feature (138)..(173): n is a, c, g, or t
ttattaacatttatttattatttttctaaatgtgaaagcaatacataatttagggaaaattggaaaatataggaaactttaaacgagaaaatgaaacctctcataatcccactgcatagaaataacaagcgttaacannnnnnnnnnnnnnnnnnnnnnnnnnnnnnnnnnnngtggtatatgtatatatgtacctatatgtatttgcatttgaaattttggaatcctgctctatgtacagttttgtattatactttttaaatcttgaactttataaacattttctgaaatcattgattattctacaaaaacatgattttaaacagctgtaaaatattctatgatatgaatgttttatgcattatttaagcctgtctctattgttggaatttcaggtcattttcataaatattgttgcaataaatatccttgaaca

SEQ ID NO: 246179 - DNA, 935 bp, Homo Sapiens
aggacttctgaggagcaatgggacatgagtgtccctgtatctgcgccactgccgcaagggaagcctcaggaaccagcacctggaggccaggatagccaagccctgggtgagcgagaggctggagaacacaggagctcacccagggctgctgcccaaccatgggccactgtgaacagacttcagtcctctgtttttgtttcataagccgttgagacatctgatggacttggcttaggccctgctgggacatcccacgtgtgatccctttcactccatcaggacaccaggactgtccttaggaaaatgtccttgagatggcagcaggagtcatattttctgtgtgtgtgtttcggaaagccgctgtgtcctgcctcagcacaaagacccagtgtcatttgctcctcctgttcctgtgccactccagaacctcagcagatctgagccaccgcctgccagtgtgagaggcggccactttcatggcagcttatcaggcgcagggccccagacagcttcccagccggccctagagcccggcctgggccaatgatggagggcggccaccagcccagggcctgcccatccagaagggactccccagggcctgggggaggagacccttggaaaagtcctctcttcccagctcctgattctggatctgagattctcagatcacaggcccctgtgctccaggccgaggctgggctaccctcagggagatccagagactcatgcccatggccatccatgcgtggacgctgtgtggagagtccaggatgacgggatcccgcacaagctcccttcagtccttcagggctgggccatgtgggttgatttttctaaagctggagaaaggaagaattgtgccttgcatattacttggagcttaaactgacaacctggatgtaaataggagcctttctactggtttatttaat

SEQ ID NO: 246180 - DNA, 622 bp, Homo Sapiens
acatccaaatagcactgatggcttttattgcagattcgtgtcattacaaggataatctgggaatatatttttaaaaaaaccctcccttttatatacacaaaacatgctacatggtacactttgtgagaaatgctgaggtaataggcacacacccagacatggacagtaccaaacatccaacatctcacacagcctggcccacgtgcccaccgggaagggtctcaccttcttgactcatcccttgccccttcttggcaatagtcccgggagtgctgaggctgacacttggtggccaacaggactcagaaagccaccatgctgcagtgcatcaaccaaggggtccggtgacccctgattattcaactcctgagaagtggcctgttttcatttttgtggcacttgttctccagggaagtgtagtttggagatgagatgcggactctagtcagcctgagagcgtggaatctctggtctgtagccatctgggggctctgatgatctgatgaactctgttcctagatagatctactggccaaataagttatattgtgtgaaacccaaagaccttagtttaaattgaagggaatacaaacagggggatttttataggcggggggttgtc

SEQ ID NO: 246181 - DNA, 355 bp, Homo Sapiens
gcgtccgcgctgctcctgctgctgctggcgctgtacaccgcgcgtgtggacgggtccaaatgcaagtgctcccggaaggacccaagatccgctacagcgacgtgaagaagctggaaatgaagccaaagtacccgcactgcgaggagaagatggttatcatcaccaccaagagcgtgtccaggtaccgaggtcaggagcactgcctgcaccccaagctgcagagcaccaagcgcttcatcaagtggtacaacgcctggaacgagaagcgcagggtctacgaagaatagggtgaaaaacctcagaagggaaaactccaaaccagttgggagacttgtgcaaaggactttgcagatta

SEQ ID NO: 246182 - DNA, 639 bp, Homo Sapiens
actaagggaataagcttgcggccgccgccgtggccaaggcggcccccgcccccaccgtcagctccaccatcaacatcaacacctccacctccaagttcttaatgaatgttataactattgaagattataagagcacatactggccacaattggatggtgccatagatcaacttttcactcagagtcctggtgactatatccccatatcctatgaacagatatacagttgtgtgtataaatgtgtatgccagcagcactcggaacagatgtatagtgatctgattaaaaagataactaatcacttagagagagtctcaaaggagctgcaggccagccctccagatctctatattgaaagatttaatatagctcttggacaatatatgggagcattgcagagcattgtgcctcttttcatatatatgaataagttttacatcgaaaccaagcttaacagagacttaaaagatgaccttataaagctgtttacggaacatgttgcagaaaagcacatttacagcctaatgcctttacttttagaagcccagtcaacaccatttcaggtcacaccttcagctatggcagatatttgtgaaggcctgtatacctcagaccagagtggggtcagatggctcgact

SEQ ID NO: 246183 - DNA, 1680 bp, Homo Sapiens
  misc_feature (376)..(385): n is a, c, g, or t
  misc_feature (1121)..(1125): n is a, c, g, or t
  misc_feature (1129)..(1129): n is a, c, g, or t
  misc_feature (1131)..(1131): n is a, c, g, or t
  misc_feature (1133)..(1133): n is a, c, g, or t
  misc_feature (1338)..(1363): n is a, c, g, or t
  misc_feature (1670)..(1670): n is a, c, g, or t
gggttctctttagacatcttctacttgctcttggccttgagatcgtgtaacaaaatgaaggagggctctcttctttcttcctcatcctactcaaaaacttcccgagagcagtggtggttttgagggttttgacttctattacttttggcagcctggaaagttgtgtcttctgggaaagagacccggggaggccaggagtagctgagggtcctttctgtgcccttaaaccgcccagaggagccctattccactctggttttaggctgatctgagagggtctccctttgttcctttctggagcatttctctaacgtttattacaattaggagggggaccccacatctgtgagattctgtttcatttgaggtttacagnnnnnnnnnngtggccagatgtgttccccccatgggtgagaggcctgggcaactgcctggtgaatgtgtcttgcggcagctgcagcaagtggaggggctgaactactggccagctcactggatgatgggttaatacaacaactgcactgtaaggactcagagccacacagaacttctgagaggggctgttagcattgcgcagcatcttcagttctccagtaaatgatattgcgttcgtgcctcagctttaagcacaagtagcagcagctcctgcttgagttctgagggcatcatggccctatgattaaccagagtgatctaacctagactaaaattgggaacttatttgcaatttttgaccctgaccactaactagtgattcttctccaaaattgagaaagacagcacccattgaagcagatatgtgtgtgaaagtatatttttcaattccagatttttaattttaaggctccaggaaagaaaggagagtagaacatttttcctcattttatcaaatcctctcttgccctccctcaattcccctgtaacattcctgaagctgttcccactcccagatggttttatcaatagcctagaggtaaagaactgtcctttttctctgattctttaataaattatctttatagaatatggcacaagtttttctacactcagtgttaaagtatttattaatgggaagtcaacttaatgttttgaaataaatatatgactctgtttaatgcacnnnnnccanananatagaaaaaacaaacaaacacgaaaaccccgaggcgcgaggcatgcatagcatgcaccatcctggttgtgcttgggcggggccgcccaaaaacctcgcctgaccaaatcgttatatacccccctgcccccgtgagcgcagggccccaaagggccgcaagggtcttcccacgaagtccctgggaaacgcccgacgcgggggggaannnnnnnnnnnnnnnnnnnnnnnnnnaagtgcgaccgcgctcgacgtgcgaacaaccctccattcggaccgctgcgagggcctccacatcggccttttacgccgcggcgccgcgctatgggagccgaaaggatacacggggaaaaccgcaatgggagtgtcagtgccttcgcccagcaataagcactctccgtgcgtggatgcgccttaagccggctataggaaaaccacccgcccatacccgggctcgatatacgcttcgcgatgtccccttactgaccacctcccccaagtctgccccctcgacgaaataccaatcctcccctctgggtgntacgcggcgg

SEQ ID NO: 246184 - DNA, 600 bp, Homo Sapiens
catttggggttgggacagggagggtgttttgggtggcatagaggttttgtattgagggccagtgatgatgtttggatatttatttcctgctacttaaatttgaatctgagtgaattgtacctatttctgatgatgtcggtcttgcaaagcgacagattcataaagtaatgatgaaatctttctttcttcccgtgtgtatttctaagaaatagagccaactgattttgtatgtaaataccaagagcaatttacctggtactagaccggcaccccagtgcggacccttcccagccctcatcccacttcctttcctactgtcctggaacctgtctccattgtgtgatccagccctggttctggctgtggtcagcagatcccagtgaagggttttgtgtgtttaggcctcatttctttgtctttttcctactccgttcctggcatttgctgatttctagtgtatactctgtagtctcagttcgtgtttgattccattccatggaaataaaaagtatgttgtacatactgccgaagaattgtcttgcaagttaaggcttccccctttactataagactataaataaaaacttattttatccttca

SEQ ID NO: 246185 - DNA, 420 bp, Homo Sapiens
  misc_feature (76)..(88): n is a, c, g, or t
  misc_feature (90)..(186): n is a, c, g, or t
tgggctcacgttatcctcctacctcagcctcctgagtagctggactacaggtgcacaccaccacacccagctaagnnnnnnnnnnnnnannnnnnnnnnnnnnnnnnnnnnnnnnnnnnnnnnnnnnnnnnnnnnnnnnnnnnnnnnnnnnnnnnnnnnnnnnnnnnnnnnnnnnnnnnnnnnnnngtttttaacgtgtattatcttattactagtatatattacttgttgccccgtctgcccaaaaaagacaccactgaagtgtatatatgttgcaagttcctctccagtgaccctcctaccaactccacagagtcagctactagtaacagcatggtgtatccttctagaactttccacaagcacacacaaccgtgtaaatatgaagcgtacgcagacacaaccatgcacacacagtat

SEQ ID NO: 246186 - DNA, 323 bp, Homo Sapiens
ggcacaccagagtacatgtctctgcctctgttttcagtgtggctttggacaggaatatatgaataaatcactgccgtacaggttttccaatacacaagtgctagaaaatacacacaattccccaatgcgtaagttgtgctaatgtctttccaagttctgggttgggaagtggagggtggcagcgtttgtttgtgcgcaaccgtccagtcctgttcacagcgaggatttggagtcctccagggtctcatcatgggagtgatttgtcagcggacgcctctgccctgtctggcttcaggtccagggaagctttgaagcagtcaagc

SEQ ID NO: 246187 - DNA, 449 bp, Homo Sapiens
  misc_feature (229)..(229): n is a, c, g, or t
  misc_feature (397)..(397): n is a, c, g, or t
  misc_feature (406)..(406): n is a, c, g, or t
aaatgacccaagatataattctgattgtggtctggatcataaacccgcatcacattttaaatgtctattgtcttggagacaataagctgttttatgggggaatgggtgggtggaaaaatgggagcagggcttctgaagctgactaatacctgaagaatacggcaacgtgagaaagcactgacccggctgctttggtaaatggaagaaaatcatctcagggttgctaggnacatggggtaagaccagactgtagaaagatccttcaaaacaaaacagtttgccattcctttaacaattactaacgtcaagaacttgggaattgtgccacgggaaggacagagcttaaggatgggggtgggagcccttacctccactgctccccgggggcctaaagccnggggttccntatggggtttttgggggcccacacaaacaagtcttccgttttt

SEQ ID NO: 246188 - DNA, 556 bp, Homo Sapiens
  misc_feature (132)..(150): n is a, c, g, or t
ggcagtccgtaaccgcccacccgaccagctgcattggattggaggaaatcgagcttctgagtgcaggaggggcctctgcagaacactagcggttgccgcaggatctgtgaactttgcaatgtggctgcaagnnnnnnnnnnnnnnnnnnnatttggggtagttatttgttaactatggacacagtgaacgtagtttacgatcttgaaatgaaacttagatttttctggggaaatgttcagatacagttttgtgaactgtaaatcaaaatacctttttctacagtttatcttttattttctgcaaatttaggaacatatttactcgttttcacattgaatcttaagtttaagctcttcatttggtatttaggcaatatatgagaaaaaaattttttttgttcatttgtaattttaacaagttgaacattttaccatgattgaacatgtttttattacagtatttaacattcccccaaagaataccctgcaaagtgtaaacctttgtcccatactgtgatattactgttctgctacaataaatgtcaaaccttaaaaa

SEQ ID NO: 246189 - DNA, 596 bp, Homo Sapiens
  misc_feature (313)..(335): n is a, c, g, or t
gggaccttgagagtcatgatggaggtccagaaacgtcaacggcttgaaacagctgagagatttcaaaagcacctggaacgagtaattgaaatgattcagaattgcttggcttctttgcctgatgatttgcctcattcagaagcaggaatgagagtaaaaactgaaccaatggatgctgatgatagcaacaattgtactggacagaatgaacatcaaagagaaaattcaggtcataggagagatcagattatagagaaagatgctgccttgtgtgtcctaattgatgagatgaatgaaagaccatgaaagatgnnnnnnnnnnnnnnnnnnnnnnngataatagcatcatatattagttcattttcttttggacagtcttaagagaagtttcactaaaaatgtaaacagctttaatcttgactccaaatttttcaattatgagatgtcataggcagtaatttcgctgtataacaagcatagacaaatgagtgtccctgcactaagaagaatcactttaaaaagcaaagtgttagctgctgttgtatgggacattcctatgttttagagttgcagtaaaactttgatgataacctcca

SEQ ID NO: 246190 - DNA, 157 bp, Homo Sapiens
tatcagtcttgtcaaatttttattgtagtatgtagtagaattaaagctatgatgaatcaagtaaaaaatgatttccttaaaaactaagctaataggcgaaaatactcgcttgttcaacaaatacccagtctggcagatacaataccctgcccttagt

SEQ ID NO: 246191 - DNA, 410 bp, Homo Sapiens
gaggtttctcaaatgcctcagtccctgagagccatttcttcccctacatcgtctcactttgcttcctattgactgctggtagaaggagatttggggtaggggctagacctccttttatttgaagggggcaagggctgagatgtggtccccaaggggccagaaattcccaagttggtcacaggtggcttagaagtgtgtgttatggttttacggatttccttgaagcctctctccttctctgcctacaaagaccctatactctcagtctcccctacccacccccaagggagctgtggggagggtttgtgttatctgtggaaactccaaaacaggggtgttgcgggagaaggggagagtttcaaggtaaacgcaaggactggacttaggttccctaggggggccacagttca

SEQ ID NO: 246192 - DNA, 727 bp, Homo Sapiens
aacgtaatctgctgctcatagtttattttccaccaaccagtgatcagctgtgagtgatgtggctgtgacctatagctggtgcttggcggattacaaacacccaaccagctggtggagcaggcgcctccctgcccaggatgatgcttcaggaactttctgggcacaaagtgcttcttggtggacaatttttaaaaacacacagagccacgtgggtcacctattgtcaccaagagaaaaaagaacctcaaaatcagtgacgcgacaggaagaattcggacctgttctttctgaggaagttcttatttttcctgtaactgtatgacggcatcacaccttcctcctgaacgtgggggccatagtcactgactccgccagcctcccaccagtgtgctggtgtaggaggagctgcagacgtcctcaagcagaagtcacttctggcgtcctcagtggtaactcctgtccctgctcaagtcctccgccctcccccgcagctgtcttttcccttcgaaaagcaggatgcttgccgccatggccgagttgaggctgtccacaccaggcacaacggggatcagcagcctcttgccaccagtgctctcggccagctgcagggactccaggctcacgccgtaggtctccccgccaatcaccacagctgccggcgcctctgtccagtccgagtcgtaactctgaacctcaacatgaggcagccaatcttgactggctcccc

SEQ ID NO: 246193 - DNA, 448 bp, Homo Sapiens
gtcttttcataaaaaactttatttctcaaaaaagggggaagaatccaaagtattaaaataatcctctaatttttgttttggaggaaaagggtaggacgacaaaataattcatacaaaaatttcaaagcatcactgctgtagatattcctccagctcagtggggaacatcctgaaacttgcatctcctgctgcagcttgggttccagctgcatcacggggaacacagcatctcctggatgcaggaagctgcaagcatctggaatgcttattaatttaccccacaaataaatacaaaaggtcaatcttcccagtggaaatgattccatcgatttttgtgactttctgatgagaatgctaaaaagaagagttgccccttttctaaaattccaaatctttcctttttgaagatgactacatgtgaaagaaataaaatgtgaaaagatttgtt

SEQ ID NO: 246194 - DNA, 236 bp, Homo Sapiens
gacaaaaaacaattgttatttgtgtacttttaaaacctcacagtaatattttcacactaccttcttggctgaaagttcacactcggaattccagagcagtccatggccaggcccactgggctccccttgctctctccttggctttggtaaccactggccccagggactcagcctgctttcctatccatcccctcagtagctgtcaccatgcaggttaccccttctgtcgtcttctc

SEQ ID NO: 246195 - DNA, 129 bp, Homo Sapiens
ggaggcagagaggaaggtttaatgagccctgtccagggcccttcagtggggagcctccttcttcttgcccttctccttcttgcccttctgtcgtcttctcgcagccgtatagtagtagtagtcggccgc

SEQ ID NO: 246196 - DNA, 141 bp, Homo Sapiens
ggagatgcacacaattatgattttatttgttaagttacaatagccaaaagagctttacaaaaggcaaaataaactacacatccattttagaaaagtcctttttatttctttaaatcagaggcccccttctgtcgtcttctc

SEQ ID NO: 246197 - DNA, 126 bp, Homo Sapiens
cggtggaggaagcgccgaggcgggcggcggtgtcctcatggcgtggtttattacaattccatctcacaaggcgggtgggcgggtggcagcggcacacgaaatccaagccccttctgtcgtcttctc

SEQ ID NO: 246198 - DNA, 268 bp, Homo Sapiens
aatggcttatggtatttattgccaaatcaccatagaaagttggtgttgatttttcacttcctccaatagtgaatgggagtggccatttcctgacctcttgacaatacctggcacaatattcaccattcagaaaaatcttttccagttatttgtttgagcacgttcaaatgttggagcctttttgtgttctttgtctagttttctttggtgatgcttttttaaatttatttgtagtatcacagcccttttccccttctgtcgtcttctc

SEQ ID NO: 246199 - DNA, 218 bp, Homo Sapiens
aatgagtctgaacatggcttatggggttttgaaggatctggctctagtctcatcttgacatcctttttctcttgcttactacgctctagccactccagtgcttttcatgcactggggctgttgtgcatgcttttatctttgcctggagtagttccctggtatccatctcctgtttattttctggtcctcagtgtaaaagccccttctgtcgtcttctc

SEQ ID NO: 246200 - DNA, 456 bp, Homo Sapiens
tttttggaactgatgaattcattttaatcacagaaatttgcctgggcttgagcaaactgtggggactcaatagatttggaggcctcctctcccttctgagaggcctgcctgcttcctgccctgatgaatccctaatttcagtacaaactgaggaacttgaaaaacatctgtgcactgggaccgcccctcacaggagggctgaaagcagcacagctgagtcagcggcacattcagcaggcgttcagtggggaagcaggagacagaggcggcgctcacaggacccgctccaggcttgtcacagccacacatcacagcactttgggttttgccacaacagagcagctctgagctcaatccttgcacctcagaagtgcatttatgattaaaatcatgctcgacatgaagccctgttatgatgtgcagtttaaaaagagaaacgggtccaaatcagcaccc

SEQ ID NO: 246201 - DNA, 273 bp, Homo Sapiens
atcgctcgacatcgatacgactttttattgatttttaaattagcctaccccaatatcttccagggaatttttaaaaagttatctttctctctttcttgaggttcctcatatactctcactcacacgcacattttcacgagagcgaagtctacctttaactgaaatgaatgactgctgaatggtcaggaactccaagtccacatggaattcttgctcttcggtcccagactctcccttctgtcgtcttctcgcagccgtatagtagtagtaggc

SEQ ID NO: 246202 - DNA, 149 bp, Homo Sapiens
ggtaccccattcctgttgaatgggctcagtcttgacaaaccaattccctgtaactttttcacaattcttgactctgagaaaaagcagcactgtagggacctgaactctccattctaccagttcacccttctgtcgtcttctcgcagccg

SEQ ID NO: 246203 - DNA, 347 bp, Homo Sapiens
gtctctttagggttgaatattgtactgttccgtgcccttctgtattcttgtctctttaggttgaatattgtactgttccgtgcccttctgtatttttttctctttaggttgaatattgtactgttccgtgcccttctgtatttttgtctctttaggttgaatattgtactgttccgtgcccttctgtatttttgtctctttaggttgaatattgtactgttccgtgcccttctgtatttttgtctctttaggttgaatattgtactgttccgtgcccttctgtatttttgtctctttaggttgaatattgtactgttccgtgcccttctgtcgtcttctcgcagccg

SEQ ID NO: 246204 - DNA, 229 bp, Homo Sapiens
aggtcatgagggggaggctttattgacaacggagaaggcagagttctaggcaagttcacacaacactgctccaagggtccaggcacgggtcaaacccgtcaggaccaagggcctcttcacctcagggacctcagtccctcccaccatcctgaaccttcccacaccttttccagcaacccaaagatatccacccccaagccaccttctgtcgtcttctagcagccgtata

SEQ ID NO: 246205 - DNA, 191 bp, Homo Sapiens
tatacggctgcgagaagacgacagaagggcggagagaaaacggagcagagaaagaggaaagagacagaaaacggtgacaaaagaaactactggactgcagcccaaagtctactgctttcagctttgtgtaaaaggtggtatcttttagggctccagagacactaaccagtgtaatttttgcaggcaacatt

SEQ ID NO: 246206 - DNA, 134 bp, Homo Sapiens
gctaggggcttattgagcttttttgatctgtggatttatatttttcatcaaatttgaaatttttcagccattatttctcagatatattttccccccttctgtcgtcttctcgcagccgtatagtagtagtaggc

SEQ ID NO: 246207 - DNA, 358 bp, Homo Sapiens
ttttcttgtctgtgtgattttcatacaggttatttttacgatctgtttccaaatccctttcatgtctttccacttctctgggtcccggggtgcatttgttactcatcgggcccagggacattgcagagtggcctagagcactctcaccccaagcggccttttccaaatgcccaaggatgccttagcatgtgactcctgaagggaaggcaaaggcagaggaatttggctgcttctacggccatgagactgatccctggccactgaaaagctttcctgacaataaaaatgttttgaggctttaaaaagaaaatcaagtttgaccagtgcagtttctaagcatgtagccagttaaggaaag

SEQ ID NO: 246208 - DNA, 353 bp, Homo Sapiens
  misc_feature (63)..(111): n is a, c, g, or t
ggtcgctactactactaaattctcggaccggttaacaactgaagcagtccctgcccccatcannnnnnnnnnnnnnnnnnnnnnnnnnnnnnnnnnnnnnnnnnnnnnnnntacaacaaatgcatttttcaactagaaagcaccacgaagattattattgttgacacctgtgacgtgagacgtgccagacaatgcatttgtcctttagtggtcagagccgatagccaggtggctgcacagattaagaagcagacatctgtgcagacttctaactgcccagtaaagaggtaaaccaggggccactcctaactcagactcacccactgttaatagtcgacgcggccgcgaattta

SEQ ID NO: 246209 - DNA, 408 bp, Homo Sapiens
aattcgcggccgcgtcgaccaaagacaacttcctggccaaaacccagctgatccactgttggtataatcttaaaaaaaattacccatcaagaaagtcaatcgtgtgcagaagacaggaaccccagctctgctaaggctgtggctgctgcagagactaccaaagagtaggattaggttgtagatagacgtgaccaaccatagttcttgaactttctcaaaggcaaaggctgacttcaaagtccattgtctgtcaataaaatggcatcaggcaaaaagctggggaagagaagcccagatggatcctcggttgttttcagatgtcaaaggttcacaaagctggccaagctgtttctggaagggacttttccagttcactatattatagtgtgcgtcgacgcggccgcgaat

SEQ ID NO: 246210 - DNA, 429 bp, Homo Sapiens
  misc_feature (110)..(173): n is a, c, g, or t
cctcctccatctcttggtttctttccttctgatggccctgctccctctccttttgctcctgctcttcccccatccctcttcttccattcttccttctctgctagttcctnnnnnnnnnnnnnnnnnnnnnnnnnnnnnnnnnnnnnnnnnnnnnnnnnnnnnnnnnnnnnnnnctcatcttgccagtgttctgctcctgaactaccttcctcacaggttccatcccctctaccttcaggcccatcctctgcttctcccactgattttgccttgccttcactcacctctgctttgtctgtaaggtcatctgataggatctctgttttctcctttcttcctccatgcaccttcacattttcctcatttgcttctacctcttgctcctctattccatttccttttgaatcctctgctccttccgtcgacgcg

SEQ ID NO: 246211 - DNA, 256 bp, Homo Sapiens
  misc_feature (256)..(256): n is a, c, g, or t
caggtataatgttgcccaaaaatgtcagtcttctcccagcctcttgccccaccaggcctttattccatcagcctggtcctgacatttattaagtacttatgtcgctcagcattctggactgtgcctcatgctagatgagaatgtcttcaaataaaataacgtagttgtggaagaatcacttgagccccaggaggtcaaggctgcagtgagctgtgattgtgccactgcactccagcctaggtggtgggagcctgtn

SEQ ID NO: 246212 - DNA, 55 bp, Homo Sapiens
  misc_feature (55)..(55): n is a, c, g, or t
gagaaagtagtgtgaagtagtgatcaggtattgatgttagatatcctcgagtcan

SEQ ID NO: 246213 - DNA, 914 bp, Homo Sapiens
  misc_feature (119)..(119): n is a, c, g, or t
  misc_feature (121)..(126): n is a, c, g, or t
  misc_feature (128)..(144): n is a, c, g, or t
  misc_feature (315)..(351): n is a, c, g, or t
ataatgggccccaatgttttccattttacccctaaattggggccccggcggcgcccaaaacggaaatggtctaggaaaagctttctcgaaggggccgagggcggccggacatgtttttntnnnnnntnnnnnnnnnnnnnnnnngggtgagacaacatatgggactttattaaataaggtgaatttgggacaaatgaaaggtgagatgaaggcaaactactgtcaagggatgatctgagcctgaacaactcagtgaatgtgaagagaaaacaagattacatgtgaatatagatgttaactggaaaagcaaggagnnnnnnnnnnnnnnnnnnnnnnnnnnnnnnnnnnnnntttgtgagccatctcaagccatcaaaaaaacttcattctattgtaggagggaagctggaaacaatggcagagtaattttgtgttaagaattaaagtactagctccagttaggcatataaatgacaattagaagggacagaagttatggttatgtcagcagcctccagtgagctaggatataaactaagtcttttcaagctgaacaaatatataccacattcaaccccctttaagtgaagagacacatttaagtccccacaaaagcaaacttaactaccctacctatataacttactttttattgaaagtatcttgcattcatgatggatgctttctgggttttaccacatattttaatgttaaaagttaaattattctttacatgcaagtagtgtgaataattttctccacatgggaacactaattataaaaagatgacatcccacatgggttaagtgtctttttaattgaaaagctaactgtccagttacatttctcccaaaaaaccacaaaactgggtagtaactgagtctctaggcaatatatttaaaactaagaggatt

SEQ ID NO: 246214 - DNA, 482 bp, Homo Sapiens
cctaagcacttatggtatttattgttggaagattgagtaccttaatgcacaccaatgctcagatgacttgggggcacataggggactgctgtcaccatgcctcactcctgcagggaaggggctgccctactaaaaccccagcgggcccagtgctgtgtccagaacaggtccttatattactgcagcccacaatggaactactgagtaggagccaaaagaggagggagcaggaagaggtggcatttggagaggggagaccgcacccacaggtctgccacagcgcgtcaacggtatggggtacttttacagtcaagttgacttcggtgtccgcccaccatctacctttgtaggaccactgaaacaagggacatccaccacggcccacagccggggcgccacggccccaggaggatatgctaagaaaaccattccacggccgggtgtggtggctcacgcctgtaatcccagcgctttgggaggcc

SEQ ID NO: 246215 - DNA, 417 bp, Homo Sapiens
  misc_feature (355)..(355): n is a, c, g, or t
  misc_feature (368)..(368): n is a, c, g, or t
tttattttccatccagttgggcagcagggaaaggctaggtgggcccagcctgcccttccttcctccagctggctggatatttattattagccaggagaaagcagccctggaacccagactctgtctccctcttgaggtcacagatgttgaagttggaatctcgctccttcccctgactaccatcctaggctgggcctcaagactagtgaggcctgtccccaccatccctgggccttgttgtgggggctcaggaactcagagtcccagtgttgagtctggggagcactagggtctttcatagttccagggggccaggagctacagctggggctgggggagcatgtgtggtgcactnttaaggaaggganctgatgatactgggccacgttgctgggggtttcgttcaagtgggacaca

SEQ ID NO: 246216 - DNA, 729 bp, Homo Sapiens
tacggctgcagtattactaatttccatgtgtatctatctggaagtatttttaaatggcataccaaaatccagaagtttaaagatgcctataaaagtaaacaacatttatttacaaagaactctgaatatgccttcttttttaattagaaatatcttcgagacttgggtgtttgttaataactaataactggagtaagctacaggatctaaagcagccctttttacagtctagttaggagagagaaaataattgcaaatatccacttagaggcaaagaacaattttttattatcaaaaaggtttctgcacattgttgtggcaatattgtatctgtttagaaaatgggcttttccaaaagcaaacaaagataggttcctcaggtgaccaaaactgaaaatcaatatttccatgtttcattaatcaaggcataaaatacaattaaagcaaaatattttacattaaaatcttggttgtgtattttttttaaaagaagggaaatagtttagtttggggtggaaattaccagtgatttctatttttattaaaccattcactacaacaaataagtataaaaattccaattccacttttatacctatttatttgttgtagtgaatggtttaataaatggcagatttatgtccagaagtcactctattttgtcgtgtattaggggaacacattttgacatttttcgtaccaatcatcaatcatattcccttatcttga

SEQ ID NO: 246217 - DNA, 1248 bp, Homo Sapiens
  misc_feature (58)..(58): n is a, c, g, or t
  misc_feature (73)..(73): n is a, c, g, or t
tcactgtatatcatcgattagtaattttgatatttaattttcatctttatttcctggntagagaatgcagganaagatgtcaggtacataacataaaacagattgggaatttattgtttccaaagggcatggccttccttagcatcagtttgaagcttttgttatgacttagctgacttgtggcagcggggcaagcataaacaataacactgcttataaatggcaccacatcttgttaacctcccccccaaatactctctgaaagtcatgcacatacctatgggattttacacaccaccagcttaaaatgctatgtctctatccatcagaaatagtcattattctatttttaaggcagcaacaagaaaagaaaaaacacttttcctgagggatttctaaccatgtatctaatcctcccatttgggcagtataggtggtcggcttatcaggtaatccttttttcacagaaaaaccttgaaacctttgacactgacagatgtgtgtcgcaaggatacggctgcagtatttactaatttcccatgtgtatctgggaacgtatcctctcacaatgggcataccaaaatccagaagtttaaagatgcctatacaaagtcaacaacactttattcaacaaaagaactctgaatatgccttcttttttaattagaaatatcttcgagacttgggtgtccgttcaataactaataactggagtaagctacaaggatctaaagcagccactttaaacaagtctagttcaggagacgacgacaatctattgccaatatcccacttagaggcaacagaaccaattttttacttatccacaaaggttactgcaccatagtcgtggcacattatgtatccgttagcaacactgcggcttgccccaagaagcagaccaagcatcagttcctcacggtgacccacactgaacctccatattgcccctgcttccattcaatcaaggccctcacatacaagtacagccaacatattttccctgaaactaccgctgcacgccacacccagtagaacgcaacaccacaaacggccacagtacacccgccacgacgcgacccctggccgcgccctgcgggtgcacagcgacaccgaaacaccacgacgagccaaatagcgagcagccgaaccctatgggccgtggagtacgaacccgggccggatcggcaagcaccacaagaagacgcagcactcagcgcgcgggctccaacggtttggctctcacca

SEQ ID NO: 246218 - DNA, 999 bp, Homo Sapiens
  misc_feature (668)..(899): n is a, c, g, or t
  misc_feature (907)..(907): n is a, c, g, or t
gcgaggagagctgagctgggccacctggtctcagccacctgttcttggctccccaacagactctgcactgcaccatgggaggctcctgggatgtttggaagaagaaacgggcttctccttgagggggtagtggagggattttgtccccagcagtggcctctgagagtctttcagtgcctggtggggcagggcaggcctcttggagcacctcctccctgggtcagggcctggatgcaggtgccaagctctccatgtggtgcatgttgacccagccacgtggtgttgtcaagcaaacagcatcggcaggagacctggagctgaggacttggccctgcctgcactgtatgccattccttggtgatgaaatgctgtatatttggttttgaaaaaatgaatgtgctgggtatacacagcagaaagggtactgtccactttttgtatatcagtgtgaaaaatatttcccctagaagtagaaaaggctcatgtgctgatggataattttgagtcttctccattctctgtgaatgacccccttccccaggcatccccacctcctacctcgttcttagagcaaactaaagccaactgagggtgcacacacagccatgagcccacctgcccaggactactcccatctgcttcttcccgtccccgtggaagtggccccnnnnnnnnnnnnnnnnnnnnnnnnnnnnnnnnnnnnnnnnnnnnnnnnnnnnnnnnnnnnnnnnnnnnnnnnnnnnnnnnnnnnnnnnnnnnnnnnnnnnnnnnnnnnnnnnnnnnnnnnnnnnnnnnnnnnnnnnnnnnnnnnnnnnnnnnnnnnnnnnnnnnnnnnnnnnnnnnnnnnnnnnnnnnnnnnnnnnnnnnnnnnnnnnnnnnnnnnnnnnnnnnnnnnnnnntctttccntctttctccgggccattgtaagatatgccctcccttctccttcacctttccacccatggattgtcaggttttccttgaaggcctccccagcc

SEQ ID NO: 246219 - DNA, 468 bp, Homo Sapiens
gacagtgcttatgacattctttattcaattcacatagaaaagcatgcagtattaatgtaaaacagtacaatattaatgtaaaatgttcagtgcacattaaacagcatacatacccatttttaaagacctatataggcataccaaatacgtttagaacaatacactttttcagagcctaaattaaaaattgtgcttacctcttacctatcttcaccccctcaacactcttcacagaaaagttttgtcctatataaaagatattctatcagccaactgaaacctctttttcttaagtatggaaaacacagcaagcaaaaatgctaccatgcatagtttccacaaagaacaggaacatgcaaacaagaaacatactactcaaaagaaaactcccctggaatgcaagtggatcaagaacttggcgatgagctctttcaaacctgttacatctggaacaatgaagctatgatg

SEQ ID NO: 246220 - DNA, 638 bp, Homo Sapiens
gcatctgcaaagttggcatcgtagctttatttgtgcgctgtgagggtgaaggcaatctatcatccaacttttctttccctgatatgctccagaataaagaggggtgggtggaacagccgtgaaccagggccaggtgtgggctgtgtggtctggcaggagtccttagggctatggcccatgtgtgcacatcctgtttcagaagaggggggccagaggaaaaggggccagcaggaccgggcaactgttaagctgaaaggctgcaagtctgatgggacacagacttgggcagaaggagagatgaagtcaggacaggacaggacagggcagggctgcggcttcacagacttagggaggcagagctgccggggagaagttgggatccattcttcaggcaagcttgtgctttgctctcctcaaagtgggctcctctgcttaatgagcgcttaatctctccccaggaaagcaggagaagagaaaacccaaaatgagaaggaaaagttctgggctggactgtcggaacctggttgtctgaaatagtccacaaagaacatgatttctcagttatctggcattgcttgttgcagtcccgctcccacgaccttagtgtcctggaaggcttaagggcctgctggtatccc

SEQ ID NO: 246221 - DNA, 414 bp, Homo Sapiens
taaatgtaaaccaagtttattttgctttttaagtagtgttcttaaagcactacagcttggtaaacaatgtaaattagtttaattcatctcaaaagcctgagttgtttcggttttaaatgagttgctaaaaagatgcctcctattctaacaggataaatattcttaaccatttcactttgagttaatgaaggctcacaaatgagcaacactcctcattgaggaaaacaaaaagctgttgtcgacaagcgacagcacacacacacaaaaacaaaaagaactgtgtaaaaataactaactgtgttcccatatttttaaagtcgctttacaatgggatgatatgcacatgatcttgctgcaatcttgccaaagagactttgtaatacatgtagtctagacaaacgattcagtccaaga

SEQ ID NO: 246222 - DNA, 846 bp, Homo Sapiens
  misc_feature (224)..(224): n is a, c, g, or t
  misc_feature (292)..(292): n is a, c, g, or t
  misc_feature (757)..(802): n is a, c, g, or t
cgcgatttttgttcttatgcgcgcccccttggaggcgcgtatgggcccccgggagcgtgttatgccgttggttccgggccccctgtgttgcaccctgggcaggcccccttgtcaagggcttctgtcgtgtggcaacgggatttgcctgctctcttgacgcattgttcggggccccttttttcaccaatcctcgggctttttttgcccggggcccagggcgtctntctgggcgttccactggctgtggcacccgtgtcccggccccccggttccggtgcagcctctggatgcnggaggtccccaatcgtggccccttcgacctgcgcgtccgcgctttggcgctacggtttggcccgtcggcttcggccgccatcggagccctcgtactcggtgctggtcttctcttctctctccggtctgtgcgctcagtggtggcttcgagctggagggccgcaggtgaccctcaccactcatgccccctttggcttgggggcccctttcaccgttcctttgaagcaggtatcttgcatggcccacccggggtgaagtccctgccatgctacctctgagaagtccaaggccgacgcttctatttcctcttggaccaaactggacacttcccttacaccaaactctttgacaatactgtgggtgcctaccggagcttgtgaagaaatgacctcaagtcactcacctctccacagaggaggataaaaactgaaaccttggggagccaggtgtggttggttcacacctnnnnnnnnnnnnnnnnnnnnnnnnnnnnnnnnnnnnnnnnnnnnnnagcccacggctgggcaacatagcgagaccttgtctctatttacc

SEQ ID NO: 246223 - DNA, 1054 bp, Homo Sapiens
  misc_feature (942)..(992): n is a, c, g, or t
aggaccacagatgacaaagcggtggtcttgaaaaggatccatgaagtccatgtgaagatggaccgcagcctggagtaccagcctgtggaatgcgccattgtgatcaacgcagccggagcctggtctgcgcaaatcgcagcactggctggtgttggagaggggccgcctggcaccctgcagggcaccaagctacctgtggagccgaggaaaaggtatgtgtatgtgtggcactgcccccagggaccaggcctagagactccgcttgttgcagacaccagtggagcctattttcgccgggaaggattaggtagcaactacctaggtggtcgtagccccactgagcaggaagaaccggacccggcgaacctggaagtggaccatgatttcttccaggacaaggtgtggccccatttggccctgagggtcccagcttttgagactctgaaggttcagagcgcctgggccggctattacgactacaacacctttgaccagaatggcgtggtgggcccccacccgctagttgtcaacatgtactttgctactggcttcagtggtcacgggctccagcaggcccctggcattgggcgagctgtagcagagatggtactgaagggcaggttccagaccatcgacctgagccccttcctctttacccgcttttacttgggagagaagatccaggagaacaacatcatctgagcatgtgtgctctgcactggctccactggcttgcatcctggctgtgttcacagccttgtttgctgcttccatcttccccagtactgggccaggccttctccccctccccaatgtcctctcctctcaggcaggcccttgcacccatatggctgggcaggcacaggccagggaggccgaggccaataccgaagtgatgaaccgggatcctagggactggtctgttaccccatgctgatggcnnnnnnnnnnnnnnnnnnnnnnnnnnnnnnnnnnnnnnnnnnnnnnnnnnngaactgggcttccttccctgggccttgacccaggaaaggactggccctctgaccccccttta

SEQ ID NO: 246224 - DNA, 985 bp, Homo Sapiens
gggcgaatcgcggccactgcaggccatgggagctgtgtggacttcctcatccggaagggggccgaggtggatctggtggacgtaaaaggacagacggccctgtatgtggctgtggtgaacgggcacctagagagtacccagatccttctcgaagctggcgcggaccccaacggaagccggcaccatcgcagcacccctgtctaccacgcctctcgcgtgggccgggcagacatcctgaaggccctcatcaggtacggggctgatgttgacgtcaaccaccacctgactcctgatgtccagcctcgattctcccggcggctcacctccttggtggtctgccccttgtacatcagcgcagcctaccacaacctccagtgcttccggctgctcctcctggctggcgcgaaccctgacttcaactgcaatggtcctgtcaacacacagggattctacaggggctcccctgggtgcgtcatggatgctgttctgcgccacggctgtgaggcagccttcgtgagcctgctgggtagaatttggagccaacctgaatctagtgaagtgggaatcgctgggcccagagtcgagaggaagaagaaaagtggaccctgaggccttgcaggtctttaaagaggccagaagtgttcccagaaccttgctgtgtctgtgccgtgtggctgtgagaagagctcttggcaaacaccggcttcatctgattccttcgctgcctctgccagaccccataaagaagtttctactccatgagtagactccaagtgctgcggttgattccagtgagggagaaagtgatctgcagggaggtggacaccgagccctgagtgctgtgctgctgctggtctcctgatggctgttgctgcagaagatgtcctcgtagactgtcattgcctcctcaggtgcctgggccgctgaacagtacttgggtcattgtcagctgagaggcttatactaaagttattattgtttttcc

SEQ ID NO: 246225 - DNA, 360 bp, Homo Sapiens
gacttgtgatattactttaggggcattcaaggctctgctgtcccacgcgcttactttgccacatggcacagtatctgtgtcacagacgcactcttcccaaggacaggtccaggcctgtgtcagtcactgcttcatcccagcacctagcacagggcctgactcatggtgagctggccccgagggtggggacagatccccgaggcgaggcgtcgatggctgcggtctgaggtctctagcggggggccgatgaagctgcttctgcgaagttgggaacccgcgcaccagttttagcagccgcggaaggaagtgctcttgccggggcgaagcagcagagttcggaagacacgcgaccagggcccc

SEQ ID NO: 246226 - DNA, 469 bp, Homo Sapiens
ttttccctgcaacttcagacactcccagaggactcggactttttcttctgcacttttttggaaaatcgccaggtgccaaaaggtgcattttaaagcgctgactgtaaatgctttatttctttgattagtaccactagtctatgtgggcagcggcattcctccctggagcactcagctaggcggttccgtccaggagcttgaaagcatcccagcggtgcacctgttcagtctgaggacctcaagcttgggtcaggccagcatgttttaggtatggatgtggtgacttaaagtacttgattgtcttgatttcaccctgaaagctttggcaaaccaagtttcaacccttactttaaaaatctgacactgctttactccatatcaatttggaagcttctaattcataaatatacctaaacgttggcattttatctctccaggagttattacacatttcttcctttttagcaaa

SEQ ID NO: 246227 - DNA, 689 bp, Homo Sapiens
  misc_feature (164)..(239): n is a, c, g, or t
atttgggtgggagagattccacaggccctatgttcactggccacaggattcttccttggagaacacggtattggccactgtttcccttaacctactggggcccgccggcgccaaaagagatggtttagaaaactttttcgagggccgagggcggccgacaaggnnnnnnnnnnnnnnnnnnnnnnnnnnnnnnnnnnnnnnnnnnnnnnnnnnnnnnnnnnnnnnnnnnnnnnnnnnnntaggaaaagggactttattaaagaaaagtcatctgtgagtgactagttaaattagcatgcttgacattaactctgggttgaaacctacctccgtcaaataacaagtggactctccaagcaaatgtctacacggcaattcaagcagcaactcaagagcccagaggagcactggagacgaggccatcactccacttcccagtgcgacaaccacttttttgtaaacacctgtcagatgctaaaaatacggccttacacactaccgtcaccaaagtttataagcaataagatcagagagcaggagcagctgcagcacctctaacagtccagggctgaggcgctgaaggtgagtttccaggtgaggtccactctgcccggtctcgggccgcaccagggggctgctgtggcctgatccgagtggaacaacgccacctacgtgcgatttagtgtctg

SEQ ID NO: 246228 - DNA, 1346 bp, Homo Sapiens
  misc_feature (169)..(169): n is a, c, g, or t
  misc_feature (316)..(360): n is a, c, g, or t
  misc_feature (426)..(435): n is a, c, g, or t
  misc_feature (590)..(721): n is a, c, g, or t
cgcgccccaaaggcggcgcgccaaaagaaggtgtggtccctaatattatccccgccttgggggggagtattttaccagggtgttctccctccacacctccgcccgcttttgtgtcgtggagagaggggttcttacacccatattttgtggcgcgcgaaaaagaacgcgngtttataataggacagatattctctcccatcacccatggtttttctgttctctgaatatattagattttgctcatgcgtgcggggggtgggggcggtgggaaattattcggaattattccggagagcgttcccgctttgggagcttnnnnnnnnnnnnnnnnnnnnnnnnnnnnnnnnnnnnnnnnnnnnnaagaagctcacttttttgggatttttgtttacaaaaacccttctggggtttcccccccgggggggnnnnnnnnnnggggggaggtatccaaaccctctttctctggcgccagggttttttttgggaaaaaaactatgtgccccagtttccttttctctttagggggccgcgcgcgcaaaaacaaaaggttttggaaaaacttttgagggggcggaggggggcggacaagnnnnnnnnnnnnnnnnnnnnnnnnnnnnnnnnnnnnnnnnnnnnnnnnnnnnnnnnnnnnnnnnnnnnnnnnnnnnnnnnnnnnnnnnnnnnnnnnnnnnnnnnnnnnnnnnnnnnnnnnnnnnnnnnnnnngaaattttcaaaattatgtttattaatgttttattatacacattatattctcttagaattgggggaaaaggaaaaccccactcaagtgaggtaacaaacttgccatcttttacaaaatttcattagaactgacaatgttatggtgagtccttaattcctgagaatttgaattattaagttttctgtgaacttaaaacaaacgctcacattaatttttaaattacagtatgtctgaaaaaataaaattaatgttaatgttatcaagaaaaatcatcatccaaatgtacatattaacctattagatgtgaatatactgaagccctgttgctctgcagtttgacaccatttaaattcgtttccaggatcttatttcaaatatatgaacttataatttatccagatagcagtgacattattttgacctaaaggaaaaataattgtctgtcattttcttctcaactgtaggtatccagggagtcagcatgtgaactctatctagtattgataaaataattaatttacatgtgtagggataatgaacacagaacatgtgattctcttctagtaacaatttctatccctcaataggagatgatttcagagaggtggaggagaaaaccaagga

SEQ ID NO: 246229 - DNA, 1076 bp, Homo Sapiens
  misc_feature (510)..(518): n is a, c, g, or t
cgcgttttctcgcgcatataactgtttgtaatggagacagagaccccgtagccaggcctgcgtggcgaattccgcacgaggggtagggggaggcttggcctgaaactaaccactgagtgaattgcactgcaggttttacttaacgggaattccttatttgggatgtcaagagggcagctgcaaactgaaaaacaatccagtaaatgtactttgttttatgtattgtagcaggcaattaactactaaataatagctttgacatttgcaattgttgcatagagactatttttgctagaagatgattagctcttgcctttattttacagtgcttagtgtgataaacttctagtcatgtttcctatccaagagaccagttaatatatgtacataaaccacagaaatagtataacacactatttttaaattatcgttttcctacttaaattttgtttagcttaagacttcttaggacatttgtaaaagcaggttaaatttaataaggtttctgannnnnnnnngtaaccggagatagtttttaccagtgaaataacatttcagctaaataaaacatcgctaaataattgatatttgatgaaaatctgctttgtataatcttctgtaaattatccttgttctgaaaaaggcgtaattgccctaatatttttaaatccttatccttttttcaaacactgacctattgacaaaaccataaatcttcattttcccattgcaattacccaccccttttaaaacataaatgcaccaaccaagcaaatggaatttacgaaaaactatgctgggaattaagggcccattaaattgaaaccccttgcgcatcacttaattcacatttccaatggtgaatctaggggaaaactttcgggttcataaaaacacttccctttttcgatcaactcgcggactccatcatgtcgcacgtctaggcgatttctattaggccggtacgccactaagcgacgggagagggcggtggcgaagagtggcgcatggacctggcgcccacttgaacacccccttatttccttggaccaaccgctcgaaacgaattctatccg

SEQ ID NO: 246230 - DNA, 439 bp, Homo Sapiens
  misc_feature (382)..(382): n is a, c, g, or t
aagggtgaggatgggtagaaaagaattttattgagcaaaagaacagctctcagtggagaggggatgcagggagtggtccccaacccccacagcagggtgatttctctcctcactgcagctgagtctgggtcttttatgggctcagaataggggaatacacgttgactgatttgtaagtatgcaaaggcaccactcaaaaggtgggcacagcagtgtaaaaaccaattaggaaagggcaggtatacgtaaaataggtgaagggttgggatcaatcggaggaaagcacaccaaatggggaagacaggttctcaattcagtatgaggatttagccgggactgtcttcagctttaaggttgggtttcaccagggtacccacccctnttctgcctggggctttgacttgcctcctgccactttctttacctgaccgggtttcca

SEQ ID NO: 246231 - DNA, 1006 bp, Homo Sapiens
  misc_feature (94)..(284): n is a, c, g, or t
  misc_feature (299)..(315): n is a, c, g, or t
  misc_feature (449)..(494): n is a, c, g, or t
cgccagtgggcctcaccggcctgtaattttttcaacatttttggggagcctggaggaaaggtgggatccccttgagttctagggagtttgaccnnnnnnnnnnnnnnnnnnnnnnnnnnnnnnnnnnnnnnnnnnnnnnnnnnnnnnnnnnnnnnnnnnnnnnnnnnnnnnnnnnnnnnnnnnnnnnnnnnnnnnnnnnnnnnnnnnnnnnnnnnnnnnnnnnnnnnnnnnnnnnnnnnnnnnnnnnnnnnnnnnnnnnnnnnnnnnnnnnnnnnnnnnnnnnnagactccatctcagnnnnnnnnnnnnnnnnntagaatatccctgtagctactactgagtgagcacctggtctgtgctaggtcacatgttatttcatttgctcatcactacatgtgtggtagggattaatatgtccctttctcagatggaaaaacaggctggcagnnnnnnnnnnnnnnnnnnnnnnnnnnnnnnnnnnnnnnnnnnnnnnctctttgtcctttgggcccttggtggagaacagtgcatccttcagaacagtgcatcttaagcagctcctatggctcatggtatcccccagagtctgccgaggaccctcaaactccctcctcatgcctggtgtgctgtgcctctcctcacagggggccgtctgccctgcccagagctgtgtcctgatgccgtgttcaggctcatggagcagtgctgggcctatgagcctgggcagcggcccagcttcagcaccatctaccaggagctgcagagcatccgaaagcggcatcggtgaggctgggacccccttctcaagctggtggcctctgcaggcctaggtgcagctcctcagcggctccagctcatatgctgacagctcttcacagtcctggactcctgccaccagcatccacactgccggcaggatgcagcgccgtgtcctctctgtgtccctgctgctgccagggcttcctcttccgggcagaaacaataaaaccacttgtgcccactgaa

SEQ ID NO: 246232 - DNA, 384 bp, Homo Sapiens
ggaactggtattctggtgaaatactttactattttgtaaaaagttttacaaaaaattacaaattaaaagtatcaaccctctgagttcaaagcagcattttgaaaatgaactggtagttaatcctgtaaccacccttagagttgtaagtggcccttgggaatagggatggatgggttccacctgtttgaaatcctcgaaaaccctcctaactccctgcctgtccccctccccgtcagcactgtccttgggaataaactgtcctttgtaagagtggtgacggtaaaatgaatttcagatgggttacacacactatcacttgtctacctgatgatccaccactaagaccaatgcccacttctctgatgctacccttcttggtgggat

SEQ ID NO: 246233 - DNA, 342 bp, Homo Sapiens
gaaggacccaaaggcatttaattattgaacacataaaaggaagtatatttaaaaaaaattggtcaaactgtcctgttagttatcattttaaaggaatttacagggctgttatagatgattcttttggaatatttcagtttatagcaaatgcctaaactggtttcttcattgcacagtattttctcttaaaatgggtgctttaaaacaattacatacagattaaaaatcatttctttgcttaattaaaacgttaatactcttagacaacacagatctgaaatggtgcaaccagcaattccccccaccccaccttacaacaaattaaattgagacaaaattacc

SEQ ID NO: 246234 - DNA, 836 bp, Homo Sapiens
  misc_feature (410)..(429): n is a, c, g, or t
aatcttgaagatttttaaagaataaatatttttttgtaattaaacattatgcaaacacgtgccacgcttgctttgtccatgcatatgcgctatatacaattttgaaaaatactgtgttgtcctcttgttttaaaagtcatatacaaagtttttatgtttttcgtttgttgaatcctcttgctgcctacccctttccccatcccaagattttctttacaaggaactaagcatcattcactcatgaccttggggtatgagagaaagagagtcagtctgtgtgtgggtgtatctgtatgtgtaggggaggaaggggaagaggtcctttaccaaagtacaacaaaatggctggtttgaacatgaaaagcagtgtcaaggagctgtttgaaattttaactgtactacactcaggnnnnnnnnnnnnnnnnnnnnggagtcagctttgagaatgaagctacgttacaagttaaagttggagggcttttagtgtgtctgtcacacttttgttggcggcctagaatactgttgtacaatggtttatctacctttttattacaatataatttacttaaactctccattaacaaaacaattctggtactacagaccagtggtgtcagaataggcttagtgcctccttgtttgtgtttgttttgttttaattgcatgagcactctagatggtaaagttttcagagttcattttatgcagggccattctcagtcctcaatgtactcccacagatctttttcatagccttcatgcacatgctgtaacaaaacccttcgtcgactctcacagtatctgtacttgtcttgtactttctgctttatatcccc

SEQ ID NO: 246235 - DNA, 389 bp, Homo Sapiens
gggccatcagttttactaatcttctgtgaaatgcatagatatgcgcatgttcaactttttattgtggtcttataattaaatgtaaaattgaaaattcatttgctgtttcaaagtgtgatatctttcacaatagcctttttatagtcagtaattcagtataatcaagttcatatggataaaatgcattttttatttcctatttctttagggagtgctacaaatgtttgtcacttaaatttcaagtttctgttttaatagttaactgactatagattgttttctatgccatgtatgtgccacttctgagagtagtaaatgactctttgctacattttaaaagcaattgtattagtaagaactttgtaaataaatacctaaaacccaagtgt

SEQ ID NO: 246236 - DNA, 405 bp, Homo Sapiens
  misc_feature (351)..(351): n is a, c, g, or t
  misc_feature (361)..(361): n is a, c, g, or t
cattcaaggagcatttattgatcgtctagtatgaaccagccccagtcaccaggcattgaggaaatcattggtaagtaaaagaggcaagttacctctcaacacagattttgtttttaaacctcacagtcttgcaggtgtcattgtcctcattttataaacaagaagagtgaagttcatacatggtgagcaggttgttcaaaagcacacccctaagaagtgacagggccaggactcatctcttcccttctcaacacttcctctcctccttgctgggtggggtggcaggcagagggagaacctgcaaattaacattgtgtcattatttgggttctgaagtccctagatggtctnttatggtctnttatacttatggagagaaataggtggaaatatgtctcctccatg

SEQ ID NO: 246237 - DNA, 377 bp, Homo Sapiens
gagtgtgtctattttatatttaaacccagctgtttggaagcaattataaaacttctcccacacaccaagaaccccagaactccccacccagaaggaaaggagacttagggtcctggtcccacagtctttaatgctgtagagtaggagaggggacaggcggagtgagggtggtaaaggactactcttgtccctgagaaggcagaggtgctggctggcctgcccttccccaggcttggataccttgggcctttcccttattcctgcaccaacagcaaactcagaaggaaaaaacaaaacaaaactctaaaggtaaacgcggtccttctccctctctcatgtggctcctcctgcccctacctgggagaaggttcaagtcc

SEQ ID NO: 246238 - DNA, 500 bp, Homo Sapiens
  misc_feature (337)..(376): n is a, c, g, or t
  misc_feature (407)..(407): n is a, c, g, or t
gcgtccgctgcagatgctggctacagaaacatcattcaagatgtccagcaaagggagcagcacagatggcagaacagacttagctaatggaagcctgtctagcagtccagaggagatgtctggagctgaagaggggagggagacatcctcaggcattgaagtggaggcctcagacctgagtttgagcttgactggggatgatggtggccccaaccgcaccagcacagaaagtcgaggcacagacacagagagctcaggtgaagataaggactctgacagcatggaggacactggtcattactccattaatgatgaaaatcgagtccatgaccgctcnnnnnnnnnnnnnnnnnnnnnnnnnnnnnnnnnnnnnnnncagcctcggcgccgtggtacagcgcaacgangacgaaccgtgaccaggactcatcagatgatgagcgggccctagaggactgggtgtcctcagaaacatcagctctaccccgacctcgctggca

SEQ ID NO: 246239 - DNA, 819 bp, Homo Sapiens
  misc_feature (23)..(23): n is a, c, g, or t
tacccggagaacccacccccttntggggaattttggttctcacagaaacccgctctggggcggtgcccgccccggggggcgttttgttatatgggtggagggaagttccccaagctccttggttcctggtccccggaatttccctttaggaaccaacgctaatggcccatgttcccgttaccctacgggggccccgcgcgcccaaagaaaatggttctgaaaagacttttcgaggggccgagggcggcccgccaaggatatattttcgtgctttgtggtttcggggaatgtaacaagcatttattaaaaactgtgctgcccaaaccatgttagaaactagccaggtgctaggagtctaatcaaggcaggggcagggtaaaaacatgggaatattacatggacaagcttgtctagcatggcagtctataacccttgaggggtttacataaaataaaggaacatttttgtggctcaggctccccagagttctctttatgtttgggcagagactgccccatcccttagtgatcccaccttagagccaggttttcaaagtcatttctcccagtatatctgtctctgtatgcaagtttcctctggttgccttgagcaaaaacaatcatccaactcaaatttgctagccctatgctgggccagcccacgttcccgtaggacatctgtaggctaagtaagccccgggtgatctgtgtcttggtcttcctaattccgttgcagctcttcctctctcagccaggagtggaaagtcctaagcctccttccattcatcccattatcaaggtgatggctctccctcccccc

SEQ ID NO: 246240 - DNA, 544 bp, Homo Sapiens
ggggcagaagaggaagtcagagagatttctaagcatgacacagcattggtggctcaaagatgggggccgtggaaaatgtgagaagaaatgaattcaaccaacagtgagccccagggtgtttttcctgaatgtgccatttgattccatcatggagcggctgactctgagaagaattgatccagtcactggggaaaggtaccacctcatgtacaagccacctcccaccatggagatccaggctcgcctcctgcagaacccaaaggatgctgaagagcaggtcaagctgaaaatggacctgttctacaggaactcagctgacttggagcagttgtatgggtcggccatcaccctcaatggggaccaggacccatacacagtctttgaatacatcgagagtgggatcattaatcccctgcccaagaaaatcccctgatgggttcagagccaggagcgctgccccagggaaagagttaatcccctggccccagccccccagcctcggcacagctccccctaaaaagccaataaggcctgctggatacag

SEQ ID NO: 246241 - DNA, 334 bp, Homo Sapiens
ttttttcctctgccacaaaagacctttaatggcctcctatttattgttcttttgttcatttgttagagttgaatgaactataataacttgtctgacataataagaatgccacaggtataacagataaacctggcaggtggtccaggaatgagagtgtcacaaaataatcactcaacacaagggccacagacctggagattcttcccagccatccctcactcctgccccaggacacaacccatgcaggcccccattccataggaagaggcaggtcccacagtgtctgtggctagaccttaacactgagcagagatgcccgggaagatggcacttc

SEQ ID NO: 246242 - DNA, 1351 bp, Homo Sapiens
  misc_feature (696)..(696): n is a, c, g, or t
  misc_feature (1112)..(1112): n is a, c, g, or t
  misc_feature (1126)..(1126): n is a, c, g, or t
  misc_feature (1172)..(1172): n is a, c, g, or t
  misc_feature (1190)..(1190): n is a, c, g, or t
  misc_feature (1207)..(1207): n is a, c, g, or t
  misc_feature (1314)..(1314): n is a, c, g, or t
agcgaggcctgggtggcgattcggcacgaggaccactggacgaggaggagacgccgtacctggtcaagctgcccgtggcccccgagcgcgtcacgctggccgacttcaagaacgtgctcagcaaccggcccgtgcacgcctacaaattcttctttaagtccatggaccaggacttcggggtggtgaaggaggagatctttgatgacaatgccaagcttccctgcttcaacggccgcgtggtctcctggctggtcctggctgagggtgctcactcggatgcggggtcccagggcacggacagccacacagacctgcccccgcctcttgagcggacaggcggcatcggggactcccggcccccctccttccacccgaatgtggccagcagccgtgacgggatggacaacgagacaggcacggagtccatggtcagtcaccggcgggagcgtgcccgacgccggaaccgcgaggaggccgcccggaccaatgggcacccaaggggagaccgacggcggggatgtgggggctgccccccagacagcgcgtccaccgccctcagcagcgagcttgagtccagcagctttgtggactcggacgaggatggcagcacgagcaggctcagcagctccacggagcagagcacctcatccagactcatccggaagcacaaacgccggcgggaggaagcagcgcctntcggcagggcggacggggcctccctccttcagccagcataacccgactcccaccatgtccccttcaccatcgttcactgtcacgcctcaccatggaaagacatcactttctgggcatcagcatcgtggggcagagcaacgaccgtggagacggcggcatctacattggctccatcatgaagggcggggctgtggccgctgacggccgcatcgagcccggcgacatgttgctgcaggtgaatgacgtgaactttgagaacatgagcaatgacgatgccgtgcgggtgctgcgggagatcgtttcccagacggggcccatcagcctcactgtggccaagtgctgggacccaacgccccgaagctacttcaccgtcccacggggctgacccggtgcggcccatcgaccccgccgccctngctgtccccacacngccggcactgaacaggagccctgcccctgctaaccaagctggaagnagccgccgcctgcacggntgaagcagtgaacatgnagcggccgtccgtccggggttcatgtcagcttgcccaagacttcgtgcacctgggagcatcccgccgaacccgccatgttggggtttcaagaatccacccattcgcnccaatggcccggtccaatcggggggccggggaccttc

SEQ ID NO: 246243 - DNA, 127 bp, Homo Sapiens
cgcttcattggctttattaccatgtaacacaagctcacagcctctaatgttaccaaccttatacacaaatggccaaacaagaaattgtcctttccaaaagataatttattctggtttcccctcttca

SEQ ID NO: 246244 - DNA, 876 bp, Homo Sapiens
gggaaggtcccctctacccctcccaggcccagagctagctgactgtgtatgagcctgggagaatgtgtctcctccacagtggctcccagaggttccacacactctctgaagctccttctcccacactgcacctactccttgaggctgaactggtcacagacaaactgggatccagcacagtccagcagttctcaaaatgaggtcctcaggccacagtgcgtgagaacttgcttggctgtttgttaaatgctaattcttgggccccatcagagctactgcatcgaaacctgggggtaaaacccaatattctgcatttcttatcaaactctttgggtgataactaagtgtctgaagaggtgactatttcctgacagaaggacccaaagagggaagcaggacataggtaggcagacagacacagggccctgtgcctcaagacacctgtttattggggacacgactctgcaatagggatgacaggaatcgtaccaaaaatagcgacgtctacagggcccctgatggggctagaagggtacagtgccccccaccctcaccccttgtacaaaaataaactctcacgcctatggaccagcaaagactggcagagtggctcctcaacagggacacaaaccttctctgccagcccagggaccccgttctttgaccctcacctctgccacttctaaggcactgtgactcccttgggctgggagaaaacacgccagcccaccctcctacgcccgccgcgccttccacctctggtccgcctggggctgggatatgggtcccacgctgccccctgctggcttctctacccaactacctctagcgctcccccgctccggcggggtaagctcactaagctaatcgcccccc

SEQ ID NO: 246245 - DNA, 678 bp, Homo Sapiens
ggattgatgagagaagatgccacttacccaagctttagagaatccctagtggaagattatatgataaactttcagtcctgacataacactagggcatttctagagtgtcattgctaaaacctcactgaacagacgcagccaaggtctgtgttcagcacttggtctctgttgttacgtaaaataataagcatttaaaatagtttacagatatttttgaccagttccttttagagattctttcagagaagaaaccagatctgacctgtttattgttggcgcttgttgaaaacgagctttctttcccatgatagtgcttcgtttttgaagtgttgaagctgtgctcccctgtaaatcgtggcaggagagattaaggtaattacaacactcagttctatgtcttacaagcactttgtcttgtctctgcaagaaaattcgattccagtcatttcccataaaatacagacattttaccaacataatatgctttgattgatgcagcattatgctttgggcagtattacaaaatagctggcgagtgctttctgtatttaaatattgtaaaaagaaaataagttataactgttataaagcagaacttttgttgcattttttaaactgttgaagtcactgtgtatgtttgtttggtcaatgtttcccgcagtatttattaaaacatac

SEQ ID NO: 246246 - DNA, 310 bp, Homo Sapiens
  misc_feature (157)..(157): n is a, c, g, or t
  misc_feature (184)..(184): n is a, c, g, or t
ggggccagggctaccccagaacttttaactcttcccaggacagggagcttcgggcccccactctgtctccttgcccccgggggcctgtggcctaagtaaaccatacctaacctaccccagtgtgggtgtgggcctctgactctaacccacacccagncgtagggggagtctgagccgggagggnctcccgagtctctgccttcagctcccaaagtgggtggtgggcccccttcacgtgggacccacttcccatgctggatgggcagaagacattgcttattggagacaaattaaaaacaaaaacaactaa

SEQ ID NO: 246247 - DNA, 566 bp, Homo Sapiens
aaaatcaagaaacaatttattgaaaaagagtaatgctttatacaaattcctattataaaaccccaaaatgtctattggtctgtttccaggtgtggtagaagaatataaaaagatcaaaattggataaattctattgtaacaatttcgttggtcattttgggccataaaatttttttgtaatgtttggtaactgatatccacatggaattacactcacacatcatgaagatctatgtatgtggcaaaagccatttaaattttaacttccaaaagcatatattctcaggtttggaaggcacactaaaatttattaggtccaattcctcataagacacggtgggtgactttccttgtgtagtttattatgaagtaccatttccaaactaactatcctagcagcgtcagctgccagctaacagcaagagctctgagggcatcactgaacagatagcaccttatgagttattatgattcaaaaatctcccttgctgttggatttaccaacacgtaggcttttatttcttcgccattacatgcgtgtttagccacagaaagcatcgggcccc

SEQ ID NO: 246248 - DNA, 541 bp, Homo Sapiens
  misc_feature (48)..(105): n is a, c, g, or t
ggggccgccgttgatccggtgctgcagtgaggaggtggttcttgcccnnnnnnnnnnnnnnnnnnnnnnnnnnnnnnnnnnnnnnnnnnnnnnnnnnnnnnnnnnggggggactcggcttgttgttgtcggtgacttccccctccccttcaccacttcccctccccgccgccgctgcagtggccgctccctgggccgtaggaaatgagcgataacgatgacatcgaggtggagagcgacgctgacaaacgggctcatcataatgcactggaacgaaaacgtagggaccacatcaaagacagctttcacagtttgcgggactcagtcccatcactccaaggagagaaggcatcccgggcccaaatccctagacaaagccccagaatatatccagtatatgccgaaggaaaaaccacacacaccagcaagatattgacgacctcaagcggcagaatgctcttctggagcagcaagtccgtgcactggagaaggcgaggtcaagtgcccaactgcagaccaactacccctcctcagacaacagc

SEQ ID NO: 246249 - DNA, 505 bp, Homo Sapiens
cccaatgactcccaagtcctactcgcaaacaaatacattgtagaaaaaagtttaattgctggttattgtttgaatcttgaaatacaattcttcactgatgatactggtataaaatggtggttattaattcatgctagcacaaccaaaactaatttaacattattggtaaaaatgagtcatttttgaatctctattaaaatctgaacacataaacaaatctgtgctaaaactggaactgccttctcactctacatataattaaacttccagcttcaaccatctgatgttgaaatctaaagcacctccatgagttaaatgtccccgacaaaccatgtagatggacaaacaagattggtggtctttaattgctggcgacagaaaaggctgcagtttagtacttaaacctgcagttagtggtcaactttctatccaggcagagtaaactaaggagagctatgaaatatcaaaagaaaactagaggccaggacaaagaggcaatgtcacc

SEQ ID NO: 246250 - DNA, 923 bp, Homo Sapiens
gggacccacgaagcaggcgaagttcattgttctcaacattctagctgctcttgctgcatttgctccggaattcttgtagagatattacttgtccttccaggctgttctttctgtagctcccttgttttctttttgtgatcatgttgcagatggctgggcagtgctcccaaaatgaatattttgacagtttgttgcatgcttgcataccttgtcaacttcgatgttcttctaatactcctcctctaacatgtcagcgttattgtaatgcaagtgtgaccaattcagtgaaaggaacgaatgcgattctctggacctgtttgggactgagcttaataatttctttggcagttttcgtgctaatgtttttgctaaggaagataagctctgaaccattagaggacgagtttaaacacccaggatcaggtctcctgggcatggctaacattgacctggaaaagagcaggactggtgatgaaattattcttccgagaggcctcgagtacacggtggaagaatgcacctgtgaagactgcatcaagagcaaaccgaaggtcgactctgaccattgctttccactcccagctatggaggaaggtgcaaccattcttgtcaccacgaaaacgaatgactattgcaagagcctgccagctgctttgagtgctacggagatagagaaaatcaatttctgctaggtaattaaccatttcgactcgagcagtgccacttttaaaaatcttttgtcagaatagatgatgtgtcagatcctctttaggatgactgtatttttcagttgccgatacagctttttgtcctctaactgtggaaactctttatgttagatatatttctctaggttactgttgggagcttaatggtagaaacttccttggtttcatgattaaactcttttttttcctgacaaa

SEQ ID NO: 246251 - DNA, 761 bp, Homo Sapiens
  misc_feature (149)..(172): n is a, c, g, or t
  misc_feature (643)..(643): n is a, c, g, or t
ggtacttgacttcttaggatgggtagctgaaaagaccaccattttaagcatttgagaattcttaaatatgaaatttattcagaattgaagatggtgacctattcagagcctttttgtccttgtcaacagactgggacagtgtctgattnnnnnnnnnnnnnnnnnnnnnnnngccttgccacacacagctaatattctaatggtaaatttctctgtatcaggtggggaaatgtgctgaaggacagtatgtatcccttgcttcatttttaggtcgtaggtttggaatgtcttgtcccagttcttcaaacactcttaaatttttcttaagtaatgtaaaaatggaactgccaattttatttctcttgcaaaaatagtaaatacttgatgttacattattcccaggtttaatgaaagaacccaacttagtttttcagtgaatttgacacctattttttagtgatgaaatttttctttgagaactggcaaggatgcagtcagctgtttgcagtttttagcctgattttggggtctatagagattgctttattggatacttcaagtcattcttgcttgcacttcccctattgacacatgaaagctgtgttggtgttttattgtacatacttcagatgcacataggaantagaagtggtgttataaatctaggctttctttatgatgtttctgataatacgagaattgaaaactttaccttctcttgtacatagtcagactatttgtattaaatttacatttcattc

SEQ ID NO: 246252 - DNA, 598 bp, Homo Sapiens
  misc_feature (89)..(124): n is a, c, g, or t
  misc_feature (261)..(324): n is a, c, g, or t
ctcatgtcgagtttattaaaactttagcagtacaaattatccagattgcagattatcaaaaaatcaactcaatgaaatccacattaagnnnnnnnnnnnnnnnnnnnnnnnnnnnnnnnnnnnntgaaaaggaaaacaacataaaggagattcattagcaagtctctcaaacttaaaatccgaaacagaatggaagtaagtttatataactcactcatccgcttttgtcttcatctgttccagggcttgattcatgatcannnnnnnnnnnnnnnnnnnnnnnnnnnnnnnnnnnnnnnnnnnnnnnnnnnnnnnnnnnnnnnnccactgaggatctgatcttctcatcctccttatttttcaacatggaggactttaattcattgtcctgactgctttgttttatttttgagaagggactttgatctctatcagcctttttttccctgctgttatttgagctattatgatcacgacttttagagtacattcttttctcactctcagaattttcttttctgtgtgagctcttactctcttggtttctgtatttgtctttgtttctgctttgactttcttctctctctgagctccgtga

SEQ ID NO: 246253 - DNA, 399 bp, Homo Sapiens
  misc_feature (105)..(105): n is a, c, g, or t
  misc_feature (165)..(165): n is a, c, g, or t
ccctccctccaagcccctgtacataaccctggagcgtgtgaccttcagagcttttcactttatgcaaaatggctcctgtgagggctgcaagctggagggtggtgncaggccttgggccacagggaggcgcctgtggaatagggggagttcatgcacccctttttnttcccagaggggctggactcaggttagtttgggggtgggggctcctgcactttgccacaggcacggggagggttttctcctcaccccctctgccctccccacttgggttgtactttctaagaaggtgattccccctgcccttgcccccttccccaggacaaaacatgttggtcatgtgcaatatttcttactgtgccgagaagccgcaatgagcgagattaaagctgtttaaca

SEQ ID NO: 246254 - DNA, 788 bp, Homo Sapiens
  misc_feature (41)..(92): n is a, c, g, or t
aaacaagaggtttctgcactagcttccatcttccagactcnnnnnnnnnnnnnnnnnnnnnnnnnnnnnnnnnnnnnnnnnnnnnnnnnnnnaatgtgactagtctgaatggagatgtgcggtaagtgtaaaatacactctggattttgaagattcagtaccaaaaaataatataaaatatctcattaaaattttatgttgattacaggttgaaatattttggatgcatattaacttcacttgtttaaaatatattagaaatgtaaaaattgtatatggggctcacattatatttctattggacagctctgtcctagagccaagctcggactgccaaagattggacatcctgtgactgcaagtttccagtgagcccttactcagcagcttgcttaggtggtctgtggttcatagaaacagagaggaggccaagcatgcgaaaaaggaacgggagaaaacagctctcagggactttaataattacagtctgtaacaaataagcagtgaatgtttgaatttggttggtggaaagctgggatgcaagtcatctctgcctattacgacaaaagcctatcgaccccagcagccagcacaggcaggctgcagctgaagcaagcaatagcctggagaataaacacaatatgaaaagctaggtgcatttcttaccgattcccacccacacacgcatattcccactccccctcccacctttcctcctgcccatacatgaggcacaagggaagaagcagggaggagggtatgcagttcttagatagcaacagaagcag

SEQ ID NO: 246255 - DNA, 499 bp, Homo Sapiens
ctccgtcaccgtggccgggcagcgtccacgcagcctgaaaggggagattttcatattagtttagaggctcctcacttaaagatttcatcagcatttgcgagtgttcgccattcaaggactgtgcatttctggaaacaatgaaaagccaaaactgtgaaaaattaaggagtggccctgaagctggtgtctgtaactgcacattttaaagtgaacagactgatataaatattttaatcctgtgcctagatagatggataagataaaataaattagtcatgttctggcccagtctggagactatctgaaagcaagacaaatgtcagcatttgctgtttaggggttacaattaaaatctctccttctagattgagcttctagagcctcagagatggaattcgccgttttgccgcgatttggcgttaacttattgacccatggggaggagggtcacttcccgtgaaaaggtataaaatgaagttgtcagtctctctttttaatt

SEQ ID NO: 246256 - DNA, 523 bp, Homo Sapiens
ggggctttcagttctgcttgctgtccgcaccgctgcgttacccggaaccgccgggccgaacagcatgacgtccgctttggagaactacatcaaccgaactgttgccgttattacatcagatgggagaatgattgtgggaacactgaaaggttttgaccagaccattaatttgattttggatgaaagccatgaacgagtattcagctcttcacagggggtagaacaagtggtactaggattatacattgtaagaggtgacaacgttgcagtcattggagaaatcgatgaagaaacagattctgcgcttgatttggggaatattcgagcagaacctttaaattctgtagcacactgaggaaaaactacatacttggacatctgtaaatctttgtacagaaactgattattctgaggatgatatatggagtttttatgagtgtgtcactggattttgactccttattgattcattgtaatatgtaaattaaaatatttctacattttattgcattattaaacacta

SEQ ID NO: 246257 - DNA, 382 bp, Homo Sapiens
tgagctccacgccttcattgcagctgcatgttcgatacaatacacctgcttcacagccccatggacatccctacaggtactgtcatgtgaagccttgcctagtagttctctccagggcaaatgaagctcacagttttgcaaggtggaaacctcttattcacatttgctttgattccccgatggagtagactgcctttgttccatacaggcaaagtaaggatattttaatatcatcctacttcttattagcatttcatttgtctatgtactgtatttcatttgtatgtctcctgaaacatccaaatagagaacataagaacactttatgtacaatctggaaaaaaattacctgagaaatcaattaaagatttttcccctttaa

SEQ ID NO: 246258 - DNA, 461 bp, Homo Sapiens
ccacccttttttctaatgatcgacttttgagctggatcgctgccgtttctccttggtctaagtgtgctgcatggagtgagcagtagaagcctgcagcggcacaaatgcacctcccagtttgctgggtttattttagagaatgggggtggggaggcaagaaccagtgtttagcgcgggactactgttccaaaaagaattccaaccgaccagcttgtttgtgaaacaaaaaagtgttcccttttcaagttgagaacaaaaattgggttttaaaattaaagtatacatttttgcatttgcttcggtttgtatttagtgtcttgaatgtaagaacatgacctccgtgtagtgtctgtaataccttagttttttccacagatgcttgtgatttttgaacaatacgtgaaagatgcaagcacctgaatttctgtttgaatgcggaaccatagctggttatttctccc

SEQ ID NO: 246259 - DNA, 199 bp, Homo Sapiens
ggattcagaatactgtattaaaattttactatttcatttttgtattctgtgcttattttttttgctcacgcatgtatgcttagtataaatgtgtcacttctaaagttttgtctctgacttttagaaataaatttcagaaaaattgtttcaaaagattttgaaagcacattttgttttgtgagtcaatgacaaatatatt

SEQ ID NO: 246260 - DNA, 420 bp, Homo Sapiens
aaatctgatttgccatgctaggccaagcttattttattacatacattctgcattctaagaactaataacttcatattgtaaacattaagcatacagagttaaaattcaaggccacattatatcgattgtctcttttgtcgtgtgtctttggctggccgagatcaactcgtagtgtataaatgcataagttatataattattatataaaaagggggaaaaacattgacttgtatacttcattctgacaaacgcacagcgttcgcgactcaaaggaaaactggaggccgcctacccaaaatgcctgcgtgatttctgattgtggcagccaagaaggccatctcttacctgaccctgtggagaacaaagcccccacataatgatgaggtcctgaatgtttctcttaaatatcagacaattccc

SEQ ID NO: 246261 - DNA, 637 bp, Homo Sapiens
  misc_feature (396)..(472): n is a, c, g, or t
  misc_feature (476)..(477): n is a, c, g, or t
  misc_feature (479)..(504): n is a, c, g, or t
gggttttgccgactgcttttcatctgagtcaccatttactccaagcatgtattccagacttgtcactgactttccttctggagcaggtggctagaaaaagaggctgtgggcaggaaagaaaggctcctgtttctcatttgtgaggccagcctctggcttttctgccgtggattctccccctgtcttctcccctcagcaattcctgcaaagggttaaaaatttaactggtttttactactgatgacttgatttaaaaaaaatacaaagatgctggatgctaacttgatactaaccatcagattgtacagtttggttgttgctgtaaatatggtagcgttttgttgttgttgttttttcatgccccatactactgaataaactagttctgtgcgggtnnnnnnnnnnnnnnnnnnnnnnnnnnnnnnnnnnnnnnnnnnnnnnnnnnnnnnnnnnnnnnnnnnnnnnnnnnnnnggannannnnnnnnnnnnnnnnnnnnnnnnnntttgggggccgccctcggccttaaaaaatttttctaaacctttctttgggcgcgcggccccagaaggaaagggaaactgggcataactgtttccaaggaaaccctggccaagaaaaagggtttggattccccc

SEQ ID NO: 246262 - DNA, 909 bp, Homo Sapiens
gcaagggggcagcgctgtgtacgcccggctcctcgccctggacatgtgtggggtctgccttgtcaacacccttggggccctgcccatcatccactgcaccctggcctgcaggccctggctgcgcccggctgccctggtgggctacactgtgttgtcgggtgtggccggctggcgtgctctcaccgccccctccaccagtgctcggctccgggcatttggatggcaggctgctgcccgcctactggtatttggggcccggggagtgggtctgggttcaggggctccaggctccctgccctgctacctgcgcatggacgcactggcgctgcttgggggactggtaaatgtagcccgtctgcccgagcgctggggacctggccgctttgactactggggcaactcccaccagatcatgcacctgctgagcgtgggctccatcctgcagctgcacgccggcgtcgtgcccgacctgctctgggctgcccaccacgcctgtccccgggactgagctgccatgccagcctgcccacagcagcctcctagagttagcaacaccaggtgttcctcccaactcgtctgcaaggggctggctccctggatgcttcccagctcatgagatgcctcagcaggagccccgttcaccccgttcttcccctgtggactgacctcttccacccacgccggggggctccaacttccctttcctgccttttcccccaaactcccattttactgcgccagctcccaggaaacttttccctcttgggacctctttaccctctggtgacctgtggggttagaaccagatagggcactcttggggtccccgtctttgctctgcaaaattcacgttcctgccagggcggcccagcccaaaagcctccttcacccttatccctggttcctccc

SEQ ID NO: 246263 - DNA, 1044 bp, Homo Sapiens
  misc_feature (931)..(956): n is a, c, g, or t
gcctctctgcctgctgtagccgtctgccgcgcccttgttcctgcagctgtccagttatcttttgactgccacatatggaccccaaaagatctcaaaaggaaagtgtcctcattacaggaggaagtggctattttggttttcgcctgggctgtgccctgaaccaaaatggagtccatgtgattctgtttgacatcagcagccctgctcaaaccattccagaaggaatcaagtttatacaaggagacatccgccacctgtctgacgtagagaaagccttccaggatgcagacgtcacttgtgtgttccatattgcctcttatggtatgtcagggcgggagcaactcaatcgaaacctgatcaaagaagtcaacgtcaggggcacagacaacatcctccaggtttgccaaaggagaagggtgcccaggttagtttacaccagcactttcaatgtcatctttggaggtcaagttatcagaaatggggatgaatctctgccctacctgcctcttcacctccacccctgatcactactctcggacaaagtcaattgcagagcacaaggtgctgggaggcgaatgcctaccccccttggacagaggcgacggggctcttaaagaacctggcgctcctgaggcccagcttgggcatcctattgggccctgggaaaaaccaaacgaaccccctttcccagggaaaagtccccccctaccatcccgagaaagcgggccgtgttccaaagttctggtcctaccccgcggaacccccccggaagccctctgggtacacgctttggccccaccgtcgggaacaaacttgcgcgggcaagggcttcacaatttccttgtggcctctacaaataggccctggaaagagcctggaccccgggggccattatatggcccttctggggcaagggcctctaatcttcctnnnnnnnnnnnnnnnnnnnnnnnnnntaacggcacattgttgagaacgtcctttcacggccaccgccgactcggcggggggtgcggacccataaccacattgcccccgtgaacc

SEQ ID NO: 246264 - DNA, 1020 bp, Homo Sapiens
  misc_feature (56)..(56): n is a, c, g, or t
  misc_feature (287)..(372): n is a, c, g, or t
  misc_feature (391)..(399): n is a, c, g, or t
accgttgttcccggggggttttactcgggtttaagtgcggagatttttagaggacncccacgggcggcacagggtggcccttcacccggccggaataaatcccccggggtacgttttgggaaaggcctgggaggccggaggcagaatcgggcccgaaggattccggaaggtaacaagaccgtgggccaaccatgggggaaacccgtgcccgccaccgagaggaatgaaaaattagcctgggcggtgatggtggcacaccctgtaatcgccaggttacttcacaaggnnnnnnnnnnnnnnnnnnnnnnnnnnnnnnnnnnnnnnnnnnnnnnnnnnnnnnnnnnnnnnnnnnnnnnnnnnnnnnnnnnnnnnagagcgaagctccatctcnnnnnnnnncaaagaatttttaaggccaattagcagcctgcttgcattccagctccatgtggaagtggtgctgtccaggatggaagcgccgaggcctcaggaaaagcctgccaaaagctgtcccacttgtgttgttagaaacaccccactagccttgtggtgggcaaaagctccaaaggtgcccattcagagtgagctgcctcagtcaggaatggccagagacggtatcatcgggagcgagtgagaaaagcctttctctcctcggtgcctctctgtgcattcgggcacgcagaaggtcaagcagaagcctcagcaacagctgtttaatgaaaatgttccacacctttcttggagaacatggaaaagctgtaagatggagcaagacagaatttgtcctgagaggggaaaataaattatgtaaaagcagcaattatatagacaagaccaactttttcagtttaaaaataaaagtctaggtcagagggtctaaaccacacaaagtaaagcacacgagattgaaaaatctcttcataaagcgcataatcaacaattcagagagacgtgtgccctagattggtagttcttccccaggaataacacagctcttagccacttgggtttttcccctaa

SEQ ID NO: 246265 - DNA, 1061 bp, Homo Sapiens
  misc_feature (313)..(314): n is a, c, g, or t
  misc_feature (316)..(328): n is a, c, g, or t
  misc_feature (330)..(387): n is a, c, g, or t
  misc_feature (389)..(397): n is a, c, g, or t
  misc_feature (399)..(472): n is a, c, g, or t
  misc_feature (474)..(504): n is a, c, g, or t
  misc_feature (508)..(609): n is a, c, g, or t
  misc_feature (612)..(612): n is a, c, g, or t
  misc_feature (618)..(621): n is a, c, g, or t
  misc_feature (624)..(625): n is a, c, g, or t
  misc_feature (628)..(795): n is a, c, g, or t
  misc_feature (798)..(799): n is a, c, g, or t
  misc_feature (812)..(812): n is a, c, g, or t
  misc_feature (815)..(815): n is a, c, g, or t
  misc_feature (826)..(826): n is a, c, g, or t
  misc_feature (830)..(830): n is a, c, g, or t
  misc_feature (834)..(1012): n is a, c, g, or t
  misc_feature (1016)..(1016): n is a, c, g, or t
  misc_feature (1034)..(1034): n is a, c, g, or t
ctgggaaatgcaccagtgttcagaagaaaagatgatggagtttcttcagttaatgagcaaatttaaggagatgggctttgagctgaaagacattaaggaagttttgctattacacaacaatgaccaggacaatgctttggaagacctcatggctcgggcaggagccagctgagaccaggccctgcctaggccctgccgcagaaccaccatccctgggaggccctgcagagcccacctgtggggaaagagaaggggcagcttccggattttcttttgggggttagaaggtcaggtgtggagactgctcgccagnntnnnnnnnnnnnnngnnnnnnnnnnnnnnnnnnnnnnnnnnnnnnnnnnnnnnnnnnnnnnnnnnnnnnnnnncnnnnnnnnncnnnnnnnnnnnnnnnnnnnnnnnnnnnnnnnnnnnnnnnnnnnnnnnnnnnnnnnnnnnnnnnnnnnnnnnnnncnnnnnnnnnnnnnnnnnnnnnnnnnnnnnnncccnnnnnnnnnnnnnnnnnnnnnnnnnnnnnnnnnnnnnnnnnnnnnnnnnnnnnnnnnnnnnnnnnnnnnnnnnnnnnnnnnnnnnnnnnnnnnnnnnnnnnnccncgcccnnnnccnnccnnnnnnnnnnnnnnnnnnnnnnnnnnnnnnnnnnnnnnnnnnnnnnnnnnnnnnnnnnnnnnnnnnnnnnnnnnnnnnnnnnnnnnnnnnnnnnnnnnnnnnnnnnnnnnnnnnnnnnnnnnnnnnnnnnnnnnnnnnnnnnnnnnnnnnnnnnnnnnnnnnnnnnnnccnnccgcccccccgcnccngccgcccggcncccncccnnnnnnnnnnnnnnnnnnnnnnnnnnnnnnnnnnnnnnnnnnnnnnnnnnnnnnnnnnnnnnnnnnnnnnnnnnnnnnnnnnnnnnnnnnnnnnnnnnnnnnnnnnnnnnnnnnnnnnnnnnnnnnnnnnnnnnnnnnnnnnnnnnnnnnnnnnnnnnnnnnnnnnnnnnnnnnnnnnntggngccgggcctggcgcccgncgcgcggcctcgcgccgtcccgccgtg

SEQ ID NO: 246266 - DNA, 1061 bp, Homo Sapiens; identical to SEQ ID NO: 246265
  misc_feature (313)..(314): n is a, c, g, or t
  misc_feature (316)..(328): n is a, c, g, or t
  misc_feature (330)..(387): n is a, c, g, or t
  misc_feature (389)..(397): n is a, c, g, or t
  misc_feature (399)..(472): n is a, c, g, or t
  misc_feature (474)..(504): n is a, c, g, or t
  misc_feature (508)..(609): n is a, c, g, or t
  misc_feature (612)..(612): n is a, c, g, or t
  misc_feature (618)..(621): n is a, c, g, or t
  misc_feature (624)..(625): n is a, c, g, or t
  misc_feature (628)..(795): n is a, c, g, or t
  misc_feature (798)..(799): n is a, c, g, or t
  misc_feature (812)..(812): n is a, c, g, or t
  misc_feature (815)..(815): n is a, c, g, or t
  misc_feature (826)..(826): n is a, c, g, or t
  misc_feature (830)..(830): n is a, c, g, or t
  misc_feature (834)..(1012): n is a, c, g, or t
  misc_feature (1016)..(1016): n is a, c, g, or t
  misc_feature (1034)..(1034): n is a, c, g, or t

SEQ ID NO: 246267 - DNA, 1055 bp, Homo Sapiens
  misc_feature (286)..(295): n is a, c, g, or t
  misc_feature (358)..(366): n is a, c, g, or t
  misc_feature (373)..(430): n is a, c, g, or t
  misc_feature (955)..(979): n is a, c, g, or t
tttaaagggcccagggtcacaaagccccctggattgccgatcgattttcgccaggcaatttgttccccttcccttcagggccttggcattttaactccatgcccgtaaaaaagggaaaacaaaggggcccagggccaccccctggggaagccaaaaaaaagaagaaggcccaggtacctttgggcagccctggcctgggccaccggaaaaccacttcggtgtgtggacccaagggtccccttaagccttgggcggttgctaaccactttgggtcatttcttctgcnnnnnnnnnnctgtccctgtgtgtcagggcaatgtttaggcagtgtcccctgggcctcatagaccctggtagnnnnnnnnnagttttnnnnnnnnnnnnnnnnnnnnnnnnnnnnnnnnnnnnnnnnnnnnnnnnnnnnnnnnnnaggtaaaatgcgggccttccatcgcatttgaatctcaggttaacaaatagtttttttagtagaggcatgtcccatgcaatgcttgggacatgcttctacttgacagtattccttatctgaaattcatatataactgggcatcctgtttttatgttattttcctcctcaatctggcagctctacatggggctgtcgggggagcaggcccgtcacccacggtcttcaaagacaggggtaattgtcattcactgcaacaataactgggcatttcagggctggcgctggcactcctggcatggagctgctggcttcctctgtccccatgtggtcccagtgcctggggctacacggaggggctccaggatggcccaagccagaggaacccaagcccccagtctgcccttgacctgctgtgtggtctgaacaagtttcttaccctctctgtcacctactgcaaagggggttatcagcgctaacaattgctacacacagttagccttctcattggaatagagattctaaccnnnnnnnnnnnnnnnnnnnnnnnnnaaagaaatcctcgtggagaattcgccacccaggctggtaccattgaaggttggggaaaggaacgcaggcggggtga

SEQ ID NO: 246268 - DNA, 1099 bp, Homo Sapiens
  misc_feature (666)..(711): n is a, c, g, or t
  misc_feature (737)..(791): n is a, c, g, or t
  misc_feature (898)..(962): n is a, c, g, or t
  misc_feature (1033)..(1033): n is a, c, g, or t
ctcagagcagccccaggaagtgggccatgtctgtggggagcaggggcttgctgagcccacctgctattgttctgcacgaggctgggcctgcctcactctccagggcctcatgccccattctgggcctgtggtgctcgtggctgaggctccacagggctgcaagtgccctgccaggctctaaggcccgaagaacaggtgatatcgggggcgctgcagagctgggctctagcaggacagttcttttgtagccaggggaccctagaagtggggtggggcggctccagggctttccagcataccctgcccctggatgggaaaggcagggtcagggcccactgagacccatgcagagtttccaggtgtgcactggaagtgaggtcacatgaccagcgggggaagaagactctgtcaagactctcagaataacctggagtacttgcgcctgaagctcagcgcgaagtctgacatatgcaaccaccaacaaacaatatctccacctcccgcccccttagaagacaaaaataaaccctcgggtcgctcttcccgggatcctcgcccacccaccgtccgcgttctcagcgcgcccccgtaccacgctcgttctttcccccacccacccctaggcccaccccgttcatacaaagccctcaccgttcgccaaatcannnnnnnnnnnnnnnnnnnnnnnnnnnnnnnnnnnnnnnnnnnnnntgcagacgtctaaaataccgcagggnnnnnnnnnnnnnnnnnnnnnnnnnnnnnnnnnnnnnnnnnnnnnnnnnnnnnnngtaaccatattacgtaagactctcccccgctcgaccgcaatatccggcattcccgacccccagtcgccccacccccattatacacaacgcaccgacccgccgcattnnnnnnnnnnnnnnnnnnnnnnnnnnnnnnnnnnnnnnnnnnnnnnnnnnnnnnnnnnnnnnnnntatgtataccatccctaaggcgccccgccacacgcgttatgaaatagtcgcctctagagatgtccgcccgntgtacgcgtaccccgtgattaacgcacccgccccgttcgcatagccctccccccccgcctaaccca

SEQ ID NO: 246269 - DNA, 893 bp, Homo Sapiens
cggacgcgtgggtcgacccacgcgtcgtctgccggtgtgtcaatgggaagaagaaggttttaaataaagatggcaaagcacactttcttcagctgagaaaagattttgatcagaaaagggcaacgattcagtttcaccaacctcagagatttaaggatgagctttggaggatccaggagaagctggaatgttactttggctccttggttggctcgaatgtgtacataactcccgcaggatctcagggcctgccgccccattatgatgatgtcgaggttttcatcctgcagctggagggagagaaacactggcgcctctaccaccccactgtgcccctggcacgagagtacagcgtggaggccgaggaaaggatcggcaggccggtgcatgagtttatgctgaagccgggtgatttgttgtactttcccagaggaaccattcatcaagcggacactcctgcggggctggcccactcgactcacgtgaccatcagcacctaccagaacaattcatggggagatttccttttggataccatctcggggcttgtatttgatactgcaaaggaagacgtggagttacggaccggcataccccggcagctgctcctgcaggtggaatccacaactgttgctacaagacgattaagtggcttcctgaggacacttgcagaccggctggagggcaccaaagaactgctttcctcagacatgaagaaggattttattatgcacagactcccccctttactctgcgggagatggggcagagctgtcaacaccaggtggaaagttaccgaggctggacagtgtaatggagactgcagtttaaagaccacatttgtcctcacaggaactgccgggatcaaggatcaatcctggatggaaacctcc

SEQ ID NO: 246270 - DNA, 829 bp, Homo Sapiens
  misc_feature (762)..(779): n is a, c, g, or t
ggggctcagtgggctccctcaggtgccacggccgcaccagtgagatgcaggcacctggcagaccctctggctagcctgcagccccccctctcccagcccctggtgggctgcggtgatgggtgttttgggagaacgaagacagccaggctgatggccagggccgcagtgcccctcccccccggcccagccccaaggttgatcccacgggaacaggcttccaccccagcacttgcgcacctgggagggagctgccatccgggctccattacctgttgctgaaggcgggtgctaggctggctgggtgtcaaggagcaggctccaggccaaggtcctggcccagccacggccattgcaagggctcagcctggcaggctttgtgggggacgccgccctctctgccgcaggctgggtgcacggccgggcaccacagtgggactcaggcccgggaaggtcatgttctcgaccagagctttgctcccagtccaggcgcctcattcggaggcctcttgactgggaccacagagatgttttctccgctctgacttgtggctcaggactactttctgggtcgtgctcctgccccactgtgcctgggcccataaacaacaggagccttttgttccgctgacctgcccctcccagcagacccacctccccgcctggtgccttccatggagggaaatgggacaggggccgtcatctcccctctgccctcctgcttttgctgttgccgagcacgagtaaagcttttgttcttacttnnnnnnnnnnnnnnnnnnctcgagactagttctctccctcgtgccgaattcgccacccaggcctcgct

SEQ ID NO: 246271 - DNA, 384 bp, Homo Sapiens
  misc_feature (144)..(154): n is a, c, g, or t
aagaggcctactacccgcccgcgccgcccccgtactcggagaccgactcgcaggcgtcccgagagcgcaggctcaagaagaacttggccctgagtcgggaaagtttagtcgtctgatctgacgttttctacgtagcttttgtannnnnnnnnnnaatttgaaggaacactgatgaagccctgccatacccctcccgagtctaataaaacgtataatcacaagctctggagagaaccatttgttcggccgcgcggggcgggggaccggggctgctcccgtatgtgtctgtaaagcgccgcgtcccgggggcaccggagtccggggccgggaggaagagacccagcctggcccggcccgcgcccgcgccgccggccggagaacccc

SEQ ID NO: 246272 - DNA, 965 bp, Homo Sapiens
  misc_feature (129)..(213): n is a, c, g, or t
cggcggcggcggctgggctgtttgttctggtctcccgcagccgaggagccgaagcagtggcggcggcagcggctgcggcggctgccggcggtgcccgcgggcgagcgcggcctgtgagctcggcagagnnnnnnnnnnnnnnnnnnnnnnnnnnnnnnnnnnnnnnnnnnnnnnnnnnnnnnnnnnnnnnnnnnnnnnnnnnnnnnnnnnnnnctagcgtctcagagtgcctggtgaagaatgtgatgggatcactagcatgtctgcggagagcggccctgggacgagattgagaaatctgccagtaatgggggatggactagaaacttcccaaatgtctacaacacaggcccaggcccaaccccagccagccaacgcagccagcaccaaccccccgcccccagagacctccaaccctaacaagcccaagaggcagaccaaccaactgcaatacctgctcagagtggtgctcaagacactatggaaacaccagtttgcatggcctttccagcagcctgtggatgccgtcaagctgaacctccctgattactataagatcattaaaacgcctatggatatgggaacaataaagaagcgcttggaaaacaactattactggaatgctcaggaatgtatccaggacttcaacactatgtttacaaattgttacatctaacacaagccgtggagaatgacatagtcttaatgggaagaagctctggaaaagctctttctggcaaaaaataaatgagcctaccccccggaagaaaaccggagatcctgattagcccagggcaaaaaggaagagggacccggggtaggaaaagaaaaccgggaccgtcaaaaacccgggggtttcccacgggtacccaaacccaaacctcagcatctcaactccctccggcaaacccagaacccctcagccggaaatgctccccccggggcgaggcccaggccttcaaccc

SEQ ID NO: 246273 - DNA, 969 bp, Homo Sapiens
  misc_feature (19)..(19): n is a, c, g, or t
  misc_feature (773)..(838): n is a, c, g, or t
  misc_feature (842)..(842): n is a, c, g, or t
gtctaagtagcgagcctgngtggcgaattccgcacgagggcctctcagacctgaccaatagggtttcttgtggcccaacagcagagaaggatgaataaatatgtactcatggggtgtagccagctgaacagttctttggagtcttaagattgtatcttaaatagtcctgtgaattttatattctactcctcaaaatatctacttcctataaaagtcacatttaaactgctcaccctggagcaaactccaagctctgaaaagatgcccttgcttgcccagaaggtttgagaagcttcagggccctgccttataaccgtaagtaacagacagcattaattttgggactttacctgcgttctctcacggaagcctcgcagcaaccctagaatgtggcccttacaaatgagcaaaatgaggcaccaagaagttaagtaccccgcttaggtagtaagaggtagtcctggagtttgagcctcttgtctagaacctggctcagaaccattgcgcgatacaacctccccaacctcatcccactccaccccaccctggctccatgtgctgccgataagcaggatgatgactgtgttgttctggattaatacaggcttaagaggtgttttccgtgcccaagagactaaaatgggacatgctgactggggcctctaggagaaagatttcactgcatgctagagcttagcgacagccaagctgttcagagacacagcaagtagcccgggcaggtgatgggggccctgtcttaggaaacagagccnnnnnnnnnnnnnnnnnnnnnnnnnnnnnnnnnnnnnnnnnnnnnnnnnnnnnnnnnnnnnnnnnnctgnagttcaggaagttcgaggaccagcctggggcaacaacagtgaaacccccatctcctaactaaaatggcaaaaaaatttggggcagggcattggtggggccgggctccctggtaattcccaaacttac

SEQ ID NO: 246274 - DNA, 931 bp, Homo Sapiens
  misc_feature (148)..(264): n is a, c, g, or t
cttgtgtttagccccgggatgtttttcaattctccccgggcccttgtgaatcccaccaggcctcggccttccccaaagtggctgggactaccgggcatgagcccaccgtgccccggaatgttctgtttttgttggtttgtttgttggnnnnnnnnnnnnnnnnnnnnnnnnnnnnnnnnnnnnnnnnnnnnnnnnnnnnnnnnnnnnnnnnnnnnnnnnnnnnnnnnnnnnnnnnnnnnnnnnnnnnnnnnnnnnnnnnnnnnngtcccctccactttctttcttaggggcccctcagggacatgtcagaggcctgagactacttgggggatgtctatgggccaggcaggctgccagcagctgagctgtccttgccctggggctcctctgcagtcagggagacaccaggcatgggcctggcttggatgcatcagtacttgactgcaaagacttaaaccacagacaggaaaggcgctgctgcagtctcgacggtcaaatgcagggccccctcagctgccatcccactgaggggcgaaggcccatcatctcccttcggctcggtaactgcctggcgtagcacaagggttctctttaaatccccagcaaatggagctgagtggaaattccgccccatattaccaggcacacgtctccttccactcctcactataccctgcccatgccacggccgccttctgagaataacgctgacagttccatggcccacagcccctctagttaacttgctgtgcacacggcagcccagccagaaacacgcagccaggtcggatattgggtgcattcagtcgtgaagcctgaggcttcctggctcccactgagcacagagaagtgttctgaaggacaggaagcagctggcctcactgctcttctcagacggctgatggagaaaagctcacagctgcctgcgccg

SEQ ID NO: 246275 - DNA, 787 bp, Homo Sapiens
  misc_feature (91)..(141): n is a, c, g, or t
agttaagaagacggggggttttccacccattgtttggcccagggctgggtctttgaacttcctgggccctttgggtaatcccacttgcttnnnnnnnnnnnnnnnnnnnnnnnnnnnnnnnnnnnnnnnnnnnnnnnnnnntgccctggcttttaagtccaggatgttccctgtggtgcccataagacttgtgagggcaaagccgggtcttccttgcacagccagatgccaccagatcagagcgcgatgatatgactacgttacttggctgcctccagccctgtcctctcagtcctccccgtagccttctgtggggcgtgtccttcacgcaagggaaagggactaggcctgaggtcacccagcagggccgtgtccctggatgcagggttgtatgcactcctgcggcccatggctacgtgcagcactgtgggctgcctgggctggggctgtggctggacagcagtgctacctgtcccgagccaggggcacccgctgctgaggccccatcacactgctcttcctgtgctctggctggtggcagggatgactgctgcctcttggtcccagggtgcaggtttgtagccaacacagaggcccagccactgggggtttggccccctccaggcggggaccttgacctagcgcaagaaggaccttctccccgtgcggaagaaggactcgatctgctccagggaccgtcccttggtctcgggcacacagcagcctgtgaacaccaggctcaccaagcagatggccgcgaagaagaagaaaggcacctggaggccga

SEQ ID NO: 246276 - DNA, 587 bp, Homo Sapiens
  misc_feature (199)..(199): n is a, c, g, or t
  misc_feature (216)..(216): n is a, c, g, or t
  misc_feature (225)..(225): n is a, c, g, or t
  misc_feature (504)..(512): n is a, c, g, or t
  misc_feature (534)..(542): n is a, c, g, or t
ggggcagcccgggtctcagggaacatggcggcgctggtgagaccctcgaggtttgtcgtgcgaccgttgctgcaggtggtccaggcttgggaccttgacgcgaggcgctgggtccgggcgctgcggcggagcccagtgaaagtggtgtttccttccggagaggtggtggaacagaagcgcgctcctgggaagcagcccncgcaaggcaccatctgnaggccagtngcccaggagcaacgagagaaacaaccgctcgaggagttcgcatcccgcgcttccaggacctggggaagagtctgggcttccgctacgataaagcttatcccggggacaggaggctgagcagtgtaatggccatagtaaaggtccaggccttttcgggaaaaacaggggaaaacccgcttggaaaggcccagggtccttttttaaaccctcccagggggtgaggcttggcccaaaaagggtgttccttttaaccgcctaaaaaaacccaaagggggtgtnnnnnnnnnataaaaccttgaaaaggggcgnnnnnnnnntttttagggggggaatttttgggggggattcagggggagttgggg

SEQ ID NO: 246277 - DNA, 495 bp, Homo Sapiens
  misc_feature (317)..(317): n is a, c, g, or t
  misc_feature (431)..(431): n is a, c, g, or t
  misc_feature (462)..(462): n is a, c, g, or t
  misc_feature (472)..(472): n is a, c, g, or t
  misc_feature (485)..(485): n is a, c, g, or t
aggtgtgggggggcggcgcggccgtgtggtgtgttgtttgtttgtcgtgtagcagttttgtaagtgagtagttattgtttaagaaaaacttggagctgggataagtggcagcagggaggaggggcccagagctttacccctctattaccagctgcctaggggaaggagcattcaacgaagccccgtaactttaagtccctaagggctgtgggtatagacaaccccaggcttgaaaggggtaaagtcagggggatgggaaacccacaatctggggtgaagatggaggcaaatgccctgggggggtgggtcaggacatntctcagaggcccgggttccaagtagggcatccacatgagtaccccctccccctaaaaggctctttagaggccgggcccagcccggggccacttgggggggcaattttttggcancttcccccagagagttccatttcctcccctnaaggcgggtnggttggaggtttnccctttttta

SEQ ID NO: 246278 - DNA, 1658 bp, Homo Sapiens
  misc_feature (197)..(461): n is a, c, g, or t
  misc_feature (591)..(591): n is a, c, g, or t
  misc_feature (622)..(622): n is a, c, g, or t
  misc_feature (1218)..(1218): n is a, c, g, or t
cccacgcgtccgaccgtgggccacggccccaccacaccaggcttggccctgtcagcggccagcatcccaagggccaggtccgagtgtcctcaccaaggaggctcttggcgtcgctgtgccggctcccatgggccttctgctgggtcgagggtaggtctcctcctccccctttgccctggcattaaactgatggtcannnnnnnnnnnnnnnnnnnnnnnnnnnnnnnnnnnnnnnnnnnnnnnnnnnnnnnnnnnnnnnnnnnnnnnnnnnnnnnnnnnnnnnnnnnnnnnnnnnnnnnnnnnnnnnnnnnnnnnnnnnnnnnnnnnnnnnnnnnnnnnnnnnnnnnnnnnnnnnnnnnnnnnnnnnnnnnnnnnnnnnnnnnnnnnnnnnnnnnnnnnnnnnnnnnnnnnnnnnnnnnnnnnnnnnnnnnnnnnnnnnnnnnnnnnnnnnnnnnnnnnnntataaaaataaagtggtggtcagaggagccccgaatagaccagttgtggagaggcctgggtggggtggctggcagggagggcaggccaagcccagtttctgcccacagtcacctcgaggtgactgtccanggctttgggcaccttcccgggagggggacgngcgccaccctgagtggtgtggaagctgggctctcctggatgccctgacccagctgcctgggagagcctgggcccctcctccctcagcacctcctcccctcagccctcctgctcggtcctcctcccttagctgtctggcatagatccatgttccctagcccctggcacaggtgcctctgactggaggaggccccacctgtggcccgggagctgctctgggggttgataaagggcagcattattgggtcctgggaaggagcgggcgtgaggccagctgaggcatggtgacccctgggaaggagcgggcgtgaggccagctgaggcatggtgacccctgggaaggagcgggcgtgaggccagctgaggcatggcgacccctgggaaggagcgggcgtgaggccagctgaggcatggtgacccctgggaaggagcgggcgtgaggccagctgaggcatggtgacccctgggtacgggggacttgggggccgcaccttggtttgcccagggcccctcctgcaccacgggccacatgcggaggacggcgtgggataggctccctgggtccacagcttctgcccgtgtatggggaaccctccnttggtcagggctgcaggctctgggcagatggggcaggaaccctgaggctccccgcgcctcccatggcctctgatgtgggacactggagccgagcacaattctggaagactccatggatctgggaagatgaagcccccctcccgttggtgggcaaagccgtccctggcggggccggctggtttcccggaccctcctccgggtcgggctggcgggccccatcgtgggtgggaagtcgcctgagcctgggccgcccttgagcttctcccagtcttgactttccagagggtccgtggctgcggcccttggtcgggggcaggtgggaaaaggctggcaggcaaacctggatcctggccccccttggcgttaaaaggatggatgcccgcccggtcattccccccccacggtccaaaagggaaacatgcggcttttgcacagacaag

SEQ ID NO: 246279 - DNA, 673 bp, Homo Sapiens
  misc_feature (144)..(152): n is a, c, g, or t
  misc_feature (653)..(653): n is a, c, g, or t
taattttcacgtcgttttttaatttaaattatctgaataattctctgtctcacgcggagttggggaggtctgtccgggaatcaggtgggcagctcctccgcggggccagggcggagacggggtctgtacagtcccccactcgannnnnnnnncacccgcctgcctggttttccaggaggaaggggcccggcgaggacagggctgggcagcccaagcggaagggggtgccggcgttcgggaaggggccgcggccggtccggggccgtcgcgcttgggggcccggctaagggagcccccaacccagggagcgaggaggaggggcaggggcgcggcggggagaggggcaggtcatccaccggggtccacgggggaggaaggcccgggtggaggcgcggaggcgtggtgcgatcaccgcttgaagcggtaggtgatgggcagcagcagcttgctcttcttgagcgcctgcaccttcttgagcgtctcgtcgtccagggccagaaagcagcggcgggagtactcgagcaggcgctccttggaggggtcgaactcgcccacctcggccagcttctcgggggccacaatgagcagctcggcgatgggcgtggtcagcgccacggtgttcctgtccacgccctcgtgcggaattcgccacncaggcctcgtacttagacct

SEQ ID NO: 246280 - DNA, 761 bp, Homo Sapiens
  misc_feature (74)..(100): n is a, c, g, or t
  misc_feature (121)..(121): n is a, c, g, or t
  misc_feature (321)..(321): n is a, c, g, or t
ttttctccccaagaaaaaaaattctcccgtggggccctctaaaaaccctctttcccccgaaaatttaaaatttnnnnnnnnnnnnnnnnnnnnnnnnnnnccccaaaccaaacccccaaancccaaagggaaaaaattttttggggaaatttttaaaagataagaagaaacaagggttttttccccccaatgttggggtccaggggttgggttttttataaattccctggacctttgggggattttgggccggcctttaaggccttcccaaaaagttcctggggattacaggcgggagccaaccgcggccagcccaaattntgtttttacaggtatttggctctcattccctagccattggttctccccttcctgtaattcaggcctgcaatatatttcttagtcccccaaggaaaacagaactaaagacttctaacagaagatctcagtctactaacatagctaatagctattaaagctactcaggcatcggcttaataaaaaactaaagggctgcagcaagtgatcagattttcaccactcatctttgtgagatgggtctcagagggccccgtccctgctgacaccaaccattcttaccggtagcctgccaacacacaagcagttcacagtagaacactgcagactgcagggcattttcaggctacatagcctcaagttcctagaacaggaactgaggcttggaagaaggtcagtgcagcgcactcagcgaatggataaactgaatcatcatttcaccc

SEQ ID NO: 246281 - DNA, 603 bp, Homo Sapiens
aagacggcacgttttactcttattcgtgtatttcttttgacactttacccctctatgaagcctcagaggtgttttaaaattgtgttaggaaacacacagagataagaaaaggcaaatggtcctgatctagtgtctcagggaagaggctggaaaggaaacgcggcgcgagtggggtgggagagggggcctgtggttttgcttctgtccgggctgaagactgagtaaggtagggcccctccttctgcggatgggtttctctctcattccaccctccacccacctccggttccgcgtgcacgcgcgagatagtccagtgggcccacagataacgaccatcagagattaaagaaggaaagtcagcgagcttgaacacaggcgtcccgtgtgggaaatgtcccaaggagacccgccagaagtgcgcaagccggaagtcgggctaaaagtttccttctcacccaaaagggggaaccccgggggtttccccggccgggaaccaaaccggaattcccccagccccccgcggttcccaacttgccccccaaccgccccaattttttgaaattccggcgggaatttagggaaaaaaagaagggaagggggggg

SEQ ID NO: 246282 - DNA, 452 bp, Homo Sapiens
  misc_feature (237)..(320): n is a, c, g, or t
  misc_feature (362)..(371): n is a, c, g, or t
ccctgaaagtaattttagggtttaggacttcagggagggcttttaacaaagtttgggtccttaacgggtaaaaagggtggcttatttttccccggataaccatcatttacttcccatcccttacttaagggtttatccaaaagagggcttggggaataaagtaccatttttacagcccgggtttggttgcttaacgccctgtaatcctacttaagcactttgcgaggcccaagacannnnnnnnnnnnnnnnnnnnnnnnnnnnnnnnnnnnnnnnnnnnnnnnnnnnnnnnnnnnnnnnnnnnnnnnnnnnnnnnnnnntaaaaaacattttcatttacatagcaccaaatataagagccnnnnnnnnnnaacctagaaagagtattttggagagagaaactaaggatcagaaggtttaagagtatcaaaaatctgaggccaggtgcctca

SEQ ID NO: 246283 - DNA, 699 bp, Homo Sapiens; identical to SEQ ID NO: 63024

SEQ ID NO: 246284 - DNA, 791 bp, Homo Sapiens; identical to SEQ ID NO: 63037
  misc_feature (617)..(633): n is a, c, g, or t
  misc_feature (635)..(642): n is a, c, g, or t

SEQ ID NO: 246285 - DNA, 191 bp, Homo Sapiens
acctcttcttggagcccagaactttatagagttgcctaccagggttactgtaatggaatttatgatcttaagaaattactagttgtattatttatcctatgattcattcattcaataagcttttactgcataaactttacatccagcactgtagttaagtacccaaaattgaatagaaataatggcttttc

SEQ ID NO: 246286 - DNA, 444 bp, Homo Sapiens; identical to SEQ ID NO: 99377

SEQ ID NO: 246287 - DNA, 797 bp, Homo Sapiens; identical to SEQ ID NO: 63131
  misc_feature (712)..(712): n is a, c, g, or t

SEQ ID NO: 246288 - DNA, 1072 bp, Homo Sapiens
  misc_feature (871)..(872): n is a, c, g, or t
  misc_feature (892)..(893): n is a, c, g, or t
aggataaggcgctgtcatggaggacgccgccgcgccggggcggaccgagggggtccttgaaaggcaaggagcgccgccagctgcaggccatggaggtatgcggggcgggagtcagcagggggaagtcagctcccgcgaggcagccggtctcggggctccgcgggaggccgacggcgggagctcacggcttgtgttcctgggtgtgtgtcgcaggagccctggtggagctcaccccgacccccggcggcctggccctggtgagcccctaccacacccaccgggccggggaccccttagacctcgtggcgctcgcagagcaggtgcagaaggctgatgaattcatccgagcaaatgccaccaacaagctgacagtcatagctgagcaaatccaacatttgcaagaacaagccaggaaggtactgggaagatgctcacagagatgccaacctgcaccatgtagcttgtaatatagtgaaaaaacctggcaacatttactatctctataaacgggagagtggtcagcagtatttttccatcatttctccaaaggaatgggggacaagttgtccacatgacttccttggtgcctacaaactacagcatgacttgtcctggactccgtatgaggacattgagaagcaagatgctaaaatcagcatgatggacacgttgctaagccagtcagtggcgcctgcctccgtgcactgaaccccacttccagggactgactcactgagagtgggctttgacaaacagctctcacaggacctggctgtcaacctccttgttgcccccactgttgccttgagaattgaagacatgtaggtgactcaccaaacttcttggaaagagaccctgtgtgaatgttccnncccattcccccaccccacanntcaaaacatggtcggccgccctccggcccccgaagaaagtttttctaaaaccatttcgttttggcgcggcggggcccccgtagggtaaaggggaacttgggtcataacgcgtgtttcccccaggaaaaaccctgggtcccttgaccaaggggccttggggaatcccctcccccaaatat

SEQ ID NO: 246289 - DNA, 341 bp, Homo Sapiens
ttcgaaaaaattgttttcattttaatgatcctgagttagtaacaaacaaatgtacaaaattgtctttcacatttccatacattgtgttatggaccaaatgaaaacgctggactacaaatgcaggtttctttatatccttaacttcaattattgtcacttataaataaaggtgatttgctaacacatgcatttgtgaacacagatgccaaaaattatacatgtaagttaatgcacaaccaagagtatacactgttcatttgtgcagttatgcgtcaaatgcgactgacacagaagcagttatcctgggatatttcactctatatgaaaagcatcttggagcc

SEQ ID NO: 246290 - DNA, 378 bp, Homo Sapiens
ttaaaatacaacacttcccagctgcccttatagttaaggtctggccagtgaaatgtatgtggaaatgttacatgacacttctagaaggattctttaaagacaaatacaccctttcttcccccttcctatttcctggaatgtgggtgtgatggctggagtcctggcagccatactgccacgtgtacagacgagtgccgtcctttagggatgacaggagcctggttccctgatgatggcagagccagatatcagcacaaacttatttaaatgggagagagaaggggagaaccaatctcaacttctaccttgtgtaagctgctggttttgggggttttctatgacagataccaaaataaaccctaactgaacatgtactca

SEQ ID NO: 246291 - DNA, 221 bp, Homo Sapiens; identical to SEQ ID NO: 97895

SEQ ID NO: 246292 - DNA, 381 bp, Homo Sapiens
ggtgtgacaattttgttaaattaccaagtttggtttttaataatttctcaatattatgcgccaagatctaattttaaaactgtatgaggactttgtgctgaaaatagagtatttttttaaagtaaggctgtcttggtttaaaagcagattacagaaatgtaagtcaacttaagaacagtgaatgaatgtaaaaacattcagttgagaccatatgcattttctgtgctgtttgtacttgaggtatgtaacatttgtatacctgaacttattttaaagatgaactgaaatgcacatagccaagtcttgagatacaagattgaatgtgtatttcttaaaaatacaactttgtgttgtactttgaaataaatgatgcttttttcc

SEQ ID NO: 246293 - DNA, 1099 bp, Homo Sapiens
gggagctgggggaccacaaacaaacagggtccttagctggggcaggggagcccaaatctagggagagactcctgagcctgaggtccctggaatgagtgtgggtagccgtaagtccccaagacatggggactttgcagtgagcaatgggtctccacaagtacctctcatcttgagagccctaatactaaaagatgggcacccacccccaccaagggaagactgccccattccctgagagccatcattcctaacgaccttgatctggagaatgtggagggagcatgtccctgaattttcctagatccctccaaatgccacccaccagagtcactggtgaccccagaaaatggatatagccgaaatctgcctttcccctttttcattccctgtgctgaaagagggaccagggtagatgccccctgccctcgaatcccccctccccgactgtggaatggatcgaccctaacgatcttccccgccccaaacactagaatagactggccctgaaatccccttgcccagtagaatggactgatctatgtgcacacaccccccatcacatggaatgggctggtcctaggctgtggcctgccaccttccttagagtgaatagggcggaccctccctctcttttcctgtagcgtgtggaccggtccacgcaattctttatcctgtgaactcatctgagtgggaggtggtggacactggggtttccttccctctctccgtagcatccgttggtctttctctccatctctgttggtttgtctgtctctgtcttcctccccaatccctaggggaagggggcatttggctagggggtgcccctgtgagcctcgaccttgccccctcgtccctctccccagtgcttccaggacccccaaataaaccttgtcctgtccgccccctggatccgcccccacacacacacaacccttgtcggccgccctcggccccccaaaaagctttcctaaaccatttcgtttgggcgcccggcggcccagaaagggaaaggtgaaacatgggtcataagcttgttttccctaagggagaacccccgggccacaggacctaagggcttctggaatttcctcccacc

SEQ ID NO: 246294 - DNA, 885 bp, Homo Sapiens; identical to SEQ ID NO: 137363
  misc_feature (231)..(249): n is a, c, g, or t
  misc_feature (281)..(341): n is a, c, g, or t
  misc_feature (395)..(398): n is a, c, g, or t
  misc_feature (401)..(402): n is a, c, g, or t
  misc_feature (404)..(407): n is a, c, g, or t

SEQ ID NO: 246295 - DNA, 426 bp, Homo Sapiens
  misc_feature (21)..(21): n is a, c, g, or t
ttaaatattgccttaatattntgtcagattaactagatgaataaataaatctagtattaaccgcattatgaattaaataattttgatttaatgaaagggataatatgatttccagtgtttactgtagtgtatcttgtacagataacatgtatttttaaaggaaaaaaaacggaattgaagctattttttcttgcatttctaattggcctgagggacattccgtttgaaatgtactgaagttacagtttctggttttttctccttatttttcttataatgcttgaaatgtctaactattaaaaaagacaattggaaaatgttatgcatggggtttttaagaaaacaaagtgttctttttatttgactgacaattcattttacactctatataataaaatctccacaaggcatcttgtgggcaaagtc

SEQ ID NO: 246296 - DNA, 1331 bp, Homo Sapiens
  misc_feature (685)..(685): n is a, c, g, or t
gatccacaataaagactccatttatttgttcctctccccccaagtttagcaaaataactcagatcctgattttctttaacttgcaaaaaatgccatccttctgagttcagagaccttccgagcccctggtgccagctttggtgcaggtccagttcatatgtgcttctgcttatagtctactgcctactgcaaggctggctcactgtatggttttatcaatataggcagtttgaattttttctgtgctatgtgaaagttcaattggaaaagaagaataaatgaagatttcttttaaaaaattagaggatgatagtaagttctcctggagcaagcttcatgtaggggttcatgactgtggttgattgcagctttttcagtaactccgtgatgtatatcagaaatgtgtggtagttttgaatggacaggtcaatcaatcttttggattcagcaataaatttttcatagtaatcagagagttggtctgaaaaatcttgcagtttatatctaaactgctggtggtaatcagaaattattttcttcgtcgcaaatggcctgggcttttaattttttcctgagcagtggcagaaaagctctgcaatcttctctttcccttttccatctggatcggtaaggatgctaagatattcctgaatatttctgtgcagaaattgctcaacttgactgnagagttgggaagtaaagttagaggcactgacaatatattcagaatggaagtccttaagagcaactaacaggttcttgatcagactgactatcttttcttcaagttcataatatttcactgtccagccaactatacttggatcaaaatattcttcacgaagggccataatgtattgatggatctgctgtaactcttgagaagcttcctgaagctcgttttgaataaattcattgaacttatgaagattaaggcataggttttctttcaacaatttaaaaacatatgggatataatcactgaagattgtgttgatctcatcttggatataattaataagataagtaaatttcatctctttcagctgtttaatgttatcttctattagttggaaaatgaattgtaaaaggtcctgaagattacgtagcacctctgtggtcttgagagactgaatggctttaaatacctcttgggcttcttttgataaatctttcaacagttccctatacatcgagattacatctattagtttatgtttccttaactcgaaaggaagtgtaatcactaggtcttggaaataggaaaacagtatttctgaaccattatggactttcgaatatacctgggacagtaccgtccctacctcccc

SEQ ID NO: 246297 - DNA, 198 bp, Homo Sapiens
tgatcatttctagcttaattccatggtgatcagaaaaacattccaaataatttcagtatttttacatttcttaatctatttttttatttgaatggcccagaatgtggttgtgatggttaatattgagtgtcaacttgattggactgaggatacaaaaagtataaaggataaaataaagcaggcagaagaaagtggaat

SEQ ID NO: 246298 - DNA, 914 bp, Homo Sapiens
ggtgggatttgaagacaaaattgtaggaaatcttacatttttgcaataacaaacattaatgaaagcaaaacattataaaagtaattttaattcaccacatacttatcaatttcttgatgcttccaaatgacatctacagatatggttttgtggacatctttttctgtttacataaatttatccacttaaaatgtgataatgtggagacaaagcaagatttgattacataaacttttctctgcattggtcttttcactatcttatttgctaacttttcttatttttcttcaacctccccaccctccattttttggatattaaacagggaaagcttgctacattataaagattgttggcaccatttattttacacaaaggctaaaggttaacttttggaaatgatgagctacttttatatatgtgtttactcatgctttgtgatatttctggatcattccagtcataaagacttattacatgtactatttcttgctacctgtgaaaaggtatattttaaagaatgtataaccaacagtccatttactttttattagtatgtagaggatttgtatctaattcatgaatgtagttttacagtagtttgtcattgtaaatggagcaaagtacattatcttctaaaatgtacattatgtaagaattgtaaatatacttaagtaatttgtatgccaaaaaattacattacagtcaataaagatctcccctcggactccgccacaacccactatccccgcaatagcctgggggcccggcttcgcacccttcaaatagtttctctaaacacattccctttggacgacgcggggccctactaaggtaggggaccccgcggccttttaatcgtttcctaaagaagaccccggccccctgaacaaccggattgagatccaccaccc

SEQ ID NO: 246299 - DNA, 1324 bp, Homo Sapiens
  misc_feature (250)..(260): n is a, c, g, or t
  misc_feature (426)..(472): n is a, c, g, or t
  misc_feature (510)..(523): n is a, c, g, or t
  misc_feature (569)..(585): n is a, c, g, or t
  misc_feature (592)..(597): n is a, c, g, or t
  misc_feature (601)..(740): n is a, c, g, or t
  misc_feature (784)..(792): n is a, c, g, or t
cccttcgaaagatttctgagacccgtaccggttaaatgcagagggtggaacgccttctaaggttgagatttgtccccccccggggtgcccccttttaagggcgcaagggagtttttgccccccgttcccggggaaatatttcccccggccccgcgtggtttcccccggggaaataaaatgttcccacaacccgggttgggagggtccccccccgccgccgccggcgagaaagggctaataaagataattnnnnnnnnnnnattctcccctaaaaagagggcccccgggggggcggcgggaataattggtttattgagacccccgcgcaaggggcccccctgtttagaaaggcaccccaaaaaaagccccgccaggagaccccccgtggggggggttttgtaaaaaaaccctccgtggttccccgcnnnnnnnnnnnnnnnnnnnnnnnnnnnnnnnnnnnnnnnnnnnnnnngggcgggattttcttttgaggaacaaattatgcccccnnnnnnnnnnnnnnctggggggggcgccccccccaacaaaggtgttttaaaaattttttnnnnnnnnnnnnnnnnncgcccgnnnnnngggnnnnnnnnnnnnnnnnnnnnnnnnnnnnnnnnnnnnnnnnnnnnnnnnnnnnnnnnnnnnnnnnnnnnnnnnnnnnnnnnnnnnnnnnnnnnnnnnnnnnnnnnnnnnnnnnnnnnnnnnnnnnnnnnnnnnnnnnnnnnatgttctggtatttttaattttcttactgggtccattttacttnnnnnnnnntataaaacatttttaatgtatcttagaaaaattagcaaaaaattgagaaagttgagcatattacattgtacaatgttttcatacgaatgttttaaaatcataaatatttggtttcccctcaacatagcacatcacaaaaatacatttcaaaaacttttttcatatataattcctgtaaatgatcatatccctacttattaaggaaaacacctgatgacaagcactcaaacactcttgaaattttctgtacagtaattacaaaagtaaaaccaagagttctgttggccctttaacaggtgaaaccattttaaatagtatcaaaatataattccaaatgggatatacttagttcatttctgtgctatctttgattcacaagtatctatcttagccaaagcactgtttaaaaggatattgcctcctagacatagtgccactgaaaaccaagatgtaaatcggtaacactatgcattaaacagaaagcttttgcacaaccacatatgtaaccgcttagtcgtatcaaggtccaccc

SEQ ID NO: 246300 - DNA, 377 bp, Homo Sapiens
  misc_feature (150)..(172): n is a, c, g, or t
ctttgccagttttaaggacatattttgattctttcagtattcttaacacctttttaaacaaagttcttgatagtacccactattattgggtttgttttatgccattattgattcttgatattcaagcatttacaatgtagcatatttgannnnnnnnnnnnnnnnnnnnnnnggcatcattaacatttcatttgaaatgcatattgttcttgaagtactttgtttttagcataaatgttgtgcattttatcttagtgtttggatgaaaacatttgtgttgtttagctttcatttgctttgtatatttaataatgtacctttattttccagtatgcctacattttgtattgcacaataaatttattttaagctgaaaa

SEQ ID NO: 246301 - DNA, 1143 bp, Homo Sapiens
  misc_feature (52)..(52): n is a, c, g, or t
  misc_feature (62)..(62): n is a, c, g, or t
  misc_feature (66)..(66): n is a, c, g, or t
  misc_feature (75)..(105): n is a, c, g, or t
  misc_feature (107)..(224): n is a, c, g, or t
  misc_feature (226)..(226): n is a, c, g, or t
  misc_feature (826)..(884): n is a, c, g, or t
ctctttgggggggcgggccgccccaaagaaatgtttttaaaaaattttttcnggggcccagngccnccccccaannnnnnnnnnnnnnnnnnnnnnnnnnnnnnntnnnnnnnnnnnnnnnnnnnnnnnnnnnnnnnnnnnnnnnnnnnnnnnnnnnnnnnnnnnnnnnnnnnnnnnnnnnnnnnnnnnnnnnnnnnnnnnnnnnnnnnnnnnnnnnnnnnnnntntgatgtagaaaatgttccagcttccataattctttattaaatatttgacaagttgcatcgcttctttacaatgacttcattttgtcacattagtcttttgctgtcaggaaaacaatctacagtttctctttagatctctcaagaaaaaagaaaagcgaaaggattgttcttcaagaaaacttcctgtgtgtatcaaattcaaccattattttaaagctattctgaccgtgaaaatgagcattattcataagttgccttaaaaaaattcaaggtagtttggtttttaccactgtatcaaatagtacttggcttcctattaggaggtgggtttataataaaaagttatgaaacattgataatttatttggaatgcttgaaactcttttcaccttaaaagtcactgtttttttcatgtttcatttgatgatagatcctgaattaggaaatgacagcaaattaacatcatcttcctagggttttcttaggctccaagggttgaaattcacaggacacagcttggagaaaactgcagaagggactaaactctcacctcctttcgaaaccagattactcaataaaggtgtaaaaatgctatacaannnnnnnnnnnnnnnnnnnnnnnnnnnnnnnnnnnnnnnnnnnnnnnnnnnnnnnnnnngagtagtaaaggaagaacaaagtcacgcaaagttaacatgaaggaaaccgtgacaatctaggtgaaatcagtctgagtaaaaggggaaaactggcttacacgggaacacatatctgcagacacagagttatggtcacgaggaaggcttctgatgatgcactggtacggggttgagaatgcagtgcacgcgaggttaggcgccaacagcaatgctactccttacacacagaaaaccaacgaacggaaagacgtgccttcc

SEQ ID NO: 246302 - DNA, 771 bp, Homo Sapiens
  misc_feature (158)..(239): n is a, c, g, or t
agattcacagcccccttattccatgtgccccggggtttttccttggggaacacagtattggccacagtttcccttttccttctgggggccgccgcgcccccaaacaaagggttttggaaaaattttttgggggccggaggcgcgcccccccaaataannnnnnnnnnnnnnnnnnnnnnnnnnnnnnnnnnnnnnnnnnnnnnnnnnnnnnnnnnnnnnnnnnnnnnnnnnnnnnnnnnggtaatttttattataggtttattacatttactgctctttttacatgaaatggtatatcataaaatacggcttaaaatttgtttgtttattttcatttaacagatatcttgaacaaactttcccatgggtatatattatagctagaaataccctcattctggaataatctatagtgtgaatgtcccataatttgccccaatcaagcagaactataatgtttggcatctgaatcagtgccaaagatgtagggttaattgcagttataaaaaatagagctgggaaattgcaactgccccaagttcttcacggctcttatgcaaaggctgtgtcctaaagccatagggaagtttagctttcagttgcctgtaacattaaggttgtttcatgattttttgaaggtttgtttcacaccatttccccccttaaatcatttaaccgaatggtatgtaacaggtgtagtttctaatgagttcttttcttcccctgtggctttagcatggcacattacacttctgtggatttaaagtcccc

SEQ ID NO: 246303 - DNA, 651 bp, Homo Sapiens
ggtgggggagtcgcccagcgccttgggcaatggacccgggattttccgtacggagatcagggttgggcccatggttcaccttccctagcggggtcccggggggccaaagggaaatggttttgaaagcttttttgaagggggcgaaggcggccgacaagggtttacgggtggtgtgagtcggggaaagggggggtaaaaatatcttcaataatgggacatcctatttttggggggttagggatagagataaatatggaagcttttttttgataaaacgcgtagtaagggacatgtttccaggtttaaagttcatgaacatataaaacagaaattgggtcggtgccaccttgagtgcaggattctgaggtcctaaatctggttctgaggttctgtgtttgattctggggtacagacagctcaagtaggaggtctccttatgtcacaaaactacacgatgcggaggttctgttccccaccaaaggcttgtctggggcccattggctgcctggggaggaggccccagcgaggctcatgggtccagcatggctcctggggggacccctactctcaccacgcaagagcccccagccaggagcactgggccagccagctgcgggccgatgagggggcttctggcccgccctgcacccc

SEQ ID NO: 246304 - DNA, 1045 bp, Homo Sapiens
gggaggcgagcaggcgaggaatcgccgtggcgtcttggtgttctccacgctggttcgcaggtgaagagatggcgtttgtgaagagtggctggttgctgcgacagagtactattttgaagcgctggaagaagaactggtttgatctgtggtcggatggtcacctgatctattatgatgaccagactcggcagaatatcgaggataaggtccacatgccaatggactgcatcaacatccgcacggggcaggaatgtcgggatactcagcccccggatggaaagtcaaaagactgcatgctccagattgtttgtcgagatgggaaaacaattagtctttgtgcagaaagcacagatgattgcttggcctggaaatttacactccaagattctaggacaaacacagcgtatgtgggctctgcagtcatgaccgatgagacatccgtggtttcctcacctccaccatacacggcctatgctgcaccggcccctgagcaggcttatggctatgggccatacggtggtgcgtacccgccaggaactcaagttgtctacgctgcgaatgggcaggcgtatgccgtgccctaccagtacccatatgcaggactttatggacagcagcctgctaaccaagtcatcattcgagagcgctatcgagacaacgacagcgacctggcactgggcatgctggcaggagcagccacgggcatggccttagggtctctattttgggtcttctaggggcctcaaggtcttgatgtgcatagcttctgataaccctgtgtgcaataatatgatttgcagggcatttctgtttgtgacaaaagtttttaataatagttttaatcattcctttgaaagtagtgatgtcataattgtactaatccacataagtaccacagaagaagggtttgaactgtgctattttgttcaaatgttgactctccgggggcactggctcatttccagactgttcttgtgcaactctcagaatactttatttgagcatacctgtttttgaaaggcatctctttaaggagttaggtgta

SEQ ID NO: 246305 - DNA, 577 bp, Homo Sapiens
gtcacttagaggtggctcaggctgagcatgtttaattatcctcactgggagagttgaaaactacttgacaggttccataatcaataagtcagagattcagatcatcaaaaagggggattgtcacctaccccaaggccacatataggattctgggtcccagagtgagtctgggaggtggaaccctgtgaaaggcagctttgacaggtggtgtctgttggacaccagcttctggcctggccctgctttcttctcgggtaccagacagggtgtgagggcagggaactagctccggagatcactggaggactccgagttggggccagggcttgctgagggcctcacttacagttttttgggggaaattcccaccggccttggcccttgccaccaaagtttcgcacccgatggataatctgcagctgctgctcaatggtcgaggtgatgttcacgtcatctgggatgtggacgtagcggacattgcggcctgtcacaaagaggtcatccagcttgacctgatgcccccaacggtccgtgtaggtgactttggccaggcggatgttcatgaaagcatcgaccc

SEQ ID NO: 246306 - DNA, 831 bp, Homo Sapiens; identical to SEQ ID NO: 64817

SEQ ID NO: 246307 - DNA, 765 bp, Homo Sapiens
  misc_feature (500)..(508): n is a, c, g, or t
accagcttttgagcaatgcaacagcttcccataaacccttaaaaagtacatctgttaatgtgcacattagtctttgttagtcacgttcactaaaatgtattaaccttacatatacttccaattaaaaaaacacataggcttttcagtattttggcctagatttttgttcaaatgagtccaaatgtgtgagtgaggtttacctgttttctgattctgatctataaaaatgggtggtctcaaaagaccagaaagtttattcatagccaaaaatgacaaaaagagttcttattctcccaaaataggaaattttgtattcctatagtcaaaacaataaacaatttttgaaattaaaaaagttgagaatcttgaaattcatttttttcagtagaataaaacaataagcagcatgaaaacgtaaagtgctacataaaagccccacattacataaattttgaaaagtttattggcttaaacagttacaggtgaaacagattacgtannnnnnnnncaagcatgctattttaattaccttgatatctcatcatgtgctatgttggtcaaataaaatgtcatgagttatctagatctgaggattaaagaggagtcctcagcctttacttgccagaatatacatccagttttagctgtatgctggaattaaggagttaaagtagggctttaaagataatagttttctgaagaggcctttcagtggggcttggacaaaaagggccccaaagaccaattttgctcattaacctcacc

SEQ ID NO: 246308 - DNA, 1141 bp, Homo Sapiens
  misc_feature (916)..(994): n is a, c, g, or t
aataaatatcccgcagtcatctcctgagcagctttcctctgtttcacttcggaactccttcccccactttcttcactccagtttcttcacttgcagcgttttctgctaagaaagacttatcatcttgtatctgtttatgcctctcttctttggggcccctggatgttttgtggatttttacagagtatttatatctgcacagcgtgtattttgttatacattcttacaagcattgatattggggggtacattcataatagtgagaatatctggcagaatgtgtgaatgccatatctgtagatgacgatgaatgtgaagggttaatgtagaaatgttgtttattctgttacagctcaaaatggaggctgagaatctctaccaccattcccttctctatttgagaatctctaccaccattcccttctctatttgggaaacaatactctcttatttgctatttttaccttcccattaactggcttcactcaacagtgccagatacctatggagaggggaagtaaaacaccttaggtcaggaataataaaccaatgagttagctcagggccggtggacatgttcactggtggaccagtttggcattgacctaaacggacagagaaatgcacatggaggagaactacgttgaaatcaagatcctatgtctgtgtattttctctttgcctggagtaaatagcattataagtcattccacccttattagataaccaaagcatattggtctcaatagctttctcctgaaaaatgtgattgaatcttacctgtagcagttcactcttaaggttgaaagaactgtcaatatagataaaatccattccttattattattgattggtgtgacatttgaaaatgtgtctaaacaatatttgtaagtaaaagaaccagtcataagcctcnnnnnnnnnnnnnnnnnnnnnnnnnnnnnnnnnnnnnnnnnnnnnnnnnnnnnnnnnnnnnnnnnnnnnnnnnnnnnnntttgtcgggccgccttcggccctcgaaaaagttttttaaaccttctctttgtggggcgcgggccccaatagggaaagggaaccttgggccatacccttgttcccaagagaaatccgggccatggactaggggttggaaatccccccc

SEQ ID NO: 246309 - DNA, 1069 bp, Homo Sapiens; identical to SEQ ID NO: 138527

SEQ ID NO: 246310 - DNA, 893 bp, Homo Sapiens
  misc_feature (810)..(849): n is a, c, g, or t
gcgatagaaatagccttcttgcagaattcatattttgtgcctttgagataactccttagaataatgatatcgaaatcatgatttgaaaaactgattactttagaaataatgaaattagttaaaaattaagaaatttaaagaggaaagttatcaaataaaaatgctctcattttaaaaagcaaaacaataaaattcccattatcttcatacttaaagtccttgaaatgtcatttatataatttgaatgtttcccagtttggaacttaggcaggagggatatttccttgaattatcaaggatattccatacagacttttaaaatgtcagtctcattaggagatggcactgagactttagcaaatagtgtagtatggatgcaggacaaactacacaacttattataaatgcattacagatatttacatagtggaatcctgcttgaatgccagaagttgctactgggtaggactcataactattttacaaagttttcttacgcacatctactacttttaaaattttatgtttaacaatttattctattttaaaatatgtactgtattttgaacataactgcagaataaaaatagataatggcacattagaaaactaagtatcccacagatgattggataatgagaaaaatgtacctacaatcatctcatcagaaacaagctacatcatggaatgttagttatccaagcctgcacaataatgacattttaaactgcaatcatctattggccagcatcacactgaaggcatcgttaaacattcaagcaaagattgctggcataaactattaaaagnnnnnnnnnnnnnnnnnnnnnnnnnnnnnnnnnnnnnnnntctctctcattcatgcacacttcccacattataattacattgcc

SEQ ID NO: 246311 - DNA, 704 bp, Homo Sapiens
  misc_feature (74)..(74): n is a, c, g, or t
gcgcccaattttttgttaggtagaatccccgaattatgcccgcagttccctggtaggttttttggtttcaattntaactatttcccatggcccactggtcaaatcaagtgggtctgaagaaggaattaaaccttcaatcatttggcctgtgccaagttccccaatggtcacttgacatcccaggtcgtcatgcccctggtcaggtcgcaggcaaacgttaaggcaggagtgacagctcctctagctgagactctgatgatgccaaacctgtgatggctgatggcaaagatagccagcagatggggccagaaatgagcagcagctttttggagaggaaaggcctgtgctgcaggccagatttccaggaagaagcaacataattcaagtccgtgaagtggcaagttgtggcagaaggggcccaaggatgtcagacctgagcctcgggtacctggcagctctgagtcccttcttcatgctcactttcccaaaatctaactaatggaggttcatgtgaagagagggaatctgaaagtctctctggattagagactcccagactgttccctgcctataacctcctagcagcaagtcattaggaaaatgcccactcatgccccaacctgcctttctaaagtcagaatgacaatggaaataacgtgtgccttcaaaacacatttaggataagggacagtccttatcatccg

SEQ ID NO: 246312 - DNA, 1200 bp, Homo Sapiens; identical to SEQ ID NO: 63138
  misc_feature (988)..(988): n is a, c, g, or t
  misc_feature (1111)..(1111): n is a, c, g, or t
  misc_feature (1121)..(1121): n is a, c, g, or t

SEQ ID NO: 246313 - DNA, 791 bp, Homo Sapiens
  misc_feature (652)..(652): n is a, c, g, or t
  misc_feature (761)..(761): n is a, c, g, or t
gggggggaccggcaagatggcggcgcggacagcgttcggtgctgtgtgccggcgcctctggcagggattggggaatttttctgtaaacacttctaagggcaatacagccaaaaatggtggcttgcttctcagtaccaatatgaagtgggtacagttttcaaacctacacgttgatgttccaaaggatttgaccaaacctgtggtaacaatctctgatgaaccagacatattatataagcgcctctcggttttggtgaaaggtcacgataagtctgtattggacagttatgaatattttgctgtgcttgctgctaaagaacttggtatctctattaaagtacatgaacctccaaggaaaatagagcgatttactcttctccaatcagtgcatatttacaagaagcacagagttcagtatgaaatgagaacactttacagatgtttagagttagaacatctaactggaagcacagcagatgtctacttggaatatattcagcgaaacttacctgcaggggttgccatggaagtaacaaagacacaattagaacagttaccagaacacatcaaggagccaatctgggaaaacactatcagaagaaaaagaagaaagctagtcataaagcctcagggaggccatttttgcctaaantttgaaatgaggtgggccagatgagtatgtttaaagtggagagtgcttccagctgagatgatttgagtctgtcctaactggctcattggagttctcgtgccctcatcanctgaagggcacggaatgggaactttaatgg

SEQ ID NO: 246314 - DNA, 968 bp, Homo Sapiens
ggcaatttccatctttaagaagaaactcaagggtcagagtcaacaagatgaccgcaatccccttgtgagtgactaaaaaccccactgtgcctaggacttgaggtccctctttgagctcaaggctgccgtggtcaacctctcctgtggttcttctctgacagactcttcccctcctctccctctgcctcggcctcttcggggaaaccctcctcctacagactaggaagaggcaccctgctgccagggcaggcagagcctggattcctcctgcttcatcgattgcacttaggagagagactcaaagccctggggcccggccctctctgcatctctctctgatctagctagcagtgggggtgtcaggacagtgaggctgagatgacagaggtggtcatggctggcacagggctcaggtacattctagatggctgtcaggtggtgggtagctttagttacattgaatttttcttgcttctctatttttgtccacacacaaatcagtttctcctgatctttatgtcttgggaacaggggccagaccagggagaaactctcaggtactccttgggagttggtcccatacaagtgcggactcctggacattagcgaggtgtaaagagggcagggtctgtgctgccccggcaggttttgctctcagatgctggaatagggtgggcctccttcagcctgggagggtctgagaaaaagatctactgacccccatttatatcacccctgatactttacacccgggctttcttcctaaattcttcatcccataccctctggcacctgccaggcccagttttaagcatccttggttcatattaatgcctccttccccccgggacccccatcgcttcatggcctggcgtccccacacattgccggtcaggcatgatgggcccccgtcatccccgctcgatcccggtcacttgttaaacccctcttgccctcttcgcgcatag

SEQ ID NO: 246315 - DNA, 487 bp, Homo Sapiens; identical to SEQ ID NO: 62676

SEQ ID NO: 246316 - DNA, 624 bp, Homo Sapiens
  misc_feature (600)..(600): n is a, c, g, or t
  misc_feature (612)..(612): n is a, c, g, or t
ggcaagttgttttttgtcaaatttacagttgtcaattgatcttcaagctgcagggtgcctagaaatgggccgttgtctgtagccctggcatgtgcacacggacatttgccaccactgcaagcaaaagtctggagaagttcaccaacgacaagaacgattagggaaaatatgctgctgtgggttaacaactcagaaagtccctgatccacatttggctgtttactaaagcttgtgattaactttttggcagtgtgtactatgctctattgctatatatgctatctataaatgtagatgttaaggataagtaattctaaatttattattctatagttttgaagtttggttaagtttcctttcactcaattgatttattttgttgttaatcaaatttatgttaattggatcctttaaattttttttggcattttccaacaaaaatggctttattcataagaaaggaaaaaaatcaatggaatttgatatctaaagaagttagatagggagcaaaataaaaaacataaaggagatagatgaattagtaagcaaatcagtagtcgagttttttcaactggccaaatttaatttaattgacttttnagccccaaattntacatttgttta

SEQ ID NO: 246317 - DNA, 793 bp, Homo Sapiens; identical to SEQ ID NO: 62687

SEQ ID NO: 246318 - DNA, 716 bp, Homo Sapiens; identical to SEQ ID NO: 62702

SEQ ID NO: 246319 - DNA, 212 bp, Homo Sapiens
cagggatcatttctatagttcattcattactagagaagtttctctgaacatgcagggcaccgcaaaccatgaggaagaggcacagcattctcttctgagcctgaagccagctcttcttgcttcactgccatttgcccttcatgatcattctcttcgtaaatcagtaccagcggatgcatccagtcagccacgaggaaggcggaatccgcccc

SEQ ID NO: 246320 - DNA, 788 bp, Homo Sapiens; identical to SEQ ID NO: 62808

SEQ ID NO: 246321 - DNA, 951 bp, Homo Sapiens
  misc_feature (776)..(791): n is a, c, g, or t
gtggctggtatgaagtcattggcctgtatgccagagagctaagagaagaaaacggggtctgtggcggtactctgaacaatttcctcagaacctcttaataaataagtttggtaatgctgaggccaggccttttagagctttcatttgatctgtatctgatctttcatttcctgccacctgatggtggattcagcagaaggcaagatggttataattctaaaagaatagcttgtttgtttgtttgtttggggaaaaggagacttgggggaagagttgtgtatgtggggtgtttctccccctagttaattcctgttgtgtaagggtaggctttgttggaaaaagaaaggaaagattgaactacaggtgcatagcaagcactctttctgggtaactaggctgctggttttaattaccctcagatttcacccataaaaacgcacaattgtattattttacagagatgtgtccagcgcccccctgtggtgtgtgagagaaagcagctgcaactcaagtgactatgtgggcccagctggcttcgtgcaggagggcacggtgggtgagccattctcgccattctcatgtcagactgaaaggagggcctgggccagctttgaaaaggcaggatgaaatggaaaagtcaccacacttaggggattttagaccttgactaacaagcctccaggtggcaaaaaattccaaaccaaatgtcaggaatctagcagggttgcctgcccttgcagcaaacaaacggaatgggatttttgcctcccccaacnnnnnnnnnnnnnnnncggggggaaaaatatttaaaggccgaaatgacctgtgctttgttaaaaagaaggaccccccagcttattacttgaactttttttaaatgggaaccctcttattaaaaaaaccttcccaatggccctttttgtcttaaacccctttaaatatattttaaag

SEQ ID NO: 246322 - DNA, 205 bp, Homo Sapiens
acaaggttttgtactcatttggttttggtggataagcttcacaaattggtatttattgattcaacaatcataaaaagattacatatttccttttgacaactagactatgttagaattagagaataaatcatacagccataaactgtaatttatttaaggaagtgtaattcatgtgatacatgggaatcaaaattgctcacaaccc

SEQ ID NO: 246323 - DNA, 880 bp, Homo Sapiens
  misc_feature (390)..(390): n is a, c, g, or t
ggggcttacagctattttgttacaaattaagtgtctagcagaaggaggagacctgaattcctttgaattcaaatcacttacagactcattaaatgatatcaagagtacaatagacgcttctaatatcagttgctttcagaataatgtagaaatccatgttgcacatattcagagtggcctgagccagatgggatacttacatgcctttgcagcaaataacaccaacagagactgagtaaagatttcattattccaactgcacgggacattgtttttgagaagttcttttcctttatataggcttccaacaccaaataacctaactgctggaaaacaagggaaatttaaatctccaaataaggcattttaatagactgtactgcttcttanaccagcattgctgaccagcattatatttatttttcttttattattcagatgcagtagcattgcttatgttacatatgtttatattcacaaatatttttaaactgaaatatctgaacataatataatttcgtggaagaatacattgaccattttttttaatgtgcatgaattcaccgcaacacatgcagacaactgctgcaatggagagtatgaagaaacctggtctttttattcatgtcggtggcagtgtggaaattccatccagaaaatttacaactccacttgatttagttgatcaccatctcagtcttcaaaagataacatcatgaaggtgtggggaagtcctagttttaaggaaaccactgaaatatagatgggaaatgtggactttacaagtatatgttatatatacttgcaatgtgacatggttctgtagatcattttataataataaatattttaattcatcgcggataaaacacctcaacac

SEQ ID NO: 246324 - DNA, 919 bp, Homo Sapiens
  misc_feature (794)..(816): n is a, c, g, or t
  misc_feature (865)..(865): n is a, c, g, or t
  misc_feature (890)..(890): n is a, c, g, or t
  misc_feature (899)..(899): n is a, c, g, or t
ggcatcctggatcgacacagctgatggctctgccaatcaccgggcccgggtcaccaccaggatgggcaacactccagattcagcctcagacaacctcggtttccgctgtgctgcagacgcaggccggccgccaggggagctgtaagcagccgggtggtgacaaggagaaaagccttctagggtcactgtcattccctggccatgttgcaaacagcgcaattccaagctcgagagcttcagcctcaggaaagaacttccccttccctgtctcccatccctctgtggcaggcgcctctcaccagggcaggagaggactcagcctcctgtgttttggagaaggggcccaatgtgtgttgacgatggctgggggccaggtgtttctgttagaggccaagtattattgacacaggattgcaaacacacaaacaattggaacagagcactctgaaaggccattttttaagcattttaaaatctattctctccccctttctccctggatgattcaggaagctgacattgtttcctcaaggcagaattttcctggttctgttttctcagccagttgctgtggaaggagaatgctttctttgtggcctcatctgtggtttcgtgtccctctgaaggaaactagtttccactgtgtaacaggcagacatgtaactatttaaagcacagttcagtcctaaaagggtctgggagaaccagatgatgtactaggtgaagcattgcattgtgggaatcacaaagcaaatagtactccagaaagacaaatatcagaagcttcctattcnnnnnnnnnnnnnnnnnnnnnnngagacagggtctttctctgttgcccgggttagagtgcactgggtgttcncggctcacttttgccttgaattccngggggcccnaggcattttttccccacctt

SEQ ID NO: 246325 - DNA, 1106 bp, Homo Sapiens
  misc_feature (683)..(683): n is a, c, g, or t
  misc_feature (895)..(895): n is a, c, g, or t
  misc_feature (899)..(927): n is a, c, g, or t
  misc_feature (1003)..(1003): n is a, c, g, or t
  misc_feature (1026)..(1027): n is a, c, g, or t
gggagtctcaagcctgccgcagggagaagatggcggtcgccgtaagaactttgcaggaacagctggaaaaggccaaagagagtcttaagaacgtggatgagaacattcgcaagctcaccgggcgggatccgaatgacgtgaggcccatccaagccagattgctggccctttctggtcctggtggaggtagaggacgtggtagtttattactgaggcgtggattctcagatagtggaggaggacccccagccaaacagagagaccttgaaggggcagtcagtaggctgggcggggagcgtcggaccagaagagaatcacgccaggaaagcgacccggaggatgatgatgttaaaaagccagcattgcagtcttcagttgtagctacctccaaagagcgcacacgtagagaccttatccaggatcaaaatatggatgaaaagggaaagcaaaggaaccggcgaatatttggcttgttgatgggtacccttcaaaaatttaaacaagaatccactgttgctactgaaaggcaaaagcggcgccaggaaattgaacaaaaacttgaagttcaggcagaagaagagagaaagcaggttgaaaatgaaaggagagaactgtttgaagagaggcgtgctaaacagacagaactgcggcttttggaacagaaagttgagcttgcgcagctngcaagaagaatggaaatgaacataatgccaaaataattaaatatataagaacttagacaaggccccatttgttttatattcctggaagaatgtgtccagctacccaaaaactaatagaagagtcacagagaaaaatgaacgctttatttgaaggtagacgcatcgaatttgcagaacaaataaataaaatggaggctaggccctagaagacnatcnnnnnnnnnnnnnnnnnnnnnnnnnnnnnaaaatggtcggccggcctcggcccctccgagaagcttttcctagaccatttcgttttgcgcgcgccgggccccagntagggtaaagtgaaacatggggnncttaaagctgtttttccttaggaaaaaatccctgggtccaatggaacctaaggtggcctttggagatttcctcccacca

SEQ ID NO: 246326 - DNA, 741 bp, Homo Sapiens
  misc_feature (722)..(722): n is a, c, g, or t
gggagtccagggaagagaaagtgatttctagaaagcctgttcccctcactggatgaaataactccttcttgtagtagtctcattacttttgaagtaatcccgccacctatctcgtgggagagccatccaaataagaaacctaaaataattggttcttggtagagattcattatttttccactttgttctttaggagattttaggtgttgattttctgttgtattttaactcatacctttaaaggaattccccaaagaatgtttatagcaaacttggaatttgtaacctcagctctgggagaggatttttttctgagcgattattatctaaagtgtgttgttgctttaggctcacggcacgcttgcgtatgtctgttaccatgtcactgtggtcctatgccgaatgccctcaggggacttgaatctttccaataaaccaggtttagacagtatgagtcaatgtgcagtgtagcccacacttgagaggatgaatgtatgtgcactgtcactttgctctgggtggaagtacgttattgttgacttattttctctgtgtttgttcctacagcccctttttcatatgttgctcagtctccctttcccttcttggtgcttacacatctcagaccctttagcccaacccttgtcagtgacagtattttggttcttagttctcactgtttccctctgctcccgaagccctttgaataaaaatgcacgtancctgagggccgggatgcgc

SEQ ID NO: 246327 - DNA, 165 bp, Homo Sapiens
aatttttaacaatgagatgataccatgttacagcggtattacattaagatacatttaatatagccacaattaaagtatgtattatgtatttatgctggtgttctttcatgttatttcttctagtgaaaatttccaagtaaactgttattgagcatatacattttt

SEQ ID NO: 246328 - DNA, 1210 bp, Homo Sapiens
agaagggtcatattctaaaggaactggaccattttccacttgagaagagaagcgaggtggtcattctgttttctgctcactcactgccgatgtctgtggtcaacagaggcgacccatatcctcaggaggtaagcgccactgtccaaaaagtcatggaaaggctggagtactgcaacccctaccgactggtgtggcaatccaaggttggtccgatgccctggttgggtcctcaaacagacgaatctatcaaagggctttgtgagagggggaggaagaatatcctcttggttccgatagcatttaccagtgaccatattgaaacgctgtatgagctggacatcgagtactctcaagttttagccaaggagtgtggagttgaaaacatcagaagagctgagtctcttaatggaaatccattgttctctaaggccctggccgacttggtgcattcacacatccagtcaaacgagctgtgttccaagcagctgaccctgagctgtccgctctgtgtcaatcctgtctgcagggagactaaatccttcttcaccagccagcagctgtgacccccgccggtggaccccgtggcgttaggcaaatgcccaacctccagatacctccgatgtggagagggtgttatttagagatcaaggaaggaagtcatcctttcttgatatatataccagcctttggggtacaaattgtggtggtttcttgaggattggactcttgatggatttctatttttatataactatacagtaagcatttgtattttctctctctaggtataagttactagtttggaatgtccatcaggacctttaataaatgagttaaaaatttgtcttatgagacacacctatttaagtacagattttggctttattgcccaaaaccctcctgaaagggtacggagagtcccctctgtgggctggcagtgtgaatgagatctgtttagtctcgtgcatatagttgctgttttttaaatgaacacagttgagtatttgaagtgaatttgaaaaaagaaatgttacttaatctttccctaagcccatgggttacagaatgctagggaggcaatttggttactgcaatggctgcttttgccagcgaggcaccattcatttggtcatctgggttttgtgtgtgaatctcactttcctcatgtaccaaggatcagttgggatttccgaggtgctcctaaattccc

SEQ ID NO: 246329 - DNA, 1034 bp, Homo Sapiens
tcgtataaattttaagttttatttttagaagttacacatattttaaaagaacaatttctttttattctttcattctagtaatattatcactacttagaacattaaaggaagatattttcacttatgatagttgaaatcaaaactttgtgaggccaaagcaatgaataatcttcaattcaacaagagatgctgggatacctgaggattatgtttcccgttctgtatgaaagagcacaacattcaaaactacaacaaaattcagacatgagttccttagctaatgaaagtttatgcatttggtatactctacttcatttttaatttggaaaaagcaacatgttaaaaattattttaaatacaaagggcattataagtgtaaatttaaaaatcaggactttgtatgatcagtgggaaatgtttaaaatattcagcacacactttcctcctcctggaaattctgattagaaagcccaagtttttgaacttctcatttggcaaacctcaatttaagactaaagtatcttaaacttcttcctccaccaaaaacacaaacaaagtccagttttcctcgataactagagaacagtccctgctcttaatatactgccctttttctgaaaatagttcaatttcatatttattctaatatttattgctactaatgtaaggaatgcttcttgatatccaatacattcttaaaaagtttagcatgaatcctagtatcaaacaaataatacagggagcaataaaattcatgttttctaaaataaaaagttcataaatatcattttttacaataactatatttggtcattctaagcagcacactttttaacacccctcaattaggatgagtcttagaattgatgtcagctcaccatcaactgcatggcctcaggctcctggagccatgagctactctcctgctccatgaggatccaccctactcccagttttcccagcccttctcccagcctggttctgcacagtccctctagcctgtgtcctctcagctgaggacaagcctgaacacc

SEQ ID NO: 246330 - DNA, 819 bp, Homo Sapiens
acgagccaccaggcccagcctgagtggtattttctttagggaccaggtagactttaaaacgagggtaagagaaaagccagtgtctttctgaggtaaataatttctgccaggaaacttcccagccccaccagcagccaccctaaaaaaaatcactcgtgtccccagggacttctaaagcttggggctccaggaaatcatccagtagagttggagattcagagatttcttgaagccagggacatgctcctaactcctttcccattaaaggtgttagaatagaccagagggtgtcccttttccacagtaatgggatcggctggtgtgccttcagggaggaagagggaggtggtcaagcttgaaaaactggctttaggatggttctgactttgttctccctccccaagtgttctcaacctccattctgcagtgttcagagttttagggaaagggtttgggtgccccagcatccaggtgttgtgtggcttagcgcatgtgaagtgaaaaccttctggggttgtttggaagcagctttctggttcttgtgattgtatcctgaggtcccagaaccctattctcccacgaggatcctcagtgaccatggtggccacacgcctggccagcctgctggcttcctgggtgagctgaagaaccttgccctgtggcacttttcgagggtgagctggaaccgagagaacatggtccccgtgctgggactcatgcgggtcatttcctgccggcctggtttcgcctggtcgtgtctttatgagcaccatgtaagcctccttgtattgagataattgggcattaaacattaaactt

SEQ ID NO: 246331 - DNA, 1149 bp, Homo Sapiens
  misc_feature (863)..(863): n is a, c, g, or t
  misc_feature (1041)..(1041): n is a, c, g, or t
gggacgggcgcgcgcagctgttgacgcgcttcttagctggtgcgcgccggagcccaaattccaagtggaaactgcaggcgcacgagggaggaacgcgtggagcatgaaaaggcagggggcctcctctgagcgaaaacgagcgcggataccgtccgggaaggccggagcagcaaatggatttctcatggaagtttgtgttgattcagtggaatcagctgtgaatgcagaaagaggaggtgctgatcggattgaattatgttctggtttatcagaggggggaactacacccagcatgggtgtccttcaagtagtgaagcagagtgttcagatcccagtttttgtgatgattcggccacggggaggtgattttttgtattcagatcgtgaaattgaggtgatgaaggctgacattcgtcttgccaagctttatggtgctgatggtttggtttttggggcattgactgaagatggacacattgacaaagagctgtgtatgtcccttatggctatttgccgccctctgccagtcactttccaccgagcctttgacatggttcatgatccaatggcagctctggagaccctcttaaccttgggatttgaacgcgtgttgaccagtggatgtgacagttcagcattagaagggctacccctaataaagcgactcattgagcaggcaaaaggcaggattgtggtaatgccaggaggtggtataacagacagaaatctacaaaggatccttgagggttcaggtgctacagaattccactgttctgctcggtctactagagactcgggaatgaagtttcgaaattcatctgttgccatgggagcctcactttcttgctcagaatattccctanaggtaacagatgtgaccaaagtaaggactttgaatgctatcgcaaagaacatcctggtgtagccagacctctctgagagacatggatatcacagggatgaaggtagaactataatctgcaattctctatgacacagctttaaccttcttctctggccaggacagtcgcaatcctttgnttttaattttcacatgggccatgggagaatgtggcccaaagaaagaaaaagaaatttggaaacaggagatacaggtcactttcctttttgcttagtccttaaccagtg

SEQ ID NO: 246332 - DNA, 1133 bp, Homo Sapiens; identical to SEQ ID NO: 63119
  misc_feature (363)..(363): n is a, c, g, or t
  misc_feature (833)..(843): n is a, c, g, or t
  misc_feature (937)..(952): n is a, c, g, or t
  misc_feature (962)..(962): n is a, c, g, or t

SEQ ID NO: 246333 - DNA, 818 bp, Homo Sapiens
gggagaggaggtggcggtggtggccctcgcctgtggcccccgtgctgcttgcactcgaactcgtcgccatggaggagctccaggagcctctgagaggacagctccggctctgcttcacgcaagctgcccggactagcctcttactgctcaggctcaacgacgctgccctgcgggcgctgcaagagtgtcagcggcaacaggtacggccggtgattgctttccaaggccaccgagggtatctgagactcccaggccctggttggtcctgcctcttctccttcatagtgtcccagtgttgtcaggagggcgctggtggtagcttggaccttgtgtgccaacgcttcctcaggtctgggcctaacagcctccactgcctgggctcactcagggagcgcctcattatttgggcagccatggattctatccccagccccatcatcagttcagggacacaacctgactgaagatgccagacatcctgagagttggcagaacacaggaggctattctgaaggagatgcagtatcccagccacagatggcacctagagggaggtgtccgttgtcagatccactgggcaagcaacccaagggacaagtcccttccccaggatccctcaagggggaacaacatggcccccggtgggggaaaatgggagaagccccgaacccattggttcccaaacaaaaagaaccctggtttcagggggactggccctttcccttctggcccggcgccggaaaaactgcctgggaaacaagaaaaaaggtttccgggtgggccctttaaaaaccaccctggtttaagaaccttggggg

SEQ ID NO: 246334 - DNA, 792 bp, Homo Sapiens; identical to SEQ ID NO: 150565

SEQ ID NO: 246335 - DNA, 1426 bp, Homo Sapiens
  misc_feature (160)..(168): n is a, c, g, or t
  misc_feature (377)..(377): n is a, c, g, or t
  misc_feature (417)..(417): n is a, c, g, or t
  misc_feature (428)..(428): n is a, c, g, or t
  misc_feature (569)..(569): n is a, c, g, or t
  misc_feature (1099)..(1138): n is a, c, g, or t
ttcaggaaaccaaggggcctgtttggtgggaaatttcccctcccgggcccttggccccattctgttttagagcgcagtttgatttttggccaccaggagtctttaaagtttccattccctcccttcccaaaaagagtttttgtgtaatcccttttggggnnnnnnnnngggaagttttttggatatgcaaagcactttttcccagtttgacaaagttggtaaaaatcgatgacaccttaaaataaaaaactgaagtgacctgatgctccagaaagatgtgaaatggccacagtgcatgtggtgatgtctccatgctgagtttcaggcagcacagcactaagtatcaggtgacctgtggtcccaccagagcatagtcntcatgaaataggcctaaccagataccttttaactcatctntattttggtgncaaagatgtggtttacttagctacttactatttgttcccatttgaagtctcagagcttgccaagttaaacaccgccttcagtaccgagctgctatacaagaacattataaaatacaaagtataaactaagataatcctctntacagaattcagattagtgcattaaaacaacattgatttaaaaagggaagtgagataactggcaaacctccaattgcttttttaatgaaggatgacacaaaatggcacgcaaggttaacactaaattttgtcaggtgctcaaaaacagttaattgtgggaaagttactttccaaaagtaattttgacctaagaatattaaccattattctataagacataagggaaggtaaataatggcccacaaaaccagatgatatggttaagataactagtttagtggaataacaaactggggtcttaagaatccaaacgcaataggtattggtattggttgttcatactcttcttccaaattatgttaaacatttttagtaactacactttcccccgtaaacatcagacttaaatagaccatatgtaaaaacaacctatccttagtaattttactaggcaatctacagcaaaagcttaatatatacacagaaagagtatcaaataaactagaaaagtattcaccgacttcagggtnnnnnnnnnnnnnnnnnnnnnnnnnnnnnnnnnnnnnnnncactttgtggtgttgtgaaccagaaaaatacaacccatgtatagaccttaattattttacattattgagaatattttccctgctgaagcaaatcaaaattaaatttgagaattttaattgaagtaacacgcatctaggtgtgtcacagtgacagggagatgcaaacagaatacacacacctttaaatttacgaattcccaaactaagtcaagcagggtaaataaattataaatgaaaggcatatgccacgcgggcaaaaacttaacaactattaaattgaagaccaag

SEQ ID NO: 246336 - DNA, 819 bp, Homo Sapiens
cggacgcgtgggtcgacggacgcgtgggtccgaacgcatcgaaaacaagcgccggaccgcgctgctgggagggggccaacgccgtattgacgcgcagcacaagcgaggaaagctaacagccagggagaggatcagtctcttgctggaccctggcagctttgttgagagcgacatgtttgtggaacacagatgtgcagattttggaatggctgctgataagaataagtttcctggagacagcgtggtcactggacgaggccgaatcaatggaagattggtttatgtcttcagtcaggattttacagtttttggaggcagtctgtcaggagcacatgcccaaaagatctgcaaaatcatggaccaggccataacggtgggggctccagtgattgggctgaatgactctgggggagcacggatccaagaaggagtggagtctttggctggctatgcagacatctttctgaggaatgttacggcatccggagtcatccctcagatttctctgatcatgggcccatgtgctggtggggccgtctactccccagccctaacagacttcacgttcatggtaaaggacacctcctacctgttcatcactggccctgatgttgtgaagtctgtcaccaatgcaggatgttacccaggagcgagctcggtggtgccaagacccacaccaccatgtcagcgtgtggcccacagagcttttgaccctgatgtcgctgccttgtcgtactctccgggactctcttggctacctgctcctgagcagtccggtacccggctcccgtccgtgagctgccactgatcccgtgcacg

SEQ ID NO: 246337 - DNA, 700 bp, Homo Sapiens
  misc_feature (24)..(24): n is a, c, g, or t
  misc_feature (187)..(187): n is a, c, g, or t
ggatacccaaactgggcacctggnaccccaaagcccccgtgggtgtcttggtacaaagtctcaattaagtccctcccgggtacaactcaggaaggcctgttattcaggggagggtaattttccaaataaaatgtgagttggcctaaatcgcagctggttatttctgatttggtaatctgtagtatcntaatttggggacatcctgtcgtaagttttggctggtgcatgtagaacttataatctacctgtataacaacagatgcaacatagctccgttccagccccaaattccttaaaggttctagtctactcttgcacttcttcctgtactgttgttgagaagcttacattttagggagaggctggtcaaatctctactctctggtaacagcattagcaagagtctttcttttggaaacagactcagaagttatggacatcagccacttcagacttctttaggccactatccttgaggtgactgaccagcctcctcatggattggagtttcccatcattgttttaattgctggaaatgttggcctaattctgcttccttgtaactttctgctttttagtacaagttctcttgggaatctacgcatggtaaaaataccagctccttccatctttacagccctgtcagtgctgtgatcttcaaagcctttcccttaatagcaagagggccaagagtggcacc

SEQ ID NO: 246338 - DNA, 598 bp, Homo Sapiens
  misc_feature (41)..(56): n is a, c, g, or t
  misc_feature (69)..(228): n is a, c, g, or t
  misc_feature (511)..(552): n is a, c, g, or t
gggggggcgggcccccaaaaaagggttttaaaaattttttnnnnnnnnnnnnnnnncaaaattaaggannnnnnnnnnnnnnnnnnnnnnnnnnnnnnnnnnnnnnnnnnnnnnnnnnnnnnnnnnnnnnnnnnnnnnnnnnnnnnnnnnnnnnnnnnnnnnnnnnnnnnnnnnnnnnnnnnnnnnnnnnnnnnnnnnnnnnnnnnnnnnnnnnnnnnnnnnnnnnnncaattcccaaccccagaccccaaccttgctttattttctccacgggtttaccagcactgacacactgcatattttcatttattttgtttactatctagtcaatgtaaacttcacaagagcaggaatgcttctgtcccttttgttataaagtatccccgggacttcataacagtgcctggcatgtactaggggttcaataagtgtttgctaataaagagatgctgagtgcatgaggccccaagtgggctgcatcacatcccccagggaaacgctgctcacaccnnnnnnnnnnnnnnnnnnnnnnnnnnnnnnnnnnnnnnnnnnagtccatagctagctaataagaggtggagacagaattgaaaccccc

SEQ ID NO: 246339 - DNA, 156 bp, Homo Sapiens; identical to SEQ ID NO: 149741

SEQ ID NO: 246340 - DNA, 488 bp, Homo Sapiens
aaggtggacaaataattttattttgtgcatgcaaatacatgtcaagtactgcaaactttttccatcaattttctctcaaacactgaaaatcatgatgctctattttgtgaacagccaaagctaatatctcttcacttcagtgctacagcaaaaacacacagaattcactctttgctattcactatcatcacaaccctcattgttccatctctgccctccccccatatacaggccttataaatcctagtcttcccccatttaatcctattcctatagcacaaagggaaacattacaatttggaaattcaaattgaaataaatggaatagaatttattcccatatatattccccatttcattgtacagaattattttaaattatagttttaaatagaagctgagtatatgccttaaaaatgagcattaaatccatcttagagatggtgcctgctttttacatgatgggtgtacaccatctttaatttccc

SEQ ID NO: 246341 - DNA, 778 bp, Homo Sapiens
  misc_feature (39)..(39): n is a, c, g, or t
  misc_feature (181)..(181): n is a, c, g, or t
atccatatccttgcccccgttaaagagaagctgataaancagcaccatttccaaagggtacaagggcttttaaaattaaaacccagttagaacacagcttcattcttaatatccacttttatctaaccaattctcaggttggaggtaagggagaggcatatttacacatacaaagagtagncaaaaatattaacagacacttgaaaattatattacgattaatcaagaggagggattgggcagggggttagaaaggactacataaacacaattatcaaaaaggttttgatctggaaagacccacattagcaagaccatttatatgccagctcccattttttcttttctttcccctcctccatcctccacaacaagagcacatttatttttgcagttaactaaaatctggccactgcaccgtactatgaagattgctgcatgcataccttttcctctgagtgccactgctgacccgaatgttgggtgtctgtgggccctgactatgcaggaggtaagtgtctatggtgggcacggtgactgatgcctccccacttactttagggctgccgatcttgctctttccaagtttgcctttgctgcgtcgggactgctcatggtcaaactctaagtcctccagcctctgggtcagggcgagtttttgctggatagccattcgtaacaaagtgttcagagtcttcttctcatcctctgcagctgctaactgtctctgcatctcatccaactgggtgacatattcatcacatcttgttgcaaaccc

SEQ ID NO: 246342 - DNA, 822 bp, Homo Sapiens; identical to SEQ ID NO: 63441

SEQ ID NO: 246343 - DNA, 1274 bp, Homo Sapiens
  misc_feature (880)..(880): n is a, c, g, or t
gggaggagaggagaacttagagaaggaaggcggcgggtgtcagggctatgagtgcttttaaggaaggtctccatagaaggttcccccagcaaagtagggaggggtactccccgagaggagtcgaggtgccggagcctgctgcctcgccgacgctgggaggagccccgtgtcccgccgcgcttgccaagggttggctgcgcgtgcggcgggagtagaggcgccttgcgcaccaggaagtgactgtttccccgccgcagcaaaccaggccatccgctggccttttagtttgccgcctcaggtttgtaagaggatttattggttacgaaggaaggtggatttcagtgtgttctttggatgtcaggccttaagagaagagtcccactgcacagcctcagatacttcatctccatggtgggtctcttctccaaaccaggactgcttccctggtatgccagaaatccaccaggatggtcacagctctttctgggcacagtatgtaagggagatttcacccgtgtgatagccacgaaatgtcagaaaggacaaaaaagtcagaagaaaccaagccatcttggaccactagatggttcctggcaggaaaggctggctgatgttgtgacaccactctggaggttgagctatgaagaacagctcaaggtgaaatttggagctcagaagaaaattttaccaagactagagtcttacatccacatgctccatggagtcagtgtgaccacggctgtaccccaatctgagaggctctcttgtcttctccatcctattataccctctcctgtcatcaatggttaccgaaataagtccaccttctctgtgaaccgaggtccagatggcaatccaaagactgtggggttctacctgngaacttggagagatgggaacgttgtctgtgtgcagtctaatcatctgaaaaacatccctgagaaacacagtcaagtggcgcagtactatgaagtattccttcgacagtctccattggagccctgccttgtatttcatgaaggtggatactggcgtgagctcccaagtcgcacccatagccaagggcacacaatggctatcatcacttttcatcccccagaaaattaattcagggaggagctcccatgtttcaaaaagaagattggaaagggaatttttccttcaagagggtcctgggaagcagcccggtgggccttgaacctccccttttaaacttccagggaaaaagtacccatgtaacccgggtgggcaggcccttccagccaaggccttcc

SEQ ID NO: 246344 - DNA, 1011 bp, Homo Sapiens
  misc_feature (603)..(626): n is a, c, g, or t
gatatagttttaatttctctctacagttttttttgtttggtttgtgggctgttggaattgtaatttttaattgccttctaaaaaatggaaatttaacaatgtctgatctcagctgaacaaattagatgtttcagttgctcttgggtcaactggcttacagatttacatgtgcacacacatacaaatttcttatcacattttcgacttcttcacttgacctaactgattatgcgaaatacccaagattcatgctactgtaccacagatttgttttcacagcaataaatcttcagttctttgtttatgattccacttaacaaaaggcctgcagaagtgatttattatttgggtatttggagataatacatttgatggttttttggaaaacctttttcactccatactcagatatgcttcattgtcaaatgcatatttagattagattattgaattgtaatgtttatctgctgctttttttaaataaaatttgactgaaaatgtttaattggcattttttaatgacttagccaaagaagtgcagctattattccatattaataggcttgcatttcttttcctaaatcttatttaggctaaatcagnnnnnnnnnnnnnnnnnnnnnnnnaataccacagaatcacctgagtgtcaattgaaagttgtcaattaaaaggtaaccttttaatctcgtaggaggaatctcattaagacatttttcctgatatgtagagcagtctgttggcaaaaatgcatatattttctttcatatttgtaaaattatactttaatggaacttcttttcttcgattatcaaggactttcactgcaggcagtgctatttcttgtgcctaaagaatgtttccaaaaagttcgcattcgctaatggatatttgccaagttggagttgtacacaaagtttctcatatcctgttcaagttaatcaacattcaagcacatgggggattgattaaggagggagtcttatagtccaaatgcctacaccatgtgcc

SEQ ID NO: 246345 - DNA, 721 bp, Homo Sapiens
  misc_feature (86)..(110): n is a, c, g, or t
  misc_feature (135)..(292): n is a, c, g, or t
  misc_feature (448)..(448): n is a, c, g, or t
  misc_feature (479)..(479): n is a, c, g, or t
  misc_feature (528)..(528): n is a, c, g, or t
  misc_feature (611)..(611): n is a, c, g, or t
  misc_feature (693)..(693): n is a, c, g, or t
ggggggaaaccaccccttttctttcccccgggttttttgggaaaaataataccccctttcccttttctctgggggggcggcccccnnnnnnnnnnnnnnnnnnnnnnnnngggggcggggggggcgccaaagaannnnnnnnnnnnnnnnnnnnnnnnnnnnnnnnnnnnnnnnnnnnnnnnnnnnnnnnnnnnnnnnnnnnnnnnnnnnnnnnnnnnnnnnnnnnnnnnnnnnnnnnnnnnnnnnnnnnnnnnnnnnnnnnnnnnnnnnnnnnnnnnnnnnnnnnnnnnnngactgtggcatcattctgctaactttattctttatacacagtttgggtaaagtaagaaccaaacactgcttccactccccctatcctcactccactttggggactttaaaaagtgactaatagttggtactcgtaaggattcccaagactgcagantttagttgtacagcataactgtgcatttganctctgaaagaaaataagagaccctctaagaggtggtgaccttagaagantgaggaggggtcagggggtcttttaccccagtttcagcctcacaccagcctgggagattttcccacctgcaacgcaaagcagncctgtaaattacatatagccacaatacacttaaattgagtcaatcaccgtgggaaaatgggaactaaatacatcatcaggtnttcattgaaagatcttggagtggtcacc

SEQ ID NO: 246346 - DNA, 1840 bp, Homo Sapiens; identical to SEQ ID NO: 63833
  misc_feature (323)..(347): n is a, c, g, or t
  misc_feature (962)..(1002): n is a, c, g, or t
  misc_feature (1049)..(1057): n is a, c, g, or t
  misc_feature (1536)..(1536): n is a, c, g, or t
  misc_feature (1561)..(1561): n is a, c, g, or t
  misc_feature (1689)..(1689): n is a, c, g, or t
  misc_feature (1698)..(1698): n is a, c, g, or t
  misc_feature (1711)..(1711): n is a, c, g, or t

SEQ ID NO: 246347 - DNA, 374 bp, Homo Sapiens
ccatgtccgattcacacgctacacccccacatgaacacattcgaaccttcgaaggcccacacactccctgccttcataggcccccacggtaagtgagttcacaccctagaacactgtcctgaccgcaggacgcgtgccttggacttggtattctacatgtgactggctttcttgccctcgtctcttgaatgtttagactcttaagatcatatcctgccccaaatttcaaattaatgaaatgaagatatttcaaacagatctttgaaacctcagattctgtggtgcaattttaatgttttcttgtttctcagttttctgctataaaactattttcaattcccaacacaaaaaacccaacacacaataaaccatgt

SEQ ID NO: 246348 - DNA, 404 bp, Homo Sapiens
  misc_feature (196)..(210): n is a, c, g, or t
caaagtgttaggccccacacattggtaaaaaataataataaaacaaagtcaaaaacaggtaaattatggattttagttgtatattggtttatgtattttttcttaagttatacagtgcactgtttgaaatgtattgttgagtattactttgtacaggttgatcactttttttagagtgaagaaagaacaaacttgnnnnnnnnnnnnnnnaaaggaatataaaataatgaaggatgtataattgatgccaaataagcttgttctttagtcacaccgacgtcttatttttccctttaggccagttctgtttttaaggtgtacatggacaatgttacagtgtaagaaactccatatccatatgttcccattcgcattttgtattggttcatgtataccatttttac

SEQ ID NO: 246349 - DNA, 459 bp, Homo Sapiens; identical to SEQ ID NO: 145453

SEQ ID NO: 246350 - DNA, 560 bp, Homo Sapiens
gtttgaagaccaatcaaatatattatttagtcaacatatactatttagtctcaggttcaaggctacaacaaaaatcaccatctttgtcaaactttggagagggaaaatcttcactttcttaagcaacaatggatattgcctgtgtttgccactgtgtttccctgcctctcaattcgctgaaaaaggaactacctatccttacatttcacctactaatgtctcttctaacatcttagaggtccatggagaaggcatatggagaacatgttttatactgctctataaatagtattccaatcactgtgcttaatttaaatagcattctcttatcatttatcagccttttatgtattttccaagtaaaatattaacatattacttcattggtcttcttttttatctggttctatatgaatgctattttttcccttctcttctaacatgaaatatattttctctttttgatcttgtgctatgaaacaatcttccaaagaactgtataaggtggtcataagtgaatattttaattaaaattggtaaaaataaataataataacagt

SEQ ID NO: 246351 - DNA, 554 bp, Homo Sapiens
gtggctttcctgccgacggctgctcggctccggcccgcggcggcggccccagagccgaggaccggggtgggctcgcgctcttcgtcactggagaagtccgggggccccttgctgttggtgccggcggggagcggcggccggttgcgagccgtgaggtgctgcaggtagagctggacgtacgcgtctttgcgctgctggccgggcggcggggtcacattgttgggggccaactcactcttcagcttgtcttttgtcaggaccgaggggtgttccaggaactccggcatctcggggatctgcgaagccccctccccacagcctttgccgccgccgctcacgccggcgcgcttgctcctggccggggaccgcgctgccgcctccgagcctcacggctcctgcccgggaagagcgctgcggagcggaacaaaaactcgcggacacaaagccaagccagacccggacacaaaagaccccagagccgaactacgaaccaactgcggccaagctggaagctcgcaccaaccccagcccacacactacaggcaggaggcccc

SEQ ID NO: 246352 - DNA, 577 bp, Homo Sapiens
cgtttgtcgtctttctccatataaagtggtgaattttatggtatgtgaatcatatatcccatttgaaaagcagactgacaaaaatttgtttctaggcaggaaacaggaaactggggaagccaagtgtagctttaccctactcagggagaacagtgttggagagaaagctgtcagcttttagaacgcgatggcaaaagctgtgtgtgtggcagggagaagtcttggggctttttgcagcaaggaaagttctgggcaaccttcgtggcagtgactccccctctggagcctcagcttcagcaaaggacgagggcatgtccccagagcagccacagtcaggcctagatcaaggtttcaacccacggggaggctgggctgggggctccgtgcaggggtcgagccacaaggcatcttgagcatcccctgcaagagcataaagatgaaagccagggataattaacgccgtcaggcctggggcgactccacaaaatcctttgtggcggcctgaggctgccgtctctcctccaagggctgggggtccccttctgatcatccttctctgcttctttgtcccctccac

SEQ ID NO: 246353 - DNA, 739 bp, Homo Sapiens
  misc_feature (202)..(340): n is a, c, g, or t
  misc_feature (349)..(566): n is a, c, g, or t
  misc_feature (583)..(592): n is a, c, g, or t
cggacgcgtgggtcaggagatctctctgctcaagcacagcaggaatcatggcccctctccatgaattggaacttggtacaggttaagtatccctaatcctgaaatctgaaacacttgtggttccaagcattttggataaggcaaattcaactttcagtctcttttctgggggaaaaaaataataaacctagcctagccaggnnnnnnnnnnnnnnnnnnnnnnnnnnnnnnnnnnnnnnnnnnnnnnnnnnnnnnnnnnnnnnnnnnnnnnnnnnnnnnnnnnnnnnnnnnnnnnnnnnnnnnnnnnnnnnnnnnnnnnnnnnnnnnnnnnnnnnnnnnnctttggggnnnnnnnnnnnnnnnnnnnnnnnnnnnnnnnnnnnnnnnnnnnnnnnnnnnnnnnnnnnnnnnnnnnnnnnnnnnnnnnnnnnnnnnnnnnnnnnnnnnnnnnnnnnnnnnnnnnnnnnnnnnnnnnnnnnnnnnnnnnnnnnnnnnnnnnnnnnnnnnnnnnnnnnnnnnnnnnnnnnnnnnnnnnnnnnnnnnnnnnnnnnnnnnnnnnnnnnnnncctctaattaaaattannnnnnnnnngggcccttttgggagagggggggaaatttttaaaaaatttgcgccaaagggaacccccccaaaacgggtttaagaaacttaaatccccgggggataaaacccttgggcccttgggaaaaaatttccccccggggagaaaacgggggg

SEQ ID NO: 246354 - DNA, 824 bp, Homo Sapiens
  misc_feature (141)..(169): n is a, c, g, or t
  misc_feature (293)..(307): n is a, c, g, or t
  misc_feature (353)..(415): n is a, c, g, or t
ctgctgttttcttttttatttgaaatgaggcattgtggtgtgctttcccctaccatacggcctgtctgcccttccctccccacattggctccagcagagtagccgaaggtcctgccgccgccgccaccaccaccaccactnnnnnnnnnnnnnnnnnnnnnnnnnnnnngcctgcatagctccactctgacctgtgaaggaatggggatgaggccaggagctagtgtctaccacggccacacagggagcagtgtgggcccttagcccccaaggggcctgctatgcatgtggcnnnnnnnnnnnnnnnaaaacacagtaaactaaattagtcgtcagggtttaaatggcccctnnnnnnnnnnnnnnnnnnnnnnnnnnnnnnnnnnnnnnnnnnnnnnnnnnnnnnnnnnnnnnnaaccaggagaccatcatgtctctctgccttcctcctctcccctccaggggagtcaggctgtctgtgaaagccatgagcttctctccctctcccactcctcctctcctactttcagatggatttatctcctttttaaacaagtgaacaatcggaacagtgagactggtgggggtgtggattgctcgtctcgtcattatagtgatgaaaattatcccttgggtgggagtaatggagcgaacctcatggtcccctttccccgaggggagcatctgtaaattatcacctcttagaaaactcaaagctggatgggcacgttcgagccactgtgttgtccagccatgacttgagataactggaacgcggattgaacacagcgcaggccttacagtgccccatgggggtcaggata

SEQ ID NO: 246355 - DNA, 443 bp, Homo Sapiens
  misc_feature (53)..(65): n is a, c, g, or t
  misc_feature (273)..(273): n is a, c, g, or t
  misc_feature (334)..(334): n is a, c, g, or t
  misc_feature (338)..(338): n is a, c, g, or t
  misc_feature (375)..(375): n is a, c, g, or t
cacggttaggaaagcacattgagcctgaagaaaactattttatatttttcttnnnnnnnnnnnnncacaaagtttgtaaatttcaatcaccattatcaggctttttaaacaacatctataaagaacaaacatccgcttcaaaactacagggagggaaggaaagggggggagacagacagcacccgcagacggggaggttttgttatcatttatttgtgaagttaaaaacgagcgataaaaagtaaaaactgccatacaattttttttgttgtnctcattttgttttcagtttcaatctcctcttgaacagatgaaaagacaacagaccagtccngggnggggggacgggcggggcgcgggactgagccagggcgngagggagagaagagggggcttggctgctgggggaaggggtcctgcaatacaacacctgggtccaagga

SEQ ID NO: 246356 - DNA, 757 bp, Homo Sapiens
  misc_feature (675)..(686): n is a, c, g, or t
caaggacctgaagaaaaggcttcacgctgcccagctgcgggctcaagccctgtcagatattgagaaaaattaccaactgaaaagcagacagatcctgggcatgcgctagccaggtagagagacacagagctgtgtacaggatgtaatattaccaacctttaaagactgatattcaaatgctgtagtgttgaatacttggttccatgagccatgcctttctgtatagtacacatgatatttcggaattggttttactgttcttcagcaactattgtacaaaatgttcacatttaatttttctttcttcttttaagaacatattataaaaagaatactttcttggttgggcttttaatcctggtgtgtgattactagtaggaacatgagatgtgacattctaaatcttgggagaaaaaataatgttaggacaaaaatatttatgcaggaagagtagcactcactgaatagttttaaatgactgagtggtatgcttacaattgtcatgtctagatttaaattttaagtctgagattttaaatgtttttgagcttagaaaacccagttagatgcaatttggtcattaataccatgacatcttgcttataaatattccattgctctgtagttcaaatctgttagctttgtgaaaattcatcactgtgatgtttgtattcnnnnnnnnnnnnctgtttaacagaatatgagctgtctgtcatttacctacttctttcccactaaataaaagaattcttcagtt

SEQ ID NO: 246357 - DNA, 1005 bp, Homo Sapiens
  misc_feature (190)..(249): n is a, c, g, or t
  misc_feature (385)..(496): n is a, c, g, or t
  misc_feature (823)..(853): n is a, c, g, or t
  misc_feature (876)..(933): n is a, c, g, or t
  misc_feature (980)..(980): n is a, c, g, or t
ggcaaagggggccccagggggcggaatgccgcgggggaattaaggtttattccttccctttgttgaaggggttcccaattcggccaaaatgctttaagaatttcccccctttcttcgaataatggccaaggccggggggtaaatttaatttgaagtcgcctgggctcccggtgaaaaggcccgttaaggnnnnnnnnnnnnnnnnnnnnnnnnnnnnnnnnnnnnnnnnnnnnnnnnnnnnnnnnnnnnggggggaacccagcccttggccaggccaagatttccttgggaaaaatttttgcccaggtcccgtgccctaaggggccccgcgcccaaacaaaaagtttagaaaaattttctggggggccggaggggcccgccaaannnnnnnnnnnnnnnnnnnnnnnnnnnnnnnnnnnnnnnnnnnnnnnnnnnnnnnnnnnnnnnnnnnnnnnnnnnnnnnnnnnnnnnnnnnnnnnnnnnnnnnnnnnnnnnnaacatgaagatcactttattttcaaggagtaaggggaatggtaatggggtagatttaacagcaaatgaaccactgcacaaaactgaaaggatttctcctatgacatttagtttcacttcttttccatttaggacactagctgctgtaatctcggtactacttttttttaagttatcttccccaagcagtgttacaatccagctggaatgggcattagatatacacatcattagactcttaaaaagaggcccgatggctctcgatttaaccagaatattaaaaaagaaaatatatgtacacacatataaatatatttaagttcacacnnnnnnnnnnnnnnnnnnnnnnnnnnnnnnntgagacagggtttcactctcgtnnnnnnnnnnnnnnnnnnnnnnnnnnnnnnnnnnnnnnnnnnnnnnnnnnnnnnnnnnggttcaagcgattttcccacctcagcctcctgagtagcttgggttgncagggatgtccaccacacctggggt

SEQ ID NO: 246358 - DNA, 836 bp, Homo Sapiens; identical to SEQ ID NO: 150746
  misc_feature (117)..(260): n is a, c, g, or t
  misc_feature (267)..(276): n is a, c, g, or t
  misc_feature (366)..(416): n is a, c, g, or t

SEQ ID NO: 246359 - DNA, 421 bp, Homo Sapiens
  misc_feature (314)..(314): n is a, c, g, or t
  misc_feature (381)..(381): n is a, c, g, or t
  misc_feature (389)..(389): n is a, c, g, or t
  misc_feature (405)..(405): n is a, c, g, or t
gggtacaacagcaggttcttttccaattcctcaaagcgctgcatggggtgggggcagagacagaagagaatgtaaacattgggttccaccccctggagctcaagggaagacccttacccagatagggactaactggaggggtggaagggaacaaggtgaaaggtatgggtcctgggtgagacaaaagcaggggggcctgagaacacagagcaaggtgggtttggagggagcacagcagggtgcaggaagggagatgggggacatttcctattccagtgcatgtccccttaaataaactgggtacaggagcattntggaaggagaaccaaaggacagaagacaaagcgagcacccccacgccgggccaacgccattcctctnttacacantttcaacacaggtccngattgagagccctggc

SEQ ID NO: 246360 - DNA, 843 bp, Homo Sapiens; identical to SEQ ID NO: 150766
  misc_feature (137)..(137): n is a, c, g, or t
  misc_feature (686)..(709): n is a, c, g, or t

SEQ ID NO: 246361 - DNA, 675 bp, Homo Sapiens
ctcgtcgctgcgcgccgcgcgcggagatttccctctccatttattgcaacgggttaaatgattaaccaacattccacaacttcttagatcttaaaaaccagaaccaaaagaaaccttccattttgtaccatcacaaatgtcttctaggctttatcaaggaccaaaaccactacaattctctaagtgatttccagtgatggaaacaagccagagacagtaaagcacccagagtggtcgagagagcacttccagatgcctgttgtcctctcgggggtgaccttgggactaggaacgacagaaaagacactgtgactttgacacgggctgtgccaccacacatcacgcgcggacacggggatcctgcagaggggcctctgcagagagcaaggacagcctcggttaagagggaggggctgggggcacggagggccagtggcatctcctctatcccggctggccggcagctggcagcacgcaccatgctctgctggctcccgacaccttcactgccccagcgctgaatccacaggagaggtgtcctctgagagtgtagggggctttctaggttcaaggagatgtgccctttgacccctgccaaggactcacagaaccatctcagctcaaacttggaggagcggcaggaggtggggggcggtcagtggccacacgccaccc

SEQ ID NO: 246362 - DNA, 870 bp, Homo Sapiens
gggttttgtctttgccccgtgtccccatgaactcccttgtccccagttgaccaacctggcctgtagcttctcacaggcgtaccatcccatccccttcagctggaacaagaaaccaaaggaagaaaagttctctatggtgatccttgctcgggggtctccagaggaggctcatcgctggccccgtatcactcagcctgtccttaaacggcctcgccatgtgcattgtcacttgtgctgtccagatgggcacatgcagcatgctgtgctcacagcccgccggcacggcagggatttgtatcgttgtgcccgtgtcagctcctggggagatcttttacctgtggcttactccgtctgcgtttcctccatctacgggctcaggatccctctgagagttgatgaggatggtgtaacaaagtaattttcttctatcgtgcctgccagggcttgaagctgcctggtatccacgtaggggaatggtgggtatccccatatgtctgtgtttgtttgagatttttaataataaataataaatttttgcagaaccccccgcaacccctccccgcctacccacgacaccgatacaacatacgcttccccacccggcgcgaccctcgcatccgatgccctaatacccgcccgtttgtcctgttcccctcgcccccccgaattattttccccccttttcttccttgtgcgtgcgccccccctatggttttgcttcgtgtgccccgcgcgggccgcgataaaatgccgccgcggcgcggccccacgcttttttgcccccaccacacccaaaaacacgccccccggcgcgcaaacaacccggcggcgggtggttcgagcgccacacccccctaggcgcggcgctcc

SEQ ID NO: 246363 - DNA, 708 bp, Homo Sapiens
tacgggcggcgcgaccgcgcgtcggtctggcggcgcgtgtggaccccttcggtgtgctggcctcctccatcgtcctgcccgtggccttgggccgcagccacggtgtggcttctggccttggcgctggcggctgcggccgcgcccgctgccgggggcccgcggcccgagccagcccagagctgccggaagggccgcccttcccggccctggcggggtgctggacactggccattttcactagagtttgcctgggagggaccgatctctgccccctcctctccccaggcctctggctgcaagtgatgccgcagaatcctgagaccaggtgcctcctgagcagcccgtgcgcctctccacagcggcgtttgccacccggtgcgggtctcttcagatgctctgatgcagagggcatgcccatattccctctgaccgagcctcgcactggggccagggcaggcaccaggcccaggcggaccagtcggacacggacctgtcctcttcctcgatagcgtctgctcctcacatttgtgtcgatggtgacttaggagaattgttccgattttccctgatctaagcaggccacgtttaaaataacatcaaggcgagcgtacgtgtcacccatctgtactgacattctcctcccctgaaatgctttcaagtttgaccagcccgtgatcctagacaagtgcacctggggtttccagggac

SEQ ID NO: 246364 - DNA, 256 bp, Homo Sapiens
  misc_feature (11)..(11): n is a, c, g, or t
gccctggtgangctggaaacccaggagggttatgggcactgccctcccctcctggagcccctggcactgaccacctggacttgacctgactcctggtcactggccaaacacccatccttcccccagcccccccggggccctggctggtgccgtgtgacacctgtagcccacctgtgtgtcttttccgcccacccctgcgttggccggtccagcgcaaacctggcgccagtgtctaaatgtccatcattctcagacc

SEQ ID NO: 246365 - DNA, 1307 bp, Homo Sapiens
  misc_feature (1125)..(1136): n is a, c, g, or t
gggtttgtgggtatttttctactggtataaatagcttctaattaataaatcgatcaaaggttgttactcagtatacatgaaattttttgcaggaaaagaaaccagaaatacagaataattcatagaaatcatggttctcaagtatttgttcaattagctttggggaagaaatgccaaatccactttgaggatgagtcttacgacacagatccacccacatgttgctcttatctggaatttgggacaaagcaatgcacaggccctcattcctgatgtggcgccctccagacatggctgcccaggaaggacggccactttagaagtgggacgtatcaccagtaagcttgaatgattaggatcgcaggtggctactgcattctgccgttcgtgaccgtgttctagcctgtagaccacccagctaccttcattcaccagtttttatccttcaccttttccagtatcgtgttagccactagttcttgagttttttggctatgatgtgtacgtttatgtatgtcattcatggactttcaactagaaaaggtaatgataaggttttctgaagaccatttgtaaattgtccatttaaccatttttcagcttgctttgaaacaaaagtcacacctcctatttttctatgaattagggaatgagggggagatcattcagttttacttttctttttgttgaaattttgtaccccggattgcagttggcacttttcctaaaacagaattttttcccacttaggtgtcagaatgtaccttttgacttccctaagaagcagcaggatctttttaactctctctggtctgtttagactttgaagtcccttctgtagaaaagtctcataactgagaaggctctgtttgggccgggtgggtctgctggcctccactcactgtgctgtttcctttgagtggcacacttgggaagctccggggcatgtgaaggagctgcaaacatgagaactaatgaaccaaggcggctgccaccaggaaggaacagaacgcaggcattcaaccatgacgtctgcacagtcgttagtaacatgtcattgtggtttcgttctcactgtggtaaaatttatttctgagcacttaaactgtgttgcatacccctaannnnnnnnnnnnctgtatcttcctgtgccctcaaataccctgaggtggataaactgttccagtttgtagccaattaccactgtaggcctcaatgtgaattcagttgaaatttgcaattctatcagcatttatgtatggaatccgatctccatgtcatttaaccgaaacaccaataattacctc

SEQ ID NO: 246366 - DNA, 1218 bp, Homo Sapiens
  misc_feature (1077)..(1077): n is a, c, g, or t
gcagggcctggagaaggacgacaaggatgccatcgaggagaagttccgggagcgcctgaaggagctcgtggtccccaagcacgtcatggatgtgtggacgaggagctgagcaagctgggcctgctggacaaccactcctcggagttcaatgtcacccgcaactacctagactggctcacgtccatcccttggggcaagtacagcaacgagaacctggacctggcgcgggcacaggcagtgctggaggaagaccactacggcatggaggacgtcaagaaacgcatcctggagttcattgccgttagccagctccgcggctccacccaggcaagatcctctgcttctatggcccccctggcgtgggtaagaccagcattgctcgctccatcgcccgcgccctgaaccgagagtacttccgcttcagcgtcgggggcatgactgacgtggctgagatcaagggccacaggcggacctacgtgggcgccatgcccgggaagatcatccagtgtttgaagaagaccaagacggagaaccccctgatcctcatcgacgaggtggacaagatcggccgaggctaccagggggacccgtcgtcggcactgctggagctgctggacccagagcagaatgccaacttcctggaccactacctggacgtgcccgtggacttgtccaaggtgctgttcatctgcacggccaacgtcacggacaccatccccgagccgctgcgagaccgtatggagatgatcaacgtgtcgggctacgtggcccaggagaagctggccattgcggagcgctacctggtgccccaggctcgcgccctgtgtggcttggatgagagcaaggccaagctgtcatcggacgtgctgacgctgctcatcaagcagtactgccgcgagagcggtgtccgcaacctgcagaagcaagtggagaaggtgttacgggaatcggcctacaagattgtcagcggcgaggccgagtccgtgggaggtgacgcccgagaacctgccggacttcgtgggggaagcccgtgttcaccggtggaagcgcatgtatgacgtgacaccgtcccggcgntggtcatggggctggcctggaccgcaatgggaggctccacgctgtttggtggagacatcccctgagacggccacaaggacagggatgccaaggggtgacagggatgggcagcctgggagtggacagccagcctggggggag

SEQ ID NO: 246367 - DNA, 778 bp, Homo Sapiens
  misc_feature (363)..(420): n is a, c, g, or t
  misc_feature (634)..(724): n is a, c, g, or t
tacatgaaaattcccatccagaatgtagttcgctactagtgaacacctatgtcaggagcaggcatcaccgtgagacgccatcggggtcaggtcagcgggacggggacagggaggttggtcatcgaaaggcagctgatgcatgtcgtgtcatttagcacctggtcatgagatacggcgagacccccaggtccagggaaaggtctccccttaaaaccacgtggagctctgctgtctctgggcagtctcacgtggacagactatgctcagataggtggcgaaggggctggagtggagataccaccgacggctgccaggggaggggcacgcacacacacaggcacgcacatgcttgcccatgaacannnnnnnnnnnnnnnnnnnnnnnnnnnnnnnnnnnnnnnnnnnnnnnnnnnnnnnnnntcagcacagcggtccaggctctggctcactccccgggaggcttctgtggccagggttcccatggcgggtctggtggcaacagcttggagaaaagcctcccgggaccaaccctcattcccaggtccactgatctggggtaggagtagccaagtgttctgacaggcggttttcccgtaaaccgaccccttcagcgtttctgctttttgttgtttgnnnnnnnnnnnnnnnnnnnnnnnnnnnnnnnnnnnnnnnnnnnnnnnnnnnnnnnnnnnnnnnnnnnnnnnnnnnnnnnnnnnnnnnnnnnacggacgcgtgggtcgacgatagtcccgggaattccggaccgtaccagcctgcc

SEQ ID NO: 246368 - DNA, 1148 bp, Homo Sapiens
ggagggctgctggcacccttactcaaggacattctgaaagcttcccttgcacatgtggctggctgtgagctgtgtcaaggaaagggctttatttgtgaattttgccagaatacgactgtcatcttcccatttcagacagcaacatgtagaagatgttcagcgtgcagggcttgctttcacaaacagtgcttccagtcctccgagtgcccccggtgtgcgaggatcacagcgaggagaaaacttctggaaagtgtggcctctgcagcaacatgatgcccctgagtactgtgaaaaagactgttcaacatgccttatgataacaccgatttgtgtctattattggtgacattgttttagatattgggtattgtatattaaggaaaaagatggtctatattctctttattgcatatacttaatgtttcaaaagaatgcagattctgtgtttaagcacagggctgatagttgtggttttgtttacaaatgttctgtttctggctgctattggttttttaaagaggttttttatacttttgtatttgaatagttatgtttcactgatgctgagccagtttgtatgtgtgtgtatatatgtgaactgtaactgacaagatgaattactcagtttctctttctctaaagcttgtttgatgaaactggttggtcctttcagtgaacaaaaatatgaccccaaatctgtttgctctggcttttatttcttcaggaagcagacttccacttaaatgccattttgtgattgtgtcaatcatacacattttatttacttcagagtttgaatagagagtacacatttcttctgcagatttatttcatgatgagtttgagttgcttagcagggcgtgtgggtcccgttgaagtgcagtttgaagcaactgcttctagatggcactctttcaggtggcacaaatttgaacctgtatttgtcatctctgttccacacactgcaatgtcaagggatgcagaagtgagtagaattccatccctgcccttgaggatcttgctttaacagatgtaaaactgaacataaagtatttgcagatttaacgaactgggggaaataatgacagtgtggatctagtaatacattaaaatcatagacattgactattaagggttaatggatcccc

SEQ ID NO: 246369 - DNA, 976 bp, Homo Sapiens
tggacaccaggagtctgttgagggggtttgaaggaaggaggctgcggctgcgtcctggactccgtccttcggtagggagtccagcagggattggctcagcctccgcacctggtgtgcagccggatctccatcctgaggaaggccttgaggttctcatcagccacgtgctcctccagggcagccagggcccgctccccaccgtcctggaagtgctgcagcagcctgtccgcgtactccacccacacgcagttggggcagccactcatgcagcagtttgtgggcggctggagctcaggtggcagcgatgccttgggcggcctggtgccgtccgcacctgcttgggagcccacctctacgtggtctgtcccgaattttctgcgcccatcaggggcttgcgctccgggatggtgcctttgaagaaagctgccacctccaggaagcctctggcagcagtccgggctggagaaccggcgagccccttcacttatttaactagtcctgcgaggggcatcatccgctccatgtccacggccagtccccagagcccaggagggctcgcacacaggcgctcggcagatactgagaaacaggaaagtggccgttcaccgggctgcttcctctcccaaggctaagcggcccctccacagattccggggcggggactcggtaagagccgatggaggagaggagcgaggggtccttcggcggcggccagcgcgcgatcctcccggctccgtccccacatgcgggtggaggggccggggctcctcccggtacgtgcgggcccccggacagcggcctctcggacgtgcccttcggcgctgccaagacccgtcctggtacttgccgagccacggaccgcggcggctaccgcccggcctccctcgaccaccctccgcagcagcatcgcccgcggacgggatccggcaacccctgaccgtgagcggcgggcgctccggccaatcccggacctccc

SEQ ID NO: 246370 - DNA, 822 bp, Homo Sapiens
  misc_feature (45)..(45): n is a, c, g, or t
  misc_feature (50)..(50): n is a, c, g, or t
  misc_feature (52)..(52): n is a, c, g, or t
  misc_feature (54)..(55): n is a, c, g, or t
attagcttctcctgtgaaagagacttccagcttcctcctcctccncttcncncnnctcctcctgccccagcgagccttctgctgagctacaccaatgggaatcccattggggaagtcgatgctggtgcttctcaccttcttggccttcgcctcgtgctgcattgctgcttaccgccccagtgagaccctgtgcggcggggagctggtggacaccctccagttcgtctgtggggaccgcggcttctacttcagcaggcccgcaagccgtgtgagccgtcgcagccgtggcattcgttgaggagtgctgtttccgcagctgtgacctgggccctcctgggagacgtactgtgctaacccccgccaagttccgagagggacgtgtcgacccctccgaccgtgcttccggacaacttccccagataccccgtgggcaagttcttccaatatgacacctggaagcagtccacccagcgcctgcgcaggggcctgcctgccctcctgcgtgccccgccggggtacgtgctcgccaaggagttcgaggcgttcagggaggccaacgttaccgtcccctgattgttctacccaccccagaccccgcccacggggggggcccccccaaagtgggccagcaatcggaagtgagcaaaactgccgtaaggtctgaaagcccggggccaccattttggaagcctccttcctggaccacgggaagtttccatcaggttccaatccccgaaatctccccgggttcccgttccccctgggggttttctcttgaaccagatccccggggcccggcctcccccgaaacggggccccccc

SEQ ID NO: 246371 - DNA, 498 bp, Homo Sapiens
  misc_feature (180)..(188): n is a, c, g, or t
  misc_feature (209)..(445): n is a, c, g, or t
ggtgtgtagaggacattttcttaagcccttaagtacaaatttaagaggtaagtgcttcagccattagggttactggcttgttcatctttcccactgagtgtaaatatttagcttagggtttaaaatttgttatgtagctttttgcacttgtccatgtttatactactgtattattattannnnnnnnngagatggagtctcgctgtgtnnnnnnnnnnnnnnnnnnnnnnnnnnnnnnnnnnnnnnnnnnnnnnnnnnnnnnnnnnnnnnnnnnnnnnnnnnnnnnnnnnnnnnnnnnnnnnnnnnnnnnnnnnnnnnnnnnnnnnnnnnnnnnnnnnnnnnnnnnnnnnnnnnnnnnnnnnnnnnnnnnnnnnnnnnnnnnnnnnnnnnnnnnnnnnnnnnnnnnnnnnnnnnnnnnnnnnnnnnnnnnnnnnnnnnnnnnnnnatgagccaccacgcccagcctatagtactgtattcttattctccactcttgct

SEQ ID NO: 246372 - DNA, 334 bp, Homo Sapiens
catggtttaaacatttattgtaagtcctagatgaaacatactgaaaagattatttttgctttaatcctaatatgctaagaaaagttcattggcacaaatatccagaggtattttacagtttcatttacctttggtggccaagagtattttgctaaccgtatggatacagtcacatagtttccaatgcacagctttatgctaaagagaattcacaatgtgtctcttttttttgctaaaaaagggatgtaaaaagtccaatatgaatacagaacgagtgcaacacgaaataccacaatatgcctatcatgtaggcttttgcacggacgcgtgggtc

SEQ ID NO: 246373 - DNA, 727 bp, Homo Sapiens
  misc_feature (185)..(229): n is a, c, g, or t
  misc_feature (475)..(678): n is a, c, g, or t
atgcccttactgatacacctaccttataggactgaacctaaaggcatgacatttccatacttgtcacaagcacacactgattctgcccttgtcacttctgtgctcactcttgtggctctatcctcctcctgcccttccgccttccactcctcccttgcacccatcctgcacacatctcccttaannnnnnnnnnnnnnnnnnnnnnnnnnnnnnnnnnnnnnnnnnnnnctcaatctagaaagaacttgctttgtacagggctgagatggaggagaaaaaaatgcccccttcagaatgcataccaaggggaaggtgctcggtcactgtgggagcagggaaaggtgcccccactccccgagagccaggggaaggagtggctctgggcagagagggacacatagcactggggtggcaggtccttttgaggtgatgggccggttttgtgagatgaattgtatcccccaaaaagacagnnnnnnnnnnnnnnnnnnnnnnnnnnnnnnnnnnnnnnnnnnnnnnnnnnnnnnnnnnnnnnnnnnnnnnnnnnnnnnnnnnnnnnnnnnnnnnnnnnnnnnnnnnnnnnnnnnnnnnnnnnnnnnnnnnnnnnnnnnnnnnnnnnnnnnnnnnnnnnnnnnnnnnnnnnnnnnnnnnnnnnnnnnnnnnnnnnnnnnnnnnnnatggatgcgcatccccatcccaagaagtcgggaagaagccgggaaggct

SEQ ID NO: 246374 - DNA, 812 bp, Homo Sapiens
  misc_feature (50)..(50): n is a, c, g, or t
  misc_feature (199)..(325): n is a, c, g, or t
gtggtagttagaatctagttaattctttaagagtagggtacaagacttanccctcgcctggcatggccctaggccctgtttataatttgaggtcttattgccacaaagagtctgttctgtcagtctcatgatctctattttaacattaatgctgctcagttgttgggtctaaaccataagagggagggaggtacagggnnnnnnnnnnnnnnnnnnnnnnnnnnnnnnnnnnnnnnnnnnnnnnnnnnnnnnnnnnnnnnnnnnnnnnnnnnnnnnnnnnnnnnnnnnnnnnnnnnnnnnnnnnnnnnnnnnnnnnnnnnnnnnnagggagataaaataatttaatccattggcctctgtgactgtgggactaacatggctatgatctgtcggacagacttcaggctggcacccaggcaaaattctatgctgtagtaaatgcatcatgcacatttgtaacaacacgtacataacaatgtcacaaaatactttcacggtgacaactagattagtgttttattgaatagctgatgacataaactgtctcatttggtgccaagactgaccatcaccagcataccaaggtcatcactgatcagaggtctaacccaaggagggggtcatgtgcaggcccagcggtggggaggaaagatgctgcagaggagatggatgcccacagaggcccctgagcggataccatgctcactaagtggtaagtatagactcaacgtaggctgtaagctctccccctgtgtaaatgggaccccgtacacttgagagtcaagggtctgtttgggggcagggatagccac

SEQ ID NO: 246375 - DNA, 459 bp, Homo Sapiens
  misc_feature (30)..(30): n is a, c, g, or t
  misc_feature (39)..(39): n is a, c, g, or t
  misc_feature (61)..(61): n is a, c, g, or t
  misc_feature (94)..(94): n is a, c, g, or t
  misc_feature (107)..(107): n is a, c, g, or t
  misc_feature (172)..(172): n is a, c, g, or t
  misc_feature (179)..(179): n is a, c, g, or t
  misc_feature (194)..(194): n is a, c, g, or t
  misc_feature (202)..(202): n is a, c, g, or t
  misc_feature (232)..(232): n is a, c, g, or t
ggaaaacctaaggcacacggccacgaaacnagcagggangccttaaaaagactcaagtgcnaacagagaagggacaccctgggctgggctgganaatgtttaaggtnccttttagtccatgactcaagtgatactgttttaggctatcaggtagtaaacacgatcttagacntccccanctttgtaagcagaanagtacggnacttcaccacatctgcttcccaccatgctnctaagcagctgtcttccccctgctaatgttacaaccaaagcagccaccccacctcctctcgtgttgagcctcacgaaccgctgacccagctggaaagccagcgccctgccgcgtcaccctgactctgctcagagccagcattccagccacaaagagggcctccttcctttcctctttcataaaaatgttttttgaagagttagagtatattttaggctttttatctt

SEQ ID NO: 246376 - DNA, 353 bp, Homo Sapiens
  misc_feature (50)..(50): n is a, c, g, or t
  misc_feature (164)..(176): n is a, c, g, or t
  misc_feature (194)..(255): n is a, c, g, or t
gtccctcttgctcacccttgacttggaaaaaccagtttctcttttattgnatgttactaatctctattctaaaaattcagctcaattctcaaccatactccaaactctctcttttccagctacctttactccctctccttcaattccactttcctctgcttacnnnnnnnnnnnnnctgacagggtctcacttnnnnnnnnnnnnnnnnnnnnnnnnnnnnnnnnnnnnnnnnnnnnnnnnnnnnnnnnnnnnnnagggcggggtttcaccatgttgcccagactgggtcttgaactcctgaggcttaagcaatccacctgcctcgggcctccccaaagtgttgggggatcac

SEQ ID NO: 246377 - DNA, 376 bp, Homo Sapiens
  misc_feature (107)..(107): n is a, c, g, or t
tgtgtgttgtcctggggggccctatggggttgctggttgcttaaggccgggggttgggggcaagcttcgggcccctggccaagccccttcaacagtgggggctgggngagcctaagatgaatgtgggtcctgacgggaaggcaggtctgccgaggaagcccaggtctgggaaaactctgtcccggggcccttgctctgccctgctccatgcctcatggtgggtgcaggcaagtgccaaggccaggagcctgtcctttcagggctgccccacaccgtccacacccagtggtcaggcagagggagaaaggggctggcggcttctccagtgggagggaggggaaggcaggccttggaaagttagtacttcacagtttta

SEQ ID NO: 246378 - DNA, 852 bp, Homo Sapiens
  misc_feature (353)..(416): n is a, c, g, or t
  misc_feature (627)..(688): n is a, c, g, or t
  misc_feature (745)..(753): n is a, c, g, or t
ctgactcctgcccagcagtatgtcttatggcacgaaggttatgcagtgccacaggcggggggctgtcccagacctctgtcttcagttatgtggttcctctgctcagggcctgagattccactttgttatattcagatccatcagctgagaaatttttcaacagaatgtttaactggtttttaagatttaatctctcagtagcattacggaacaaactctttagattcaaactggggcccgagatcaggcccccctcaactgaagcatcgggacactaaattttttcaaatcgacccctttttcttctgggaatactagagacatccccacagccctctgttgcttccttctcnnnnnnnnnnnnnnnnnnnnnnnnnnnnnnnnnnnnnnnnnnnnnnnnnnnnnnnnnnnnnnnnttcccaattttcctctctgccaaaaaagtatataatccaaggctgggttgtatgggaaacttgatttccccctaattacggtggcttttgggttctatacccagcactgttcccatgtaaatataatgcaagcccacatgtgcagtgtaagttttactagtagccgtacttaaaaagttaaagctgtggctgggcatggtggctcacactnnnnnnnnnnnnnnnnnnnnnnnnnnnnnnnnnnnnnnnnnnnnnnnnnnnnnnnnnnnnnntgcagtgagccatggtcatgctactgaactccagtctaggcaacagggagacccttnnnnnnnnnttaaagccaggtgtagtggcatatgcctataatcccagctgcttgggaggttgaggggaaggattgtttgagcccaggagtttgggtctagcctccgca

SEQ ID NO: 246379 - DNA, 393 bp, Homo Sapiens
  misc_feature (29)..(29): n is a, c, g, or t
  misc_feature (67)..(94): n is a, c, g, or t
  misc_feature (133)..(133): n is a, c, g, or t
agggctgggtctcggaactctgggccctnaaagtggatcctcccggcttgggtctgcagggcactgnnnnnnnnnnnnnnnnnnnnnnnnnnnncagcctaatctttataaatctccatcccccattactctnggttcaccccctatcgtttcttagactatttaacagcctcctaacttcactctacttttaatctcttccctctcccaggtctttctccatattttaaaaaactagtttcaccatccattcctctctgcccttaaaactttctggtggttttccatggcttaagagaataaagcccaattctttgatttgacatgctaggcattccataatcctctccgaacctaactccccacttcctttccctcctttacacctcataa

SEQ ID NO: 246380 - DNA, 422 bp, Homo Sapiens
cccgccgccaagcagctcctaggagcctggcagggaaaggccatggtgaacgaacagccagacgaggtccctcaagtagcttgcattctggaagcgaagaaagatcatgaacaagtttcaaattggtaaaataattgtcagtggagattcatcccataaaggaattgagtaaaaggaagaactactttcagtaagatggtttgggttggagtttctgttcataagggcagaaatggactctctctgacttaaagagaaaaaactttgttaagagtttggggtaacccacagaattatcaggatgtctcagaatacagacaagaacaaagggaggctccgcagccaaaagtccctcctctaaaccactttgatgaggaccaaacaggtgctactgctgaaagctagacaccacatcctactcc

SEQ ID NO: 246381 - DNA, 149 bp, Homo Sapiens
  misc_feature (15)..(15): n is a, c, g, or t
  misc_feature (53)..(53): n is a, c, g, or t
  misc_feature (100)..(100): n is a, c, g, or t
  misc_feature (149)..(149): n is a, c, g, or t
ttaaaagttccccanctttttaaaatatgccatatacatattattattgttgntttttatttttaggaactgaaaagaaaatggtgaattgctgccctanactgagaggagaaaattaataaatcttaaacttggtgccccaactattn

SEQ ID NO: 246382 - DNA, 404 bp, Homo Sapiens
  misc_feature (229)..(229): n is a, c, g, or t
  misc_feature (240)..(319): n is a, c, g, or t
  misc_feature (352)..(352): n is a, c, g, or t
  misc_feature (393)..(393): n is a, c, g, or t
gggtgaggcccgcccacaccccagcaccccatgagacgcccaggttgcgggagggaggcacctcttcctggctgatttctccatagcgcttgtcctcaaaccgctgcttcacggcggtcagagagacttgcctgtagtccttgggggcgtcatcatggaagctggaaacagagtcacgtggagtggacatgtgaggcacccccaccccatttttagcttcagttcactnaagtgagcaannnnnnnnnnnnnnnnnnnnnnnnnnnnnnnnnnnnnnnnnnnnnnnnnnnnnnnnnnnnnnnnnnnnnnnnnnnnnnnnctagcaattcctctttaggtaaagacccagggnaaaaggaaaaactatgtccacacagaaacctgttaattagnaatgtttcatg

SEQ ID NO: 246383 - DNA, 315 bp, Homo Sapiens
  misc_feature (195)..(249): n is a, c, g, or t
atgagccacagcacctgggccgtaaatgagagtttttatgtgcaagtaaaggcagttaaataactttcagtaataaaatgcatcacaatatttcacaggtttaaaacacaacctggttacctttttgaataaaataacatttggaagaaggcatagctacttttaaaagctattctatgctttccttgtgtttgnnnnnnnnnnnnnnnnnnnnnnnnnnnnnnnnnnnnnnnnnnnnnnnnnnnnnnngttaattcctataattcttccattttgttatgaatattctgtaatatcaaacattcatttttaatc

SEQ ID NO: 246384 - DNA, 383 bp, Homo Sapiens
  misc_feature (171)..(180): n is a, c, g, or t
  misc_feature (211)..(276): n is a, c, g, or t
  misc_feature (293)..(293): n is a, c, g, or t
  misc_feature (311)..(311): n is a, c, g, or t
  misc_feature (336)..(336): n is a, c, g, or t
  misc_feature (363)..(363): n is a, c, g, or t
  misc_feature (368)..(368): n is a, c, g, or t
tacatgtgggaaagcttgattgatagtaatgattagcgcctgcatctcacaatcactgagaaatgaatgcagcactgagctctgtttgccctctaagcttgtccccagaaaaaacaagatataccctaaatagtaagttataatatttttattagggaacattattagagnnnnnnnnnnaatatatctcgtagccatgtcatattaatcnnnnnnnnnnnnnnnnnnnnnnnnnnnnnnnnnnnnnnnnnnnnnnnnnnnnnnnnnnnnnnnnnncactctgtcacccaggnggggagtgcagtgggccnggaccctggggctcactggcaggcntggaccctccccaggacttcaaggcantcctncccacttccaggctt

SEQ ID NO: 246385 - DNA, 426 bp, Homo Sapiens
  misc_feature (123)..(198): n is a, c, g, or t
cgcggcctagcgttgctgcctgctctctccagccccttctcggcgtctggaagtgtctggagtttcttttttttatttcccctaaactgccattcaaattaataatcctcctaataacctgannnnnnnnnnnnnnnnnnnnnnnnnnnnnnnnnnnnnnnnnnnnnnnnnnnnnnnnnnnnnnnnnnnnnnnnnnnnagggtcgcagccggaggaaacccggcagcagtccgagggtggaggtgtcccagcccgtaggggcgttcgccgcgggttgggggatggggtcgaggcaatgatcctcgaggcttttgtgtgccctctgcgcacggaattccgaccgccgcttccgagcgcggggctggttgcattccccggggatttcgtttccaaattaaacgttaacgggggaaacaaaggcagacg

SEQ ID NO: 246386 - DNA, 1000 bp, Homo Sapiens
tttattgatgccttaattccccattatctttgataagtacctaaatcttgcatgccaacacaaacacagataagaaatcaagttacattattccaatttattgcacaaatacaggtaattgagaatacataaggaggtcacaagcacactaataattaatgatacaatactgcatcgtgggatagagtagttatggagcaagaaattaaggctggatgaaaaggtgttcattcagtggtcttcatggagaagatgacattgaagttgaaatttagaaagacaatttggggcagtgatagtgtgaagagaaccccagcattgtgctctgtgtctgcctgaggtgggcatactataaaaggcaggtagggtggggcaactctcagaatgatcttgagaaaaaattcataaattgtgtgttgtgtataagaaatatgtagtcaatgatgaaaatataaattgagtgaaataaaagagatatcatatactatacaactgtaaagatatagattggatccactcctagaggtcctggtaaaccagggttaagagtctgtatgtgaacatccatgccatggaagtgatgtgattaatacctacagatgatcaagagtagagatgcagcttagcatgatacacagtgaaagggtagggtttttattctgctgtcaaatttggagaaacaaaattgtattttagaaaaatgagaatggaaaacctcaggccctacaattaaataaagcataccaagtcacttaattatttgttgtgtgattgtcgtgatcactttcacaatctagggaaattaacatctacctgtcaccttttaatcttggcatcctcaatacataaaatgtaattatttcattaattgtgactaatactctcagactgatttttttcagtccatctgtaggactcttatacttaggctaaaaacataaactatcttttccttcttttataaacagaattttttcttagcttgcttttcttcactacc

SEQ ID NO: 246387 - DNA, 1000 bp, Homo Sapiens
ttttttttttttttttaagcttgacctaagcatacacagaaaaaattaatatttttgttgttgttctagattctattattcaggcaggctttctatattttccccttaggtatctatactttagtatagatgctgtcactgtgagagactacagaaagcagggaaaatagaagttctatagcttcatctaccaaggaagatctagtttaaaacctagtaggggacatgtcccaacaacttgaaaattagtttgacatgtggtgactttatagcatagtggtcaggagttaaacctacattccagctctgccattttctaggtagtggctttgggcaagtttcttagccactataagcctcagttttcacatccgaatattggaactatattaaaacccaactcaaaggattgttttgaggatgaaataggagaatgtatgtaaaatgtttagcacagtggctagcaatagctcagtgaatattaataaatattcttaaaattgaataatagaatacaactcttcccatgtcttcgggtagcttcagatccaggaaaatctcttacgttttgcaagattttgtggggtggttctttttggggagaagtttcatagattggctcagattgtcaaaagaatctatggccccccaaaatgttagaaccccatgaattagatgaatatgggaactaaagaaacactgtcttccttgttgacaagtgtcgtcttcctgccctcagacaatcctttggctacaagtgttcccatggaacctaatagaccagtttggagtttctcgttttatgaaatcctgagctatctctgatttcaccaaaaaaccccaaatgtagaagtaggatgtgaagccattggaaagtgagggactattagacaactctaggcatgtggggtggattttaaatcaagcagatgttttcttttctcttctcgcaaagaagtcggcctcatatttgtgttattaagctgaccttagctaatgt

SEQ ID NO: 246388 - DNA, 1000 bp, Homo Sapiens
gtatttttagtagagatggggtttctccatgttagtcaggctggtctcctgccctcaggtgattgcctgccttggcctcccaaagtgctgagattacaggcgggagccacctcacataaattctcttgactcctgggaaagggaatttgctttcaccatattaccccttcttccagccacttctcccagaatactaaacttttagcctgtttaagcagagaagttgccagccccaaacaaagttgacagctgtggaattatcttactactaattggcatcataaataacagaaatgttaactaatattgtttatcctctcatatttggcactgcctttccttttaattaggtaaataaacagttataatcttcatcttccagggcccattaatcagctattgcttatagaattctttaagaactcatttaggttatgattatggaaattaaatttttatgaaagatcctggtaacagagtctaaattattgaattgcataatttcccagtagttcctttccttttaatgagccttaatttagtttgactaattaaaagctttgtccagaactcctctagtgtgaagttgtaatctactagcatagatttttttttttttttttttgagatggagtctcactctgtcgcccacgctggagcgcagtggcacaatctcggcccactacaacctccgcctccggggttcaagtgattcccctgcctcagcctcccaagtagctacgactacaggtttgcgccaccacacccagctaattttttgtattttagtagagacggggtttcaccatgttggccaggatggtctcgatctcctgaccttgtgatccgcctacctcagcctcccaaaatgctgggattacaggcgtgagccactgcacccagctgcatagatttttttaacagtacaatattaaaacaaagactgatgtttgtgtgaattatgattctttattctgactggtgcctatgaaagcaatag

SEQ ID NO: 246389 - DNA, 1000 bp, Homo Sapiens
aggcacagttttgctttttatctcatcaatatacatttaaatctaacagtctaacagcctcacactcctcaactctatccaagccctctcctcttctctcccactcttgcccagtcagcttctcaactgtcccagggacaggaagtcaccaggcacaaatgtgatttgaggaggcagtggcacctgtggctctcctgagaggtgcttaggagagtccagaggctgagaaggcccaggtgaggagaaatggtgggctgagtctcatcggaaagcactgtttcctgggactcagtcccattcagagtctgtctccctggacctgtgcctgccactggtcacatcagcagacgggcagcaatcctcagccaggggaacttgtggataaaagggggcctttagcccaagtcacactcagagagcgagcaagcttattggaatcccctttcacccaagctgtgtagatgctcctgccacagcttcctgacccctctgtgattccaggagtgcaggaaggggctcttgggatgtgccacccaggaagacagagggccagtgctgctacctgcagccacacgactccacgaccatgtcctcatactgcttatacaccacgttgttggcagagtcaatgaagaggatgctgatgggactcagccgcgtgggcacacagcaggtgggtggtgtggactcggggtccatggagttcatcagggtctggatgactgcatgattcgtgggctccaggtgggagcgcaatgggaactcgcacagcccctcgcagtggaaagcctcgtactcaaggggtgcgatgatccagtcgtcccagcccatgtccttgaagttgacatgcagtgccttccgactgcagcgagccttaaggttcttgctgggtcgcttgccctggcgagtggccagtggggcccgccgttttcgccgctggctgaacaggtactcatacacggtcttatcgtcctggccagagcgggccttaatctcatta

SEQ ID NO: 246390 - DNA, 1000 bp, Homo Sapiens; identical to SEQ ID NO: 157353

SEQ ID NO: 246391 - DNA, 1000 bp, Homo Sapiens
ttttgttgcattgtacttattttgtacagttaccttttatttatagcgaaaatgggttttttcatttacagagtaacaaagatttttctttaaataaatgtatttcaacgaaaatgaactgacttaaagaaaaaatattaaggaaataatcacaaagatggtacacacggatcattaaaagatacggatgtatagatacatatgtcacaaatgattaagacttaaaaaatgtaaccctcccaagaagtgggagcctcccaaagtggagaaggcaaatacaatttccatttggggggataaggagaccgacttgcagagaggattagtaggttgccccagaacacacagcaaaggtgtggagccccttgtggtctgaaacattcaggaccctatggcaggaggtgagactgtccaataattcagcttttttcaaggcatagacccaagactcagacaacctcaagaaaggggagtttattttggatataaaggcaacaggaatcctgaccaaatggtcagcagccctctcagcagtaggtatttttgtattgggaacccaaggtcctctgcttagtggctcaacgcttgtctacctttccaaggctcaacgcttgtggagccttgtccacaagcacctgctcccaagggcctccctccctgagttcaaacgcccaagacagagttgatctgattggctagttcaggcccagcctacctgattggacagagcttggtgccaaaccccctcataggctgctggtcagagcctgtgggggcgtgtggtcaggtgcccaatcagctgtgagcaaggcctgtaagtgcaggtgcctgagggctcccaggtcagagttagctgggactggggtcactgtcctgctggggtggaatgttgtttgagccattgcaacgtgatctgcctaggaaagatacgtggaggggtcggggtagggggttgagccccttgcaggagggggcatgccagacctaatgggcacgggac

SEQ ID NO: 246392 - DNA, 1000 bp, Homo Sapiens
ttttttttacaatgtgtttattggacacacaaaaaaactttgcaaccatcataatacatcaatatttaacctagataattctgaaataatttggattctttcatttttcaggatttgagctcatcaattatgttaaatttcctatattctgttacaaatataatacagatttcataagtctgccttgattcactgctccctaatccagagcagttaaatttcaaaatcacatagttatatagcctacctgccaaaaaagaataacccatccctgtcttcttaaagtggtagggttttaaaattcatgatacaagtaacaaagtaagttgataacaaatactattttgaactgggcaaaatctagcccaatatgtaattgtgttccccttgtatctgagaggcctgtgttggacaaccatagtactctgctttcactgtgctcagataacctgaaatatatagttgtttctgagtagttctgagtaggaaagaaccaaatgtaaatttccttagagaccatcctggagaagacagttctaaatcggggcttgatttttcatctatgatcctagatgttctcctgaaagaatgactagcctttttataacgatacaaagttttttaaaaatacataaatgtcataaagtttattcctgtgtatacacactctgggttcaggaggttttgtgcttacatttcactactcaaatgccttcgcaaatctcagaacattcctcaccatcactgcaggcctgtgaacagataactttcatcaattaggatggctggctagtggcagggacttcatataaagaaatctttcccagaattgtttttccacattgccttctaatttgatcactccctataacagatgttcaaaattcggccacagctctcttatgaaggcagagtcagataaaatgatattctgcaattatctagatcataagcataaaataaatattacaaaaatgattgtatttaaagaaatttttta

SEQ ID NO: 246393 - DNA, 1000 bp, Homo Sapiens
ttccacaaacaaagatggtttaatagatttcagcatgtttccacttgacaatgttatacgaaaatagaatctttattaaaatagcaaggcataacaatcactgctactcaggaaacactgtgtttattctttttaatcatcaaaatcaatgactttgggcaagacctgtgaaatctcagagcctgtttctccatctggagaacaggcaggtagggcattgccagctccctgtgagtgggggccactggtgggaggagatggccctggtcgcccatgggatgagaaacttactcctgcttctgtccctggagaaggtcagggagatgccagtgtggccttaaggcaattctaacacttgcttatctcgttttgtaacagagaagagagagctctcagccttggccacaccagcatggagcccccttccccagcgaatttatttttcatggtcactttctatttttggcagtgagtgatacatgttatccactattggcagcaattggggggaaaaaaagttcattttaaaaacaaagtttaggccgggcatggtggctcatgcctgtaatcctagcactttgggaggcccaggcaggcaaatcacgaggtcaggagttcgagaccagcctgaccaacatggggaaaccccgtctctactaaaaatacaaaaatcagttgggcgtggtggtgtgcgcctgtaatctcagctacttgggaagctgaggcagaagcattgcttaaacccaggaggtggaggttgtggtgagctgagatcgtgccattgcactccagcctgggcaataagcgtgaaactccgtctcaaaaaaaaaaaaaaaagtttaaaaagcgagtctgtttaaaggagaatatttggtaaacaacaatattaaaatatagcaaataatagtaacaataatcacaatggtaaggaaacacttcattagatcaacttaagagtattttattcttggctgggcgcggtggctcacacctgtaatcc

SEQ ID NO: 246394 - DNA, 1000 bp, Homo Sapiens
cactgagatgtaacactgtaccttctattgtaggtgctccaatctcaggtataccatccaataatgtcttacatatgtctacagccatgcaactgcctcccagagcaacatctcagacatttccaggctccagcagacttcctgatgttccttctctttcaatacaaacctccagtcctacaggtaactgctattacaacttctagtaccatgtgttattgagcttcatatagatcggaattgtacaatgtgggctccttgagatctgctttcttctgcttaacgttatgtctgtaaaacatctttgcatggggcaacagtttattttttcattgctatgtactattccattgaatgcatatgccccaatttatttagttcatcctaacgtggatgggtatgtgttgttttctgtttgggactatgatatataaaggtgctaggacctttctcacacatgtctcttggtggccacagccctcgtttcttttgagaatatgcccaggagtttctggggcatggaaatatgtatgtttaactgtagtagacacctccaaactcttttccaaaactgaaccaatttacacttcaaccatcagtgtatgagagctcttgctgttacccaccattgtcaacacttgttgttgtcagtccttttaattttagcctttctaatggatgcataatggtatcttactgtgggtgtaatttgcattttcctcttggctgtaatactgggcatcttcttatgtgctattggccacttgtattttcctctattatgggggtctccgtgaatcactctataaagggcctgacagttaatatctctggctttggaggtcatatggtcttgtccctactactcaactatgctgttgtcaagcaaaagcagccatgggcaatgtgtgaatgaatgggattggctgtgttccaacacagcttatttataaaaacaggctgggatgggaggtggattttgctggtgaggctttaattt

SEQ ID NO: 246395 - DNA, 1000 bp, Homo Sapiens; identical to SEQ ID NO: 157406

SEQ ID NO: 246396 - DNA, 1000 bp, Homo Sapiens
gtagaaagaacaagtaactgaagtttaaaagccacatttgaacgacagcccaatagaatacgaaaatacaaaattaagttaccagacaatgtataggttcaccactaaattaaacagagataagaggaccggtgaactagaatactgagcagaatgaatacagcaaaatacagtagaaataaaatatcataaaattttaattttaattaaagtctagaatgaggagcaaaacatgcctaattgtttcactagaacagtaagtatgaattggccacagcaaataaggccagtcagatccaaggactggaaaaacagaatctttccctccatgggagtagctaaaaacatgcattgcaaagggcatggatacagagaggaatgaattgttcccattactgcaatcagtatcattgtgctttgtcttgcataactgttccaagtcaagtaactagtctattaagaggctgggatgggactcagggtcaactctgcctgactccaaagcccatgaactccatgggcccttgaggttctggagagtgccacttctgcgacagaagtaggattccttagacattctcatccatctattattcttcactactgggaataatctcctttggacaatgcttctgaagcaacttggaaggtcttcaaataatttgagaaagtgactgagggctgagtttaggaaatcaaggcccaacattactcatttcttatcatcagagaaactggaaagcacataagaacacactccacatgtttgcaaattctcacatttgcaaattcttttcattttagtattttcagatttagtatttgaaaacagattaaatcaaattactgtgcctgaaataacctcttactctaaaagcaagtgacataaaaaatagatctgtagagagacatttcctcctgctgcaatttccaagactccaaatgcaggagtggtcataggttaaatacttgcagcacacatggaaatcacacacagcta

SEQ ID NO: 246397 - DNA, 933 bp, Homo Sapiens
tcataaagccctttctactcccagcactctcttcaaagtattcttcacttctgagttcctaagactacagataaggggattgagcatgggattaaagaggctgtgaaacagcaggagatatttcttctgctccttggggttcccatatctgggtccaacatacatgataatggctgtgccataaaagagtccaatcacacagaggtgggagaagcaggtgcagaaggctttcctctgaacttcccttgattggatctgaaggatagcacagaggatgcacatatatgaaactacaattgtggacaagggtcccaccagcccagaaattgctccggccaagaccatgttctcattgatgtgggtatctgcacaggcaagtttgagaacagccaagatttcacaaaaaaagtgataaattttctggggcctacagaagggtaaaggtagaagtaacacaagatgaatcaaggataaaaggactccagtggtccaggaagtcaccgcgagggtgatgcagactctccaggtcatgatggccaaatatcggagggggtggcagatggccacgtacagatcataggacatcaccaccaggaggagacattctgtgacagcaaaagtggaaaacagaaaggtctgcatcatgcggcccgcaaaggagatgggcttggctggatgcaggaggttcaccagcatccggggcaccgtgttgcaggcgtaggcgatgtcgacgaccgccaggtgtgagaggaagaagtacatgggggcgtgcagtctggagtccagtgagatgagccccagtatggtcccgttccccagcagggtgaagacgtagaacagggagaagagcccaaagaggagcatctgaatccttgggccaacgggaaatcccagtaggaggaactctgtgatggatgttatattgtcccccat

SEQ ID NO: 246398 - DNA, 1000 bp, Homo Sapiens
atacataataagttttatttgaaggtcagaaatggtgtccatgttcccattttatttttcctggatcagaccattttatgaacaaatcttaaaaaaaattcttttatacaaaacttataaaaagcaccaagattttctaatacaggaagaaaaaaggcaaacaaagaattcaagtaccatcttgtacaatattaacagaactgttactcaagaaaatgtgttaaacattaacagcaaactcaggctacttctagccacaagaacataaaatgtaacagatcagtttaagacaaagggtatatgagtacccatggcccatagccagatactccagttggacagaggatttaagattttaaaaaattaagaagcataagtaatctgtgctctggtcaaggaatatgcaatttattagtattttaccttcctttaatgcaaaatgatttcaccacaacccaacagtcaacatcaacttggagtgattactattagtcatctttgttgtccagtctagaaagttacatcagtgaaaaactatagaattaaatggaaagttaattctggaaagggggtatgcctaggcagggcagtgttttcacaatgtatgttccaacaatacagtgcatagaatcatgggtgaaggggtccggcagtcaggtaagttgagcaatgctgaattttaaaatgggtaagtttctttcccagtctgagagccttcagtcctttcaatatgtacattattacaaatctgtgggagaatttggtcacgagtcttcttttctcaagagtacttccaagtctgccagaaggctgattttggaaatgtgaaacactagcttactacatttgtctggcaatgatgaacctgaattcagcagaatggacacttccgggggaggaagaggagactggggaagggcatgtaaaggggcctttaacctttaatttgtaatgtgtatttctttactgaaaattcagaaatgagtgttgcaaaatgtaa

SEQ ID NO: 246399 - DNA, 1000 bp, Homo Sapiens
ttagctgcagctgctcctgcaggcatagggagacttaccaccattgatacaatcatcaaggctgcaagcagcatactctctggggtttgtgtcacctttgtgttctctagatattttgtagctaactgcgtcagcttctttagttgtgcccaagttggcggctctgccttcttggtggatggcaacttcatctgttcttctgacgtcaccattttgttcatcttgtgagtcaacggtgctcgattgcgatgtctccgtctccgcggaggtgcttttctttgcatctctgatgggttcattgtagaacttcaaatgtctagtgggtatccaaacaggaagctgattttctcctggtgaaacacaagcaaaacctctcccccacgttatcaccttccctatttcccatgtcttatttttattatctttccaccaaattagttttccttcatgtgggctgttctttttaccagtaagatgttgttctgcagaagtagtagtctgatttctataaatgtttaaaaaatttaaagtatagagtgctagattaagttgcatctgaggagtggtacactccttactgtctcccccttctttttgtttaactaattgagttttgagtgttctattagttctttcaactatggcctgtccttgggaattataaggaattcctgttgtatgtgaaattttccactgacttaagaatttttggaaagctttactacaatatcctggtccattgtcagttttgattttttctggaactcccattacagcaaaacaagacaataaatgttttttaacatgggaagtactttctcctgtttggcaagttgcccatatgaaatgtgaataagtatcaactgttacgtgaacatatgataatcttccaaatgaaggtacatgcgtgacatccatttgccataatgcattaggacacagacctctgggattaactcctgcctcttgagtgggcaggtgtaagacttgacactgggtg

SEQ ID NO: 246400 - DNA, 1000 bp, Homo Sapiens; identical to SEQ ID NO: 157514

SEQ ID NO: 246401 - DNA, 1000 bp, Homo Sapiens
gtgggctagaggctgaccagcagcgtttatttagcaagggtaggtgtgcatcacattgggcttgttctcacccatctggtttggccattcctccttggtgggaatcatccaggtactgctgaggtcacctgcgatttgccccatttcctatctctagcaacctcctgggccccatgcccccaccccttctagaacctgcattcccagggccttcaccacctgaccaaaggtctaggctaacctttggtcatttgtaacaagacctcggaacagacacgtgtgtggcatggtttggcctggggatcttagatgtctgacctgaactattgtagaacagcgctggcttttgggggagcagcaaaaatgagaggagtgctaggtgggtggcctgagcatctgtatccagggacaggactccaaaggcttttggtcccagagctggggtatgttggccccagcccccagcctgtggctcccaaaaggcctctggttttttgtaatctcagtttacagccatttcttaggtttttaattacctttattttattttgccaaacatacctgggaataccttttattttttttttaccttggggtgatggttccaaaccataaatgtgattatagttaacacatgacccttctagcgtcccagccagtgtttttcctgacctctgttctttggagaggaggatggaagggaggggtccggcacgctgctggcattttgctgtgtcctgcagcccctttccgggacacctgggttcacacagctttttagcttacataactggtgcagattttctgtgtggagatgttgccttgaccagccttggctggactttaccaggcatgcagaagcctgtaccaacacagactacagcacccaggaggtgcgagtgtggctgctcagcggttataacaggcctgactgcattgttcaccggattataatgagccaaaatgtttcccggtgtttgctggtttcagggaaggagtt

SEQ ID NO: 246402 - DNA, 1000 bp, Homo Sapiens
tcaaacccagctcttttattttatcaccacagtgtattttacaagcttaaaataagttgaaatgaattttcccagctaaagtagtttgccattaggaacaaccgacatttctcaagtctcttgtaaaataaaaagagcatcaagtgaatttaagtagactaatcagaacaatagaagaggcaggaggaggagataccgtctctgactctctgaatgaaaggagacggggtttacaaaggagctttggaaatattatacacagacaactagagacaaacatcaaactggaattttaatataggaatattgatgaatcatgagtaaggggacttattccaccaatgaaactggcaagttataagtgaacagaggcttcactcataactaagttagcgacaaaaactatttgtgcttccttgggagatccggctctgctctgagccatatgcaaaatgcatgttatgaagataacatgataaaacacaactaaatgctattacaatctttcttcaagctttgggcacaagccttctcaagtttctctttctctttggagacagggtctcactctgttgcccaggctggagtgcagtggcatgatcatggctcacagtagcctccacctcccaggctcaagcgatcgatcaatcctcccatctcagcctcctaagtagctgggactacaggtgtgtgccatgatgcccagctaatttttgtatatatgtatttttttatgtagagatgatgtttcatgatgttgcacaggctggtctcaaactcctgtgctcaagtgatcctcccacctcggcctcccaaagtgttgggattataggtgtgagcctccacgcctggcctcaaatctcttttaaccataaatttgattaagatggagctacagatacatgcaaaaatatttacataacatcctaaaatatattaactttatcaatattaaaggagggaaaacgtttagatataggcatatatatgattatatgta

SEQ ID NO: 246403 - DNA, 1000 bp, Homo Sapiens
tttataaagaaaacagatttattttggcttatgagtccaaaggctgaggagtccaagatcagggagcccatctgatgagggcctcatgctgcttcaactcatggtggaaagcagatggtgaactgaggagggcaaagagaacagaacacaagaagcatcctcacttcataacaacccactcttgtgagaattcatccattcctgcaagagcgaatccattccagaactaactgagcctcatgagaaagcctttaatccatctcaatgacctaatcacctcttaaaggcaccacctaccaacacaatcaaactggggactcaggcctcagcatgagttttggtgaggacaaaccatatccaaaccatagcaggaagtttaaaaaagcgagtggcggaagcctcagtggaaacgaaaacttctagaccatttaccattaatgcagaggctacattctttcagtctataaggatctttatctaaaagttaataaacatgctatcaacttagaaaggctgaagtttctcttcctttttaaatgttttcactttgtctattatccactatcattttaggaaagcatttaataaaaataaaacctttatttctattgtataatacaaaaggttttaagaatattcttctgtgcctcaaattatattcactttttaaatatacatatatatatatatgtatattcaaattttttcatagagatgagctttcaccatgttgcccaggctggtcctgggctcaaaatatctgcctgcttcagcccaaagtgctgggattactggcatgagccatcacacccggcctatcttcactcttacttatagcaaagtaaggtaataaatgctggaaaacatccaaattctttttgtatggaatttggctaaaagaacccagtgctcaaaccacactgtaagttcatgaaacagagaaaaacatgtaccctaaacctaggttctgaatctttcgcatattttaacgtcagttctg

SEQ ID NO: 246404 - DNA, 1000 bp, Homo Sapiens
tatgaagagagatttatttcttacagttctgaaggctgggaagtcttccagtctcagacggaagatggaggggccacacctggccagggccttcatgtttcatcctcccatggcagaaggaagggagaggaggaggtaagagagagagagaaagatagaggtgggggtggggataaagattttggggaagaagaaggccgaactcatccttttatcaggaacccacttctgagataactaacccactcccacaataatggcattaatccattcatgggggctctgcctagtaacccttaaaggtctcacctctcaaagctgttgctttggggattaagtttccaacgcatgagctgtgggggacacattcataccatagcaagctctattcacaacatctatttcttgtggagtcagatttggtattctgtgtcttcctaggaatttgtccatttcatttatctaatttgttggcattcaattgttcatagtatttctttctaataatttttatttctataagtttggtaataaaatcttgacttttgtttctgattctagtaatttgagtcttttgagggggtggtcaatctagctaaatgtttgccattttgtagatcttttcaaagaaccagcttttgatttcataattttttttctgtattgcttttctattctctatttcatttatttctgttctaggctttccttctttctgctttctttggactgttattatcaattattgagaatgttctatgaatataccacattatgactatatattagtgaagttttcttaagaattttaatttttgctaaaatttgcctcatatatttttggtatatgttgttaagtatatttaagttcaaagttattatatatttcaggttagttgttccttttgttgttgtctaatatacttcatttctaaaaaaactgttttggccaggtgaggtagctcacacctgtaatctcagccctttgggaggctgagac

SEQ ID NO: 246405 - DNA, 1000 bp, Homo Sapiens
taccattatagctaattattttattacaatgttttcagaattagatctaggtgacataaaatacacaaaagcataaagccatctgaatagtacagtcaacaagcaacaaccagtacaatcagcaataatagagaacttttaactttgtatgtcacagagaatgtatatacctttttaataaaaagcctgaataaaccaataactattaaagaaatcacaaagctgattaaaaatctactattaaaagtgtcatcaggattagattgttttacactttgtcctagctaacttttaacaaacaaataattctaatgctatttaaattattccagaccacaggaaaaaaattgaaaactcacatattcatatttttttaaagctagcacaacttcaataacaaaacttgataaagatagcatcagaaggacaaaatacaattttactttggaatgaaaatgcaataattctaaattaaatactggtaaataaaatccactcatgtagcaaatcattatttcacaatgaccaagtagtatttgttccagaaatacaagtttggttccacatcaaatgcctaccattctaattcattacatcaacaaattaaagagaaaaaaaatcatacaattttatcaatagatgctgaaaaggcattttataaaattcaggaaccacttctagcaataacactataaaacaggaatagcggaaactcttaaacatgttaatgactacctactaataaccaaaagtaaatgtcatactaatagggaatactattccctattaatattttgcattcttacttccatgaaaattaagaacaagacagtcacgtctgtcatcactcttcaacattgttttgaaaaatccagctaatgtaacagtaatcagtataaacattaagaggaaataaaatgatctatatgttcaggtgaaataatttcatatctagaaaacccaaaatattatattcttaaaaatctactgtaatttcaat

SEQ ID NO: 246406 - DNA, 1000 bp, Homo Sapiens
gaaaattataagtctgcactctttaattcttaagtttacttacacttatgaaataactcttgacatttattttgttggcatgtgctaattaataaacacatattcccaacacagcaaaggaaaaatcccagtccagagcattttgtctttgtgaagccaattaattaagacaccgcctctagtgccttgagattctgggctgcagaaatggttgctggggaacacatctccctcggcagagccagaaaccactgactgactgactaacaaacatttcttcaaataagatctagtgtgaaaagggcttcctctcatttcttctgggctccattccatgaagaatataagttagttagttagttagtggaaattacaaaggaaaacacaacatctcatacacaatttattttatataacttacttggtgttttcttttattgaatcatacaaattcaaatggggattcctgaataaatctttagttaatttacctttggcagaaacaacagattccaaaacaattagtagcatctcatttatttgtagcttaaaaaaaaattctgtagcgtatttttccaaaaacatagtcttaaacaaatgtgctttaaaagctaactggtaatgatctgattaatatcatagcttatttaagagagctattaaaggacagactagacatgtatttttaaaaaaacacaatttttggtcatgtgaatgattcatgttcagatttcaaaaataggaaacatcctaaagtgcatcattttatttataatctcactccttgaaattatagcaatctgcaatgtaaacagtagagcaaagaattccaaactatatttttatgtacatttaaacctgtaggattatgtaccgtctttgtgtatggattaaaaccagggcacttccaacacatagctcaagcttccatacgattaagagcaaacttaaaggcattctttttccccatccttaacattcagctgacagaagagagctg

SEQ ID NO: 246407 - DNA, 1000 bp, Homo Sapiens
tttttggtgtggccagaggcctccaatctgtgtcagatatttatttatgctgcttattaaggggtctccaggcacccctgtgacagaagagactaatcagtcatcagccaggacccaggcatgtcctgggctcctgtgtccagcatgaggtctgtggctgatcttgcagctgaggcctgaagggtgagcgaacattgacctgtcccaactttgggcggcctctgccccataagggagactgagcagccagaggcctttgaggggatgaaggcctggcctgagcccatgtggccttagggtggaagcaccaggaccacagaacacgtgtctgaagacttgcctgcctctcacccctctgtcacccctcctgggccccggggcctgctgcctgcctctggagggcttgtcatccacccctccagggccatgccctgacctctgtcctctctacttaccacccaaggtcaaagggaagtgtaccactgaccacatctcagctgctggcccctggctcaagttccgtgggcacttggataacatctccaacaacctgctcattggtgccatcaacattgaaaacggcaaggccaactccgtgcgcaatgccgtcactcaggagtttggccccgtccctgacactgcccgctactacaaggtgggtcagagttgataggggcaatgccagtggtcactcctgaaggggcctgcaaggcaggtgcagggaggacattaggggagtggaaactgggaaggaggccgaccaagcccaaaggggactgctgtggaagggaggagaggcctgcagcccctccctgtggctgagaaggcatgaggcccaggtccggtggtacagccgggtccctgcaccaggaggagttagtgagagatatcttaggatatctggccctagacaaagacaaggaagggggccgactcaggaagtcagaggccaaaagctcagagagggggctacacggggcctcacagtgagcaggcagag

SEQ ID NO: 246408 - DNA, 1000 bp, Homo Sapiens; identical to SEQ ID NO: 157594

SEQ ID NO: 246409 - DNA, 1000 bp, Homo Sapiens
tctgggggaactgataacattttattaaaggcaagaaacaactaaaaggcaggcagcttctaatttaaccttgagggaaggacactgtagtattttaaaccttctctatagccataaactagatataacacacacatatacaaatggatctgtctaccaaaatttaagaaacaacctgaataaagtgcaaaggcaatcaattgttaaatagtactcctttagtccatcaggttttcaggttgtatcacatttggccaggtttgtgggcagatggatgatgggtgtcatttacaagtcaaatgaaaaccagtaattttggattgtcacataggaatactgatgattctcaaattaccactctagcagcgagaacaacttcttttgtctccagcagctttactgacagtaagaagggcatcttcagtagtttctagtcttttagcccttcaaccaagctcttacccctggcaacataaatgacttcaagccttggagctgcaaaatttcttttttggtcagagtctcactctgttgcccaggctgaagtgcagtggcaggatctcggctcactgcaatctctgcctcctcagttcaagtgattctcttacctcagcctcccgagtagctgggattacaggtgcacgccaccacgcccggctaatttttgcatttttactagagactgggcgggggtgggggagtgtgtctcaccatgttggccaggctggtctcgaactcctgaccttaaaggattcacctgcctcggcctcccaaagtgcagggattacaggcttgcaccattgcgctggccctaaagtttcttattttttaaagaaaacaacttttggtagggttatgaatatacttaggaggttaaagtgtgaaatgaggcaggacttggttaggtgaaaagtagcatcttattttgggtaatattataatttatgttttttagacttcccttagaaatttttttaaaatatacatatggcatccttga

SEQ ID NO: 246410 - DNA, 1000 bp, Homo Sapiens
tcagagacaggaatagaaatttcattaaaatctatggactttaaaatcctagtggtgcacaatgggcagggatgggcggcgcaccgttattgctacagaggattagaggtggcttggccggggctgtcactgcacagaggacggacaaatgaacacttcagggattcagacacttcagaaggggctcccactccagagaggggaggggcatgtgggctggggccatttggcacatgaacgagggcagcacatttgggaagactgggcctttagcctcatggagggagggcaagggggtgtcgtgcagggtccccttccccagggtgctgggctcaaacctcctgtggagcagcccccaccccatcccccagaaacaaatgctttgggcaggctgctgggtcacgggcccctgctggctgggcctgacagccaggcctggaatgaggggcagagaccccggagcagcccagtgaggtgcaagcaggcctggaagacagactgaacccgaggctgggggcgaggaggtggcgaccacagagaatacaatgtttacaaaaataattacacagataaacagggctgggcagcacagcctgacaagtaacactgggcagtcccccagcccttcatcctgcccctagggaggaatagccaaatgtgcctggcagaggctggggtcggctctgagggcaggagcactagtcatggggctggaggcccacccagaacctcagctcagggcagggtataagggtatcggaggccacgtaaagccatccaggctgctggggacctggcccgagacccctccaaagtgctttggacctcccagcaaccctccactcccacccctccccccagctgctatcttggcatccaaaggacatgtaaacactggggacatgagcatgaatgactgcactagcagtggtgaccaaggtgacagcagccgtcctggccagggcgtggcagggggcaggcagagacacctggcctctgc

SEQ ID NO: 246411 - DNA, 1000 bp, Homo Sapiens
tatgtgtaaaaatacagcttttattctgagacattgaccttcactagagtgggacctgtggccccagcctggctggagaagcagtcccagggcctgagtgacaccatttccctttcctgaaataggaacaagttattccaaaggagaaaggagagcccagagagatctgtacaggacctctcttgcacatggtgactggaggcagagggtggggagctggagaggagtccagtccctccaacaaatattgagggcttcaaagagctcttcctggacgtttctcttaatctggatttaaaagggacaggaggtatcttagggtccaagaacataacaggaatgggcaactctagaagtgtttgtgtgtggaaggccctaacctggccctgtcctccctgtctctacctttggctttcatgaagagagattcacagctcagaggaagggaggaatttctccagtcttcactttaacaaactcttttaagttttctgcctaccttatgttccctttggccaatgacccactccctgggaacaagatcttgttgactttcttgggaatctcctaagagataagtgctttgtgtcggagacaagttcaggtaaaccaaccaaggcagtgcctcccacagtcaaagagagaagctggagggccaaagcctatagagttgggcactacagctgctcatgctgcagaggagacagctagtcaggaaccctggagattcaagacaacttgctggtcccctttgcccagggctgtggtcctaatcacagtccttcacctttcccagggttagcctgtgtttcaaatgcatatgacctgcgctgagaggacaacagggggtcaggaacctggggttctctggggggcagactaagacgactccgggatccagacccttctgcaccttcagatgggagctccaggcagctaaggggccgaggagaatgggcagagatcatgctacaaggggaggttctggggatgaggcagt

SEQ ID NO: 246412 - DNA, 1000 bp, Homo Sapiens
ttcttagaacacctaaatatttatttggataaaataaaataacaagaatctggagaaaagaaactaagagccccaaagttaaagctggtaaaatagttcaagaacttgcagcaagtacctagaaaatattaaatggttaggacaaaacattcacagttcaaggtcccaagaaaatgatctggtgagcaaatacatatacacacttaaaactaatctggatgaattagtgaagcaatgaataaataggtcaattactaaacccacataacttattcaaataaaatctaatacaaaaaataaacttaaaaaaataggttaaaacactaaatcttaactaaaatattaggcaaactagaacaggagggccgttattaaattgttcacaataacttactatttgagacaaaactgaatagaaaatctgaattgtgagaataaacaagttgtttctcaactacaattatttgacagctactcaaaaagtgcatatactgcaggtcttaatactactaactactggtaaaaatgactaaaccagaactgccagcaccaaattaatttcaagggttataattttatgcatttagtattaactaaaatgctaattatcattggttagcttttcaaaatcatactgcctacagaatttccacaaaagactaatttcacacaatttaattaagatgtgaatatgagattctgtgactcttcccactcctctccccctgacaaagaaaactcatatagtggaggaaaaaatggagtcatgcaaataggacaatgatgaggatcaattgaatagtgaagactcccaaagttaattaattagattttaactgcttcaaaaagaccagggtacttggatcacatcaagtaactggatgttggaatatgagattaatgcttgtacaatcctctcattgtatgtaaagatgctatcctaagaaaatgatttgaatagtatcttcccttattaaatcttagaaaattttactttcag

SEQ ID NO: 246413 - DNA, 1000 bp, Homo Sapiens
ttttttttttatagactactggatatcaatttattctgagggctacagcccattacaataattaattttctttcttttttttttttttttttcctttggtgagacagggtccggctctgttgctcaggctggagagcagtggtacaatcacagctcactgcagacttaacctctggctcaagtgatcctcctgcctcagcttcctgagtatctgggactacaggcgggtgacaccacgcacggctgacttttcttgttttgtagagacagggtttcacccatgttgcccaggctggtcttgaactcctagcctcaagtgatcctcccaccttggcctcctaaagtgctgggattgcaggcgtgagccgtgcgcccagcctgtttattttcacgctcacactgcccaggctggccaccgtatgctccttcccatccccccgtgttatttcaacaagtctcctcatcccagcaattcttcactctctagctcatctgataccttctctggcctggccctggttccttttggttacagaatggtatcagggccaagaccctgagtgcacgggtcactgcgtccaggccctcaagagctgggaagcatttgtgcacagcccctcacaacagtcccccttacacacggtttcagttacccatggtcagccacagtccaaaaatactaagtggaaaattccagaaataaaccattcatgagtttttgattctgtgctgttctgagcagccgtcctgctgggacatcaaccctccctccgtccagcgtttcgggccatccacgccaccctgcctgccaggcactcagcagccatctcggtgatcagaccagccatcgcggtgatgtggtgcttgggtccaagaagcttttattttacttaagaatggccccagaacaggacagtggtgatgctggcgactcagacacaccagagaagctgccaagcgcttcctttaagggaaaaggtggaaactcctgacctataag

SEQ ID NO: 246414 - DNA, 1000 bp, Homo Sapiens
taacatttatgatcctgaacttttctccagccatcactcatgacaggactacctatgtgcagtggcctaaagtaatttaatattttacatgatgagatatgaaggggcaaacactaagagccgcattctgctgcgtaacaaacatataaaacactagtttcacatttttcttgctttagaaatttactgaccattaattgttgttctcaaaatgccaaatacactttgtcttagtctaaaaatattgaaagctaagcacaagctaggcatggagttactcattgagagttaagaaaacaattgactatgctgaagaaaaagagataggttttaatcaaaattttatcatttttctagctgtcactctacatattggaaatgatgaaatgtatgaaaaggactcaatgtcatattgactcattcataaaagtgtttatagaatgcgtaattgggaaaccctgtttgcagagcccagagtcatgaagaacagaactcaggaaacccatttaagaaaacattgagaatgtatagaaaagacctctatgatggcttctgcattattcagattactcaaagaaaagatgtcagtaatgcaagttaaaataggtattttattgagaaacttgctttgtcagtgagaaagttaacagttacaaatattttcatttaataaaattagcatatttttaattctaaaaatgtctcttaaaagcctttattatctgaaactgcagatcattctgatccagggttttcttttagggtctcccatggaaaaagatattgcagattccattcatgcaaataacagaagtagtatgacttgttcacaaacaaattctccacttgagtttcagttgtctgcatgcatgtgaattaacatctttattactgtaactagaaaaatctcctggtaacagcaatgaggccttagacttacccttgagcattcagagtcataatatggtcttattaaaaaaggaaagttccgcagcaagac

SEQ ID NO: 246415 - DNA, 1000 bp, Homo Sapiens
tacagctcaatgtatgctttgtatggaaaactttaataataaaaatagcattcacagacttttccctcctttttagctacagaatgtatattgtgtctgttccaggaaaggaacttgttttataaatgtccacacaactacagctactcattctaatgttatgtataaacccataagtcaaataaagctatgaacaatgtaatatttatatatgcatagtgttttataaaaagattggcccacatactgcttttcatcaatacagaaagagcattaagtccatagcacactgcaagaaataaatgagtgaagaacagagaatgcaaacaagtgcttaataattcacaagcaggctcaccatggaggaaatgatgatattcaaaccaactaaagctttagagaattacttatatagtctcccattttaaaacaactttacatacctgatttagtttacattaaaatatatccccatgaatcaatttgttccatattcagaaatataaacacgtatcacattcctcacagctaaattttgtcataaattctcttttatacaagaaaaaaaggcaacagttgttttcttttttttcccaacaggctctattaattacaatttttagctctgtacacgcaatgattggctggttttctttttttttttctttttcctttttttttttcttacagtaccatgggaacaacagtgattgacttgcaaagttttctgtctctatggaaaatgcaaaacagtactacagaaatacacaatgcactgtaagcagcggtttgctgtagtggtccaacaggtacaagcaaacattttggctcagctaggcagtaatccacttaaaccacatcccggggctacggccgacccaaccacagctcctgtgggatcaaaaagaatgggtctgtttaaaaataaaaattgttatgttttgtgctgctgtccaaaggactcaaaggacagagtcatgaggcagaagtttcccaacca

SEQ ID NO: 246416 - DNA, 1000 bp, Homo Sapiens
gtgtttatgtgtttgtgtatctctttttatttcttccttagaaataaaaagtgtcaagggaatgaatcggaggcatactttaggaagttaatgttagaagggaagccaagatttttttgtccaactgtctcattgtagataagaaaatagagactcagggagggaaaggggctggcctaaggtcagaaacaagtgcatggcagatgcagatttgaacccaggcatccaaattcctggtccagtactctagcgcggcctggatggagatgggtggtgaaatggatgggaagatttgtcagtttgccccagcacatttactatccttcccaccaccccgcccagcacattcaactggcccctgccaccaaccccctcattcaaagtacagacactactcattttacagacagaggttcaggatgtttttggatctgacatagcccaaaccagggcagaggctgtagcaaggggaggaagctgggaaagcctgagggtcagaggggagtggaggtggacaggatctatggctacggtttttcagccgctcagccgtgctgggccctcgatggcccgtgggagtgggagcgtttcctaagctccactgaagataagagcccaacccaacccctccccccacccctgccccttccttagtctctggagctggaacaatcaggcttggccatggcggctggtgctgataaccatttcttggcagaagtgcccgccaaagctgtggccctagtcctcaccaccacagagagccagcaaggccttcaggaagtctccggaggtgtcaccctcaatggcttggtggagagacttgtcatatttctcaatgaattccctccggatgttgagcaggtcaatctcactgcgggataccatgatcctggtcagagtcttctcatctgtgccagcacccttcatggatttgtaaagtttgtcggcaaagaagagaggcttgttcttgacactttgaacaatggccacaaatgca

SEQ ID NO: 246417 - DNA, 1000 bp, Homo Sapiens
ccatttaatgccaccaaaccaaacccagaaggctcttgattaaccaaccatatggactaatttatctaataagactggaaaaatgtgtttagatgaaaacccaaccccaaagtagtcatcttgaaacaagtggcttcatctaagggcagcaaagactgtgggacagcctaggaaggaattttcacattgacttctgaaagcttgagctctcttgaaatctgattgcttaaaaagacaaagaatgcaacttgaaaataaatatattcacaatctgtagagttatagtctccttatgaccccaacgcccttgggagtgcccaagaaactcaacgagtctaaaatgccacaatgttgtagtatctgcaccatgaacatagtatactatacaaagaaataaattctttaaccagtgtcctccaaatctccatgtggacttgcttgcatttttctggatcattttcattcttcttaccctaaacttaaagttcttaacaaaataccttaatggctgagcatggtggctcacgcctataatcccagcacttagggaggccaaggtgggcagatcacttgagggtcaggagttcaagaccagcctggccaacatggtaaaaccctgtctctactaaaaattaaaaaattagctgggcgcggtggtgggcacctgtaatcccagctactcgggaggctgaggcaagagaatcacttcaacctgggaagcgggtgctgtagtgagcagagaacgcgccattgcactccagcctgggcaacagggtgagacgcgcctcaaaaacaacaacaacaaaaaaaacaaacaaaaaaatacccactcatgtttgagcaaacgaagaggtaaatatacacacattcctctacacagatctgtacacttgcaagcacattggctagagatacacaagtggtagaagtagtgaatgtaattaaaaagggtctacctggtcacttttatgggtaaaaatagtaagacccaaagatatta

SEQ ID NO: 246418 - DNA, 1000 bp, Homo Sapiens
cagttcaacaaatatttattgtcttcctcctctgtgggagcagctggaaggtagaagagaaacacagcccgcttttgaaggaaaatgaggaacacagagacctctagaggcgtaggaagagcaccacccagactctcagaggagacccaggactccaagaaggcaaaaagtctgcacctagtccccacagtttactgagccatctgtccaggatccagggacagcagggagcctgcttcaacctctgagggtgccccagtgtctccctcacccagggaatcatctgagcactgagggaagtggccacaggaaggggctgagataagggccttgagaggcaatgggtgtgttggggacggtgatctaggagggcgtggtgagctctgtaatggagggtggggtggaattgggagcgagagcccagtggcatattgggtgggttgactagatgtcgaagaaaggtcagtgaaaagtggccactgtttccagatgatggtttgactttgctttatttggtaaaggggaagaggaaggtataacttcttcaggcgtcagaggtgctctgagagcatttcaggggtttcccagttgagaagctgatgggggtgttactcaatggaccatttccacacagtagagggaattgtaaggggtggtgatctggctgaggggcactgtggtggaatgggaatttaaacagtaggagagaatcaagagaggagctttgaatctaccattttgagaagaggaaggaggaaggggtgataagagagagtctgcaaccttggggtagtggagaaagcagaaccactcttttgggaaggagggaaactgagctaaccctatgcctgggcactggacttctcccatatgggatatagtgtatgtgcttgtttgtgcccaaggcatgcacacacacaacagttgacttcttatggactgttgagtaactctccttggggtaggaaaacttcagggtcagctagctggggccccagag

SEQ ID NO: 246419 - DNA, 1000 bp, Homo Sapiens
gagttaaagtctccatttatttttatttttttacaaaaatccaatgtaagaccattgtgctcgtgacgaaaaggggtggggtggatggacgtggcatggatatcaaagcttccccccacaaactaggagctccccactctgtccggcgcagctcccagaaagatcccatccttccggacaggaccccagctggtgagccctggcctgaggcacagtccacacggaggagcactgcccagggagccagcgctcacagtggcctgcagagccctgggacggtgttatggtaagacagcccaaaccggagcagcaagccggccacccagagaacgaggcgctcctgcaccctgcgagccaggacaaggtggccaggggcggcccacagacagccaaggagacccggggtctgtggcgccgctttcccatctcaagcgagtcacaggtcggcggctttcccgtggtgagaagcacctgaccagtgacactgtggccaccttgctgcctctcgctgaggagggcgtgcccctcagagcctgtctgcagtccttcaagccagtgttcctttcagggtcaaggagggctgtccttgttggaagcaccggcaccacagccctccctgcggcatgttttggtgtcagaccactcagcccttcttagatccaccagtgacattcggggcccgacaacctggctccactaaagggagaggccctggctccaccacacagacggccccagctcactgagtcccgctaaagggggtcccaccacacagacggccccggctcaccgagtcccactgaagtcagtatgtgagttcctcacattaaaagaaaccagatgaaatagcagccacaatatagcgccacacaccacactctttggctccccgagggaagaaggctactgctaaaaggaatacaagtcaggagtcaggtagagggcaactagaaagttctgaggaagggcgtctgacccccactgctgggaacataaccac

SEQ ID NO: 246420 - DNA, 1000 bp, Homo Sapiens
taccgtattcatttttttatttaacttggggatggaatggggatagcatacattttatttgtacaatatttaacaatcacttatccaaggtggggttttatggggattttaagctttctgttaaatacttgcagaaaaaatagcaagtacgatttgacagtagtacaataacctgtgcccaaaacacaagaaatacagagtaaagcgaaaataactgcttaccaatattctgagaggtaacaaatgggatatgggttgagactgcataaaaaacgtactgctggttgaatatctgaggtaaatgatgttcaatcaagatgctacttgtatcattttgcccataaatggataaataattttatgcatatcataccaaatgttcctaaaaagtaatctttcaaaaaagtataaaagagaaactggaaagtatctgtgatgaagcttctttctttaaaaaaaaaaaaaaaaacaaaaaaaccagtaatcagtttattccactaaaccaccatctcgccatggttttttttcccctaccacctgcattttacttaaatgtagctgttacttaggggtgaggaaatgcaacagaagagattctttttaaatttcatgatatgattctattttaaattccaaaggtgttgggttttttcctgattgtattttcaaaacatcaccatgaaagatagatagtgcaagttcatgggactaacaatcgtgaagcacagtctctttttctggaattcacaaggtacctagaattcaaacaagaatcacacatcacatgctaaaaaaacttctagcatctaaaatacatacaagagctgtgcagggcatagacttcaaataaagccgaacactggttaatccatcagtcctatggcaagttgatcataaagcattccttacgcggagatctgggcaaggtaaagagtataagttagagcagcagcagttctgatgggtatcagaaaggcaaaatacaagacgagtcatgagg

SEQ ID NO: 246421 - DNA, 1000 bp, Homo Sapiens; identical to SEQ ID NO: 157832

SEQ ID NO: 246422 - DNA, 1000 bp, Homo Sapiens
tataagaaaacatgcaagagattaagaaaccatatttatttcttctttggtacaaccagagatgttacctcaaacctttaaaataaataatctcatcaataaaatttatgaatgccagagtattaaaattatttctttgctttcacatagaagcgctcaaaatattaacaggtttggggtaaagtacatacagttcaacaaaagttcaaggtgaagaaggaaaccaatacatgacgtaaagaaatcatttcgggagatgtagccctttcttatcactccagagacagcacatcgatgagattttaagcaccaattccattgaatgtagtggggtttcttcataactagtctagtaatcctctatataactgaaacaataatctgagaacaacttctaaatgaaaataactactgcaactgaggtaaaccaaacagttgtttttgtttattggcacagtggcccacgataagacacataggtatagcacactaaagctcaagatcctgggaacaggagtataaatttattcaagggaggtgtttggttttctttttttttttttaactgatgactctgctgtcttccctccaagggaaaggaaagagaacttactgaatagcaccgttcttctatatgtgattgtcaagtaggacttctgtaatcatactgaaggtaatacattgtaatcatgctgaaggtaatcatctttgccccagctttggatggtgtttctcacccaggctccttcaccaggcgtggttcatgcagacagccatgcagcagtaagcctttcaagggtcaggccctttgttaaatgctcgctgaccagcctgcatggtgcaggaggctggctcacagaaaccgggaagcccaggaggtcccgggggtccaggcactccaggaattcctgccacccctggggggcctcgctcaccgtctcggccatttctgccatagctggcagggcctgggtcacctgggagacctatagctccaggc

SEQ ID NO: 246423 - DNA, 1000 bp, Homo Sapiens; identical to SEQ ID NO: 157869

SEQ ID NO: 246424 - DNA, 1000 bp, Homo Sapiens
taccccaaaataagctttattgcaagaaaagtgtcatatttgatacacagacctacaaaaacaaacaaaaccaaaaaccataagtttttcctcacaaactcttgattacaaatttacactgttccttttttctttttagttattaaaaaaacaataaaacctcaaaatactgggtataactggttactaatctttggtcagcacaggtttgagaggaacaaccaggagcctgcatgtgctttggccatttcacatatgaggtttggtcactggtccaggaaacaggttcttgggttgagaagaataatggatacgtgctcttaatagcacatcctggtacaatatctttttaaatgactaaagcaaactaaacatcaattcattgtacaaacatctttcatacacaataggctatgataaaatgaggcatatggtgtataactacagtattaatgaaaattctaaaaaaaaaatgggtttaaaacaacaacaacaacatatattccttggctgcattgcatgatttgtttgcacatatggcaatcctgaaataacttgaacataataaatgcaccattatttaagacagcacgaaacaccacagaatgccaggtgttccctttcaagggaacggcggttcttcagctgcctacagtaccatgaggacgcagcgcaccctgggtaagaatgaggtgttgtgggtagcacatatggttccttgaggttatgagaaggaaatacagtacggtttggcctgcaatgctaatggtctcacaagcagtcaaggtattttgctacagtggttgtgcttcaacttctgttgcctggtgtgtctggtgatatgaaatgttgtcacaaatgagctgctttggcttcgatctacgttataaaggatctaatgacattcatgttttttaaattattgattacactgcccattcagctctgtgtggctttctttaaaatcatcaggtgtgtatcagctggatgactggcagaa

SEQ ID NO: 246425 - DNA, 1000 bp, Homo Sapiens; identical to SEQ ID NO: 157879

SEQ ID NO: 246426 - DNA, 1000 bp, Homo Sapiens
tttttttttttttttttttttaagatgtaagaaaatatatttattttttccatgacaatactatgataaaattgttaaatacatgcatgttttaaaaacagacataagtaacatctttagagttaacagccaagcatactagttttacatttatggtgttttagtaatagattattttctatgtttttgctataatcatgttttccaaaagatacagaaactaaattctgaaattatacaatgatataaagtgtccaaatttcccattctaacagcaatttaaaatccaaattttcacaaggcaggaaatgcttcagttatcatctaagtggagttgttttattccatattactctcagaattctgtgaatcagactgaatcacacacatgtacttcatctatagttttcttcctgtataagtgtattgaaatgtttccttatacgattaaacatgattttaggtacagcacatcacaactgtttattcaccttaaaaaaatgtctgtagtggtaacatttcaagaaatgaaaaagggaacagtttgggatccgcagtttctccctatcttctttcagctacatttacaagcatttgaccaaacaaaaattagtaaacagttactagtatttataaaaaacttaaaatatttaacatataatactcactttaaaaaaacattcattctacaaaccttataaaagacagaaacttatatctgttcacagtatgtgtattttgtaaacagtaattcactataatgcaattttgaaagtaaaaaaaggtaatttcctagtgttataaggaccttgacttatggccagctaatgaaagagaagaaaacctaacatccttattaggaaagttaagtattttgaaatgatttattttacctttcaacatacttttaagatggtactatcttaaatctaggatgtctatctatccaggccaatcttttgcaagcaattctgaatttaaatgtatttaagaaaaagcc

SEQ ID NO: 246427 - DNA, 1000 bp, Homo Sapiens
atatacccaaatgagtataaatcatgctgctataaagacacatgcacacgtatgtttattgcggcactattcacaatagcaaagacttggaaccaacccaaatgtccaacaatgatagactggattaagaaaatgtggcacatatacaccatggaatactatgcagccataaaaaatgatgagttcatatcctttgtagggacatggatgaaattggaaaccatcattctcagtaaactatcgcaagaacaaaaaaccaaacaccgcatattctcactcataggtgggaattgaacaatgagatcacatggacacaggaaggggaatatcacactctggggactgtggtggggtcgggggaggggggagggatagcactgggagatatacctaatgctagatgacacattagtgggtgcagcgcaccagcatggcacatgtatacatatgtaactaacctgcacaatgtgcacatgtaccctaaaacttagagtataataaaaaaaagaaaaaaaaaagaaaaaaaaaggtatcttgattctctctgaaattttttattatttctgatgtttttttccaggcttgtaatgtgtcaaggccacttatctgcagctaccttagaagtagtataattgatctatgttctctcaaaagcaattttttcctagtcacagaactatttcttcttttactactttatttgttctagttattacagaatcaaagaacttcttgaaaagagaatactttcccatgataaccaattactttagaaatactctgcatgacactataattgaaattagatgctaagttttgtccctcagtggctgaacacccccaaccttttaaaaaacaaaaacttcaaaaataaaaattcaatatttctttttgtaagccatctcttgattttgctatcaccacagaaaaatttgtagagatttgaccccaatacatcaagtactgcagaggcaccaagaccttttctgcttctaaaact

SEQ ID NO: 246428 - DNA, 1000 bp, Homo Sapiens; identical to SEQ ID NO: 158002

SEQ ID NO: 246429 - DNA, 1000 bp, Homo Sapiens; identical to SEQ ID NO: 158015

SEQ ID NO: 246430 - DNA, 1000 bp, Homo Sapiens
tgataatagtttacaaaagaagaaagtgccccatttattgggttgtgacatcaggctgagatggcttagggctggaaagcaaggatgagtgtagcactggggctcaggtacaaatctgtttataaagctcaaggagagaaaaggcacgagaaggggtgagacaactctgaatggcggtggtacctggatgtggaattaccacagtgggccagagacaggatggtatataaccctctggccaggtactatgggaaccaaccccttccttcaatattaaattaagaatacaaatatctcaaagcatgctatcaaaagtagattatttatcctcatattacagaacacagaaggagacatttatttttaaaagagagctaaaaagttatggggtttctccttatttcatcttgaaaactcaaggagcaaacattaaaaaaaattccctatttatatatatatatatattttttgagatggagttttactcttgttgcccaggctggagtgcagtggcgcaaccttggctcaccacaacctccgcttcctgggttcaagcaattctgcctcagcctcccaagtagctgggattacaggcatgcgccaccacacccggctaattttgtatttttagtagagatggggtttctccatgttggtcaggctggtctcgaactcctgacctccggtgatctgcccgccttggcctcccaaagtcctgggattacaggcgtgagccacagcgcctggccggactattagtatttttaaaaggcacttaaaatattcctttccaatccaactcaaaatacatctctgtcaactacattttggataaatattttaaaaagcacataatttttgtgcaattttttcttataacccagtgatatttatcatctatagggctaaaaggtttgaaggacagagctccaactttctgcagaacaatctgaaagtgcttttatcatagaaacaagaacaacattaatgatttgctctt

SEQ ID NO: 246431 - DNA, 1000 bp, Homo Sapiens
tctgttttcactcttttttatttatataagcacatacacatagcttaaaagtgaacatgtcttttttaccgccttgggtaatttgtcacatttaataatctggtatgattcgacaaggtataaactacccccgcctcctgcattcaatataacaaaataagccagtgctgaaccatctgagcatttgcatctattcctcattatattaaccagcccttgttatattcagagtttaagctttttgataagccattttgatgactattcagaaattctgaagaagagaattttcccccttacatcattagtggttagaagcatatgggtttgaaaatcagactgtgtttgaaaaaaaaatctctaccattttttagctgagtaatcatttaacctttctgtgccttagctttctgcataaacctcggatgcttattgtaaaacagaataaagtagaacgtatctcaaagacttgcattaagtgctttattacatgtaaaaaacatagaactgtgcctcgcacatagtaagtgtccaaaaaatgttagttatcatcattaccatttttatccttctaaaatagaatcatttactttgttcttggagaccgggaaagagtctacaaaatacatatttaatcctttccattgtattcccagccctttgctttatcaggagcaccaatctttttcccacttaaaatatttttcatattccagtggttctcaagtttttcttttacataggtacctgtataatatagagacacattccatgaactttcacatgatataatccacaattttagaatcttttgattaagcacataagaacagaggaatttaaggaactcttgcaataactccacagtccctcctggctctgaggctgacttggttaggaaccatggttttaatcaataatgtatttagactgaagtgtaattctggcttatttttaataacccagtgggtcacagctctttcagcctctcttacctcgc

SEQ ID NO: 246432 - DNA, 1000 bp, Homo Sapiens
tttttttttttttttttttttgaggcagagtctcactctgtcacccaggctggagtgtagtggcgcaacctcagcctctccaagtgctgggattacaggcatgagccaccactcccagccaatagtgaattttctaagagcatgtatccctatcagtaacagggatacatgaagatacttataaaatacagaaaaactgcccagcaaatcagggccctaaacagttggtagattccataaattcaactggctaccatgtatagccctcactgtaaggtaggtggttaggtttctagagagcattagtcttagaattatgaagagccatattaacccaaatgatttctaaatttagatatatattttccctgctacataaaaactctgggtaataactagaaatagacccacaatttagagacaatgtatactagatttatctcctttgtttttagttgaaggcaaaaaaaaaaaaaaaaaaaaaaaactattccagttgtcatcacaaataaatgccaaatgcctcatattcagcggttcattacagtgtataaaaaaaaactgatcatttccctagtcagtgctgttatcaatataaaagattaatttacaaaaacgtaaatattcataacccaatccagctgtattttctgcttttgcaccacaggtcaaaagatattttaaaaactaaaacctgaaagcctcaaaataagctagattcaccttcaccttaccttttcaaaaggagaagggccaaaccacacaagaactgtttacctgcaggaagttcaaacacatgaccagcatctgctaagtcacttcccagtcttcacaaaatacaagctgtgattgatttgtaggtcaaatctataaaaatattttgcacacttaagtcagaagagctgagaactaaattagcactctgtttctttgctgtcaacacgattctgacgctgcagtttaaaggaggcagccttttcacttctggtgaccggatggt

SEQ ID NO: 246433 - DNA, 1000 bp, Homo Sapiens
aggaggtatcactgagcttattttagctgcaaagtggcatcatattattccatttaatgaaattcacctcaagccctttttgacatattaaatatatgggatatatttaaggcaagagaagtaaggcaatccaaatgagtgcccttttccaatctcagcactgtcttggtggaattggtgacactattcagataaccaactggagaccgacaggatttgccatgcatttgcatcttgctacagtttggtttttatgaaagggcctatttttttttaagttgacatattttgagtggaaacactcaccctaccaaatatacttaagttgcaactctaaaagcataaggacattttcaaattttctcttcttcaactgagaaaatgaatgtgccaggtgacatattatatacttgtacttgcatacacatagaaatatatcactgtgcaaattcgtccttgactttataactgaatttcacctcaaattatacattaatttgcagaacaaaatattaggaatgggcacaaatctgtggttcctgattttggtcattttcaatttctgtaggcctgtaagaaatacaaaatttgcattaagacattttgcagtggtgtatgcaagtatgggaagaaacaggaagctgataaggtcatcagcattggttttggcccagggcacaagaaaggaatgttgccttaacacttgtcagggtgcagtccctgagggcagcacccatcaagggacacatcagaccccacaggttgtggcagcaaggtcagaagtgtgcatccagacaaaggtgcaaattagacaggaggatcgcttagaaagcctcaaagcatttcttgttttacatcttggttcagatataaagaatctttggccgcatctcctcactggttctactatctggctattaaccctttaccaactccttgagtctgggtaaaactcagggccccaaattatggatgttctcacctggacaaagcagcattt

SEQ ID NO: 246434 - DNA, 1000 bp, Homo Sapiens; identical to SEQ ID NO: 158152

SEQ ID NO: 246435 - DNA, 1000 bp, Homo Sapiens
ctcccaaagtgctgcgattacaggcgtgagccacggcgcccggccaagattgagctccctcttgcaatgtttctcaaattcatcacgattggaacataccgacggaattcattttctgtctgaagcaatgagtgctatacatgaaagttttcctcacatataatattcatcaagtttatttacagtataagctttccgatgctaagggctgagatgtgattaaaggctttgccgtattcatcacattcaggaggctcctttctggaataaattctctgatgtctatgtgaactgtcccacgtatcacacgtcaacctctctatacatatttagcagtttcacttttatgcctttaatattaagtgctttacatatcaagatgtctcatagatcgataatctcaggttttagccttgcctgccaggctggagtagaaacaaataccccacaacctgaggattttacttctcttcctggcaagggtagggtatatattgaaaaactcttcaaaaatttccattaggacaactagcatgctaatggttaactgtagaatgtttcaactgttaacagacttcagcgggccaagaacttttgaatgactatcttgaacgccaattagatgttgcaagcgtttttgaccatgacccaattacactttgcactgagcatctgataaacgaatgcactgcaagtggttttaataaacagttgtagcctgttttcctcagaaaacacatcttcaaatagctgcttcaaggacagcatgtggctgaagatcgaagcaaccctagtggcagctatccaacaaagtcaggaagatgtctccatgaaacggaattaaatgtgagggcacaggtcacatttaaccttcatttaaaaacaaaactcaaaagtgatggctgagttatatcagcatatagttgtggctgaaagaaaaaaaaaaaccaaaggccaatgtaaacatgaccaaagtcctttccctcttaaaaaataagtg

SEQ ID NO: 246436 - DNA, 1000 bp, Homo Sapiens; identical to SEQ ID NO: 158182

SEQ ID NO: 246437 - DNA, 1000 bp, Homo Sapiens
actttgaaacatctacttatttccattttaatgaagaattaaaggatacaatgtgttaaagacatatttaaaatactagcaagggattagacagacgaatcaaattttgttgatatcccaaataattacaagagacttcgaaaatgtagtgtaattcaggttttctttccagtttaaaaatttctatccattgcctctatctttggtgtcactgccaccaataaacacagtatacagcttagaaacctaattactatcttcaactaggaaaaggtaaaccaacatcatttctttaaaatgagaaataaagaatgtgatcgtacttaattttgtctcatggtcccacaatactctgaaatgtcatgccaaaatgtaaaagttcaaaagggaacattatcatttgctataattgcaccaaaaatttagctactgtacgctggtgtgatgacagccagtagtatgcagaggctacagaaagacatgtagatatatatatatacacacacatatatatatatatctctttagctcacaattagtaaaaggttcagtttaatgtgaaactgaaacacacgacaacataatgcgccttcatgtaaatacgctaacaactttgttttcttgaagtttaaaaggatagtataattaccttaaatttacacaaaacattaagaaacatggtagttgtttatgattaaaataaaatagcaacgtaaattaatttaacacagtgttaaatatattcacacgatcaccactgtgattcaaaatggccactaatgcagttacatatcaatatatgtacataacatttgtcacaacagtttttgtaagtttgactttctgcagaccaggtttacgagacaaatagccttgtatcaattctttcatattatgaaaggaattaaatgttgtaagtagtttcattcctctgcaggggcggggggggaagaacctctaaaaagtcagtgtaaattgaggagagttctaccttcttgaa

SEQ ID NO: 246438 - DNA, 1000 bp, Homo Sapiens
gcaggcatgatgctcaaaggaaatgctcattagagcattttgaatttcagattgggaacactcaaaagctcagtataaagcaaatattccaaaattttaaaaaatctgaaacacttctggtcccaagcattttggataagggatactcaacttgtacataccattaaaataaaccaacaactacaaattcagcaacatgaggaacagttcactgatttattagatgaatatatacccatataatcaatgaaaactgtatgatataaaataatttaagaaatgttgggaattagcagcaccatctgttattgaaatagcaaggaaaacttcacatattttaagcaaacacgagaagggagtaactactttaagacctaataatgccattggtctgggatgaaaaagaagggaattgttttagattgttttaggcaaacacacttccttctatgctgaagatttagtaagcatatctgatgactaaggttttagaaaaatgctactgatgtaagagatactgcatagtattttaattgggacaagactaactgtagcatggctcaacacttctatgaaaaatttagttctgaattatgaaatcagaaataaaaaataatgtttaaaagacacttggctctaagaaacattaagtgaaacacaggtcactatgaaaatacatcacttttccagtctgcttaataatttactttaaaaagttgcacagttttcaagacaagtggcttatacaaattttttaataagtattttaaaaagtttaaatgtttttctaaaatctaatagattcttttgatttctttaaacatttagccctattgtcacaattactgtgtatcagagactctgaatactgtgtattcagagactgaatttgtgtggatacaaatttacacaaattttacagcaacttataccctaacatctacaaaatccacatttacaatacaagcaagtacaaggccaggataaaactgctgaattc

SEQ ID NO: 246439 - DNA, 1000 bp, Homo Sapiens
ccagataatcctgagcttccagaaaatccacatcttccagacaatccatgtcttccggacaatccatgtcttccaagaagctccaagtcttccagtaaatcaagtcttccagcaaatccagtcttccagcaattactggtcttccaccaaatccagatcttccaggaaaatccacgtcttccaggaaatccatgtcttccaataatttcaaggtcttccatcaaatacagatcttccagctaatccatgtcttccagaaaaatctgtgtcttccaccaaatccaagtcttccagtaaatctagttcttccagaaaaatctagatcttccagtcaatcagtgtcttccagaaagaaatccaggtcttccagtcaatcagtgtcttccagaaagaaatccaggtcttccagtcagtcagtgtcttccagaaaaatctacgtcttccaccaaatccaggtcttccagtcaatccacatcttccggaaaaaatccaggtcttccagccaatatatgtcttcctgaagatccacgtcttccagaaaatccatgtcttccagaaaatccatgtcttccagtaacctcccagtcttccagaaaatccacgtcttcccaacaatccaagtcttccggataatttgggtcttcctgaaaatctacgtcttccaaaaaagccatgtcttccagaaaatccacatcttccaatggcctccaggtcttccagactatccatgtcttccagaaaatccttgtcttcccttaaatctatagcttccaaaaaatccgggtcttccaggaaatccgtgtcttccagcaagtccacgtcttccaacaaagccatgtcttccagactatccatgtcttccagaaaatccttgtcttccctcaaatccatagcttccgaaaaatccaggtcttccaggaaatccgtgtcttccagcaaatccacgtcttccaacaaagccatgtcttccatcaaattaatgtcttccagcctacttgtg

SEQ ID NO: 246440 - DNA, 1000 bp, Homo Sapiens
cttgaggacaaccaaaaagagtctttttttcctttttttttttttaactactagagaaatatcactaatacatacagatataaaagcagcatagaaagatacaggtttctcaccaactaggaataaagagactaaatgtgggcatatggttaaactacaatgcatcttcacatttgtccaacacatttacaagaaaaacaccattgggaaacctcacaggacagaagtgttttaacaccaagagaactactagtttttaattaaaaatccaaacagggtggggttgaaaaattttggaaaggggctggagctgaagccaccatttttaaaattatttttttcaatataaaatgaatgagctggaatagacccaatgtcttactctgtggaaccttgcaaaagtgaagaaacgttgaagggttatttagggcagctggctgatgtcaaaactgccagaatgctaattaactgcaggctgagtctcttacttgtgtgtgtgtgtgtgtgtgtgtgtgtgtgtgtgtgtgtgtgtgtgtgtgtgtgtatatgtgcgtgtgtgtgtgtgtatatatatatatatatatatatatatggagccttttgtattatggcatttttttttcttgctgctgtattcatacatcccattgcaaatcatctttcatttttcattctgttgacctggatattattatttcttttcagaaacaggaaaaaaaccgaacatctgtgtctccttccaatctgctgcacatctgcgcgttttgtagcgggtcttcaaagttcagttagcaacccacggacgccattcatcttcttgttaaaatgtctactgctgtatccaatgctcatgcccttgagggttttcctcttttttttttttccattattgtatataaagaacattgtgacttttaatattagcatttttgctttcaacagcaattagcaatctcttggtttgctgtttggtaaagcatcggttaatgaggtcatctag

SEQ ID NO: 246441 - DNA, 1000 bp, Homo Sapiens; identical to SEQ ID NO: 158348

SEQ ID NO: 246442 - DNA, 1000 bp, Homo Sapiens; identical to SEQ ID NO: 158376

SEQ ID NO: 246443 - DNA, 1000 bp, Homo Sapiens; identical to SEQ ID NO: 158381

SEQ ID NO: 246444 - DNA, 1000 bp, Homo Sapiens
tttgtctgggaatgtctttaatttcactttttttccaactttcaacaaaagcttcatatcctggtgatgtctttgttataaggaaaaaaaaaaatccctaaatccagccttcaaattgaagtaactatctttaatgtgagagcaatcctattcacaaagcccctccccagagtcaatcaagggtttggggaccacatctcatcatttttccagttctcttgtaagccaagttttcacccccaggagactaacaaatgtgctgacccaaaggcaacagagatcacctgtagacaggtccatcatgccccaatggaagacccacacccctaagcatgtggagaaaagcccccaggcacagagacacacctgcagacaggagggcactccccgaacacgctataatattgtaacttgcactaggcagggttagaaaacttctaaagactcttgtaactcaaaggttctagttgccatctacagcaactacatatggcatgactcattccaacgtatacactttattttaaaatatgccactggcacttgggaaaaatgtaatttatttgcactgcttccattcttctactgtagtgttaggacttaacataagcatcactcttctatttcctatttacattcttttggaatattactacaaatacaatatacaatttaaaaaaacttatggggaaacacagcttatgtttttttctcctctttacaggcttctcagtatcattcgacttcaatggaaatttatatggacattttctgtacatatcttaaaaggcagagattacactgataaagcctaaagaatcctgcacaaatacaatacagaaaacagaaagtacagacgatgttatttggggtacaaatataaacaatacagtaccatttgagtaactgagcaacataatacccatactttatagaaataaaactgcaaacctggagaatgctctgacaaatattaaacattatatacacaatgaggtaa

SEQ ID NO: 246445 - DNA, 1000 bp, Homo Sapiens
ccggggttggattctttttatttttttaaatttttaaattttttttgagactgagtctcgctctgtcgtccagtggcgcaatctcagctaactgcaacctccgcctcccgggttcaagcaattctcctgcctcagcctcctgagtagccgggtctacaggcgcacaccgccacacctggctaattttttgtattttagtagagacagggtttcaccatgttgccctggctggtctcgaactcctgagctcaggcaatccgccccccacagcctcccaaagtgctgggattacaggcatgagccactgcacccggcctgggttctttattaaagcaatgaattctggatgtcctggcttaactagattaagagggaatgaagcttcttctgaaggatcagtgttaccacagccatttccttgcattacaccgtccttctcaggacgtctatgagaagccctgggcagcctggacagggactgccccatgagtgctggtggctcacttggggctttctgcaggtgaaggaagcagccctgggagcttcttcctttggcacacagtgggcttcagctgggactgcaccaatcctctgctaacagcaaccatccttggggggtccgagggagcagctgcgtgacttttcagcagtggctatggtcactcctgaggcctgggaagagggtcactgtccagcagagctggcctgctccagagtgatctggaccttgtgccccttaacacaagaaggcccgactccaaaggccaacactgtcctctaagtttccaggacactaaatggccacttggtcctggttaactcatttctaaacacaaaggggacaggtctgagaaagtggcgttctctaccctaccctgagctcatctgttctgaggacaaaagggacgggtgtgtccaggctggtggcaaaggctgcatttccggggtttctttgctgtggaccccatgtctgaggaactggcccggggccttttgcttc

SEQ ID NO: 246446 - DNA, 1000 bp, Homo Sapiens
tttaaaaaaaaaaaaaaaaaaaaaaagtgcaaagtcctatgtattcttcagagttgttaggaaagaaaacaaataaggttagctacatatttagctaaccttagatttaataaactattaagttatttaggtcaaaaagaataactaaatggatgctacaaatttcaaccagtattttcgattttttgaggtctatcatctgaaccctcagtggcaaacaatacgaaaattcaacatatttttatttgttaaatatatgaatataattaaatatattccttcagtaaactgaactggacaaaactagagaacagaccttttccatactcatttaactttaaaatgatattactttgaattctactacataccatcttagatcctgttttgaaattccattcacattacattcgatttactagaatgcctttttttttcttttttgagatggggtctcactctgttgctcagcaggaatgcagtggtacaatcacgactcactatacccttgaacttctgggctcaggggatcctcttgcctctgcagcctaataatttttttttaatttttatttttttgtagagttggggatcttgccttgctaaccaggctggtctcaaacttgtggcttcacgcaatccccacacctcagccttccaaagtgctgggattacaggtgtaagccaccatgcctgatctggaatgctttctaaaaatatggcattataaacataatactaaagagaaaaaaaggttaaatttcacttcaagaaattatcagtctaatagcatcagtaaaaatggcacttttagtcatggcataaaatatacaataaggctatttttcaattattgttttcaagttggaaaatgcattatgaaacactcaaaaagatgctactgggtttactcatcaagtgcttttgacaccatataaatgacagagtaacaccacagttatgtgattgggactcaagaatccttaaatgttaggactga

SEQ ID NO: 246447 - DNA, 1000 bp, Homo Sapiens
gttttcagtagtttattcacatttttttttctctgcttattttaatatgcaccacgtgtaagttagatgagggctacggtaaaaacatttttgatgactgaaatcttacttttccttctaacgatctggagcaaatcacatattcattgatcatgacgaataaaatgatttctgctacaatgttgagaaaaaatgtgttcattaatatgaacacatgtctacagagatgatttacacgatgcaagtaatgaaagagttcttccttaactagtctactatcaaactgaaaagatgaatcttaaaattcccttgaaaataccatatgattggtcatgtgtcagtaaaagaaagacggtccccatcaccaggccaccaccataagagagctatattaaatacttgggaaaaaatatggaaacaccggtggtgatgattaaattgataattacatagatacactgccataatgatacatatttgttctatgataagtgaaatcaaaaataagatcaatttggttatagaaattccttaaagaacaccaccacttaattatttcaaacttgaactatcccaagaatgtcgagaaaaaaattagaaagcactggctaaaagcaaagcaatctggatacaccaatgtagtcagcatgccttgtgcttgtctgttaaccctctgagtacatctctgacattcaggatcttggtagcttaatgttagaaagattgcattccatctgattactcaagatttctacttgactggtcacattccactgtttattcagcatagatcactcaaattctacagtgatgtgctgggatccccatgctgaatgggccctgcattcttctgagctgcccttctgcagtgtgctgagaaacaccccctagcttcacacggtccagagtccccctagacgtcgatgggaaaaggcctgagccatgcaccgcaggctcagtacactagatgctgtagcaatatagttaatgcccacagaaa

SEQ ID NO: 246448 - DNA, 1000 bp, Homo Sapiens
ggggaagaaacagtctgtactttcatttattaaatgcagctttcgctggtcacattgcaactcaatacaaacagcccagcagagggtagggcattaactcttgttctcatcaatgtaaacacaatattaatattgaagattaaagaaaatgggtaaaaagtccagtgtctcctcaatctgtgtgaaggtgaaggtggttgcctacccttggacaggtcccaaagggagactgaggttgtcacctcttcccatccacagtgaagcaggcaagaaccagaggaacccaatcactttcttcctgtaggtctccagatggatacgtgaatcttcagaactgggctttcatgaattatgaaagttcttcgaaaggcctgagaggttcgtaccttgtgtgtgcactgaagtagttccttcaaagccctttcccatgaatcagtcactgccaatagaaaatgtgaccggtgtaaaacagccagccctcgtaattccgcagtccccatcgctatagcccctggattctggagagtagggagttcaaagtcacgggagcctcggtgatcatcctgaaggaagctgcccatgtttaaatatcggccgaagatgcttgacctccttcctgggccactgctgatagagggtggttggtagaggcagctgattttcctttagagcctcaaaggatcagattttctattttggattgccagccccaaaaataaacaaaacccccaaagaaaaacaaaacaaaacaggagtgactttggggataaggaaacccatcaaccccacctccaggaccctctggttacaatgtccccattgggtttttccaagtggttggtttagatcatcggtttgccctccgtttgaatgcccagctacattgcagggcaaaggggaaagttttcacttaataaagacaatttcacttctatttcctgggacgaataacccctagaaccctgacttccctttctccccagttatgatgggaagcata

SEQ ID NO: 246449 - DNA, 1000 bp, Homo Sapiens; identical to SEQ ID NO: 158438

SEQ ID NO: 246450 - DNA, 1000 bp, Homo Sapiens; identical to SEQ ID NO: 158453

SEQ ID NO: 246451 - DNA, 1000 bp, Homo Sapiens
aacgtttccatctttacttcttgggtaatacacctatttaaaacttaactaaacaacagtgtgtttccaaacagaaaatatgtgctgatatgacaatatccccaaatggaaatgacactaaaattatttgtagaaaattaatattaattgaaaataaatccctaagactaataagtgaagtcagcatattcttaagtatatatatatacagagcctgtcttttaggttttcaaaacaaggatgttttcattatagtacgctggaatttctgatgactgcacaaggtaagattctaatgataagtgccattagaacagcgtgtgaaataaacgatttgaatctgccagaaggattagttcagttcagttgggtcctctggataataactatgaggctaattgcataattagagaaataatagattggatggattttacattacttttctgtcatagtttgagatcattactttatcattagttcaaagtcaaggatggcaggatggtcatgaaagcaaagttaaaaacaatgaaaaaaaattaatgcttttgaaaatcaactatcattttaattacaatcttaaacacttttgtttaagggaatccaattttcctcttccaagggtcttccaaacatggaatatgtaggttttcatcataatctcaatgttgtttatccaaatgtatcacgttatataaatatgtagaggtttccagatgtcaagggcagggtattaggttcaagtgtggctggctctaacctctccactgaactcctagagtgagatttaagttttatttaatctaactttactaattcaacttagtcgtgtaagaaggatatgaagaatatgaattattgtacttcacactgctactttcatgtacagtatagtagaataatactgacaactatagacaagaagttaaaatttgtctcaggaaaattctttcaagaatttttaaacaattttgacattagcctactgatagctgaaaga

SEQ ID NO: 246452 - DNA, 1000 bp, Homo Sapiens
tccaaaaaactttgtttttattattaaaccttgtagtacaaacctgaaaagtaaacaaaaaactcgcaataaaccacatgaagtctccctcccaagggaggggtgcagagcagcgctaataaattaaatgtcaaactgtaagccataggcagaagtttactgtcaaaaagagggaaagtacacagcaaggccatagaaaccggacaaccacattggaaaacacttgactgtttctgtaattgttaaatattccaaaacagttcagtcttctgcaacaacaaccaacaaagtggatcataggacgttcctggcagtcaccactggcaagctcagtgcaatatgggtagctacgggattgatgaatccaattatgaaacaaagaacagcttgtgaaaacagtttcccttttttattccacacatactgtacacacaaccggagaagggcaacagctactccattattatttttttgttgttgttcagtgatgtaagcagcacttataaatgttacaagaaaaaccctgtaagcatccaatccaaccgatgaagaaactgaaatgtaaggcttttcttcatcttgtcttctcacccccctccccaccccccaccgagaaaaaggctcaagtatttaaaacaatttacaggcatatgtacaaaagggatgggatttttttttcttttttcctttttgttacaacatgaagagaaaaaatagacaagatgaacgcaaatgcattttcacattcaaaaataactgcaggcctcctagtggctctctacatgatcataaatgaaacaagttttaaaagaaagattaatgctgacttgtgaaggtgtcaaacaagaagcggtgagatggagatggaatgttagaaagattgcacgtcgatgacaaagaagcacttacggcttccatcacttttttttccttttttttttttttttttttaaatcttaaggatgctattgaagggttttttgataaagtagccaacagc

SEQ ID NO: 246453 - DNA, 1000 bp, Homo Sapiens
cctcatctctcctctcaggttttattgactgatggaaactacatctttgtcagccaccagctccatggggacagtgctggggacagggaacctgagatgatgccagatttcagcctgagagcagagttttggaaggtcacccaagagggagaagaaaggaatatgtgaaaaggaattgtaggggaggaggaggaggagaagttcctcctgtctcctataactcccaaagttcagaaacatcccaggccggagcccctgatgcttctggactgttgcccaagaacatggaatcagcccatgatctccaaatacagcccagctcttgctggttgccaggctcttatctcagccagtccagactccagcccaacccaggaaggacgcaaaccagaggagaagagaggaggaggaggagttagaggtggcccctctgattagggcagatgtaaatgctgcagcaaactggtcagaggctttgcataatgacacggcagcagctgctattgctagagtttgctgggggcccagcagaggacagggttgcggggtccatttccagcagccagggaaggggatggtagaatttgtgctatctgagtgtgtgttgggagaggcagcctgacccctcaggcaaggcctggggatggcaggtcgctgcagaggccacagcccatgaagcctgtgtttgcattccaagcttcagaatctgggaattgttgggccagatggagatgaggacctctcgtagaggccagatcagaggtgagggttctcttctctgaacctccaaagctccatatcccagccagagggaggaggaaatctcaactctccttcttaggctagagctcagatgtcggatcaaagctttgccttcatctgagagcccaaggggaggagcatgcaggagtccagctgggagagtggggccagtcccagtgtgctagggcaaggaggccaggggcctgtggaagcccagtgcttcagctcccaccaggaa

SEQ ID NO: 246454 - DNA, 1000 bp, Homo Sapiens; identical to SEQ ID NO: 158483

SEQ ID NO: 246455 - DNA, 1000 bp, Homo Sapiens
aaaaatatacagttttaatagaaatattaaaataatcattacacttcctctcattgcagaaaccatgaaagaatatgccttttgtaatcaaagtaattttttatcatgcaaaaaagtattttgttatgacattcgtaagtggagactgtatttcaaaacaagtttatacagacttcaaaaggtctaaagtcaaagtgaaatatatttaaatatgattagttacatctaatgcagctggcatactcatattcacagtttataaagtaaaaaaactaaactcttcatgtcggctctgaaatagatgcattttcattcatacattcgctagttaggtctgttcttctaaggaggaaagacgagatatatgagatattttttaaagaacaaactcaacatatcagcagcaaatttcagttaaactaaattggaaaccaatgttctgtgtaaccaaagtgcaaagtcagttccccagctcagaaagaaaattaagagtataaactgaaggcttaagagaacttcagagagcacactgtgtgattaatacataaatattaaaaattatccaatttttgatttaagaacaacacagtttggatctagtcattaaaacatatgcacaggtgtcaaaggcaagtaacactaccacctaaggttattcggaggaactgtgaagatgtagcacggacctctaaggtgtctaaaatcccttctgatggaaaggttatggaacactatctgccaaaaacactgaaagcaccacttttatatttagatccaatgctgagtgatatagtcactgttgggataggtttttatttgggaaaatggagaggattctcaaaacagattcatggcttgcatgcagtgacaccctatcaagagcctggaaagacaccatgaaatcacctcaactcaagtggtgggcccacctactcatagtcagtgttacactagccagctctagggctctgacaacataatgagttttgaggtagtatac

SEQ ID NO: 246456 - DNA, 1000 bp, Homo Sapiens
gagaagatgtttcacatttatttacaacttttgacccaaggacctatccctaagctttgaatgtttgtgtttttctttttattataccaatttatgtgcaaagagttaccttctacttcatataaatagtctcatactagaaattccatggaattcaagccaatccttactcgcattccttcttacgaagtatacgaactgaacaaatttccttgcgtagcaaaggtgacatatgaagataatgtgctggcctctcatcatagtccctggataccgttgcaaggttcctaatttgcttggtttggcatttccacagtctttatcttagctctttttttaaaaatgtacttaaattagttaatttgctggttgcttccatattgcttgattcaaaatccaaaatggagttcagaaaaagaacaaataaaattacagcttaagtgcaaactacatttctgagtatctgccaggtagacatacccaatccagtgtgtttcttccagttcaatggattccctcattgggccacccctgaaagtatcagtagttttcctgaaccacagagaactgtctcttagtttcccttctactcttcagacaaccaacggcctatcaagtagtgtcatttatggagaaaaaaaaatgttgaaaaatgtaaaggatgagggtgaagataatttgatagcatgaaaaatattagcctccctttcttattttaaagattgtatacttaaagtagtggccatttcactatattaaaatatttcttgcttaaattctgtgaagaagctttgatgtaaacatctttgcaattagaaattaaagccaaaaataggggagcaaatataaaggaatcggtcagagcaaaacaaaatgaaaaaaaccaaaaagtgttgaaaacataattactagttataactttaatggagatttttaaattatgaaagttgagttggccattcttacttgctaggacagaaactgctggggaaagaaactg

SEQ ID NO: 246457 - DNA, 1000 bp, Homo Sapiens
cttcactcaggtagaaatatgaaaaagaaggataacgttgatgtctgaatatgtcttagctgccttagtaaaatgccctttaacccccgtcagtcccagtggcccacccactgccagcagtggtttcatagctataaatccacacttccagcgtcaagaggctaagacatctgcatatgaatatgattcatcctacttagaaagtcacttgctctttcatacaatgcaatcataatactacgtcatgctgtagtcttccgtttgggagctgtcagagtttaactaaaatacatttccatgatcactccgcggagtaggatggccttctgcttgccgcaagagtggcccccagcccctaggacttcacaggctgctttggaaattgtcagctcctagcaccaaagggtttaatctgaagatcatcattaatgaaggagaaagatgaggtttgcatacatgccccctttcagtgagaaatgttggaatctgggggacatgagtatatacagaaaaagaaaagctggaggtgttctctttttttgttgttttttccctgatggcttaattcagtgataaatgtaccatgatcccaagaaacacaccaggttcttagccttcactgcccatttcctaaatactcaagatgtgttcattttgccacgtaaagatcatttcttatcttcactcaggtctcaattttcttcattactttttgttgccaggtcatcataacgtttcaaattcttaaatgagcaaacgtcaacagctatttgtttcattaaccccttggcatgcatagttggggattttctcattttcagtaccaaggggttaaatggcagcatctcttctcccaaagccaaattctaaccaatatattccatttcagagccttatcattttttttaacagaggagaaaaagtgcatgattctcatcagcgtgtacaatccttgcacatgggtcaaaagtaactgcagtaagtctattttatataagtt

SEQ ID NO: 246458 - DNA, 1000 bp, Homo Sapiens
ttcttataaaatggaaaactttaattgtttaaagaaaaggcacaagtaaacatttcaggttatcatacaatgttacaataaaaaattccaatagcaaaatgaaacacattataactttgcttcttggtagtatactgaatgtattattctatcatctcctctttggagtaaaaagaagggataggcagatcaatggatgtgatgtaaaaacttggatcataaatagcatccactatacctttaaccagaaattaaacttcagtagaattaaaattaatttttaaaacttagttttgttaataatagagcagcagtaactttcaagctaaaactcattgttttggtaagtaaataactgatttcatgaaatgttcgctgtcaatgtctggtatgttaatatacattaatcaagctggtcatgaaacagttttaccaaaatataattcatatacttattttactttaaacctgaatattacagtacattatataaaagataaatgagaataaggaactaaattatttcttacgatgtcagaaataatatacttaaaaaggtgtagaccttattttcaatcaaaggcactatctggagagttaacaagctgcatcatgttcagaattgagaaaaagtttttctccttcccaaataactggctgattagtagaaacctgtcatctcagcaaacactgaatacctagtatctagccaaaaaacaaacaaacaaacaaacaaacaaaaaagacggtgggggcagaaattgtgtaaaattacatctttgacttcttttcccaggattttttttttttttaaagagacagggtcttgccatgttgcccaggttggagtgcagtggttattctttcacaggtgtgatcattacacactacagccccaaactcctgtactctagtgatcctcctgcctcagcctcttgagtaggtgggactataggagtgtgccaatttctaaaaaggctgttgaagtgttttcttgatc

SEQ ID NO: 246459 - DNA, 1000 bp, Homo Sapiens; identical to SEQ ID NO: 246403

SEQ ID NO: 246460 - DNA, 1000 bp, Homo Sapiens
ccacccacaattttattattactgaaagcatttggaatgaagcaaaggatttaacaatatatataaaaatatacattttttaaaaaatcgcaagtagacaatagatttatggaattatttttctgatcatccagaaaagatagcaatagtaaactgcagttgggtgagaccagccactggtccatgagacctaagcagccctaacgctgcctgagctctcaagagtagaagaaatgctcgacaaacagaaggaggctgtgggagggcagcaggacagccccaccagaaaaccagagcccaaatgggctgggcagggccagggctgaggtatcgggatgcaggaacaaccaggaaccccatgtgggttgaggagacatgccaattattctggcctggagaggaattaccaggacacaagaactcagaccatctgcaagcaagctcccttgtgtgtgttcactttaaatcaattcgtgtttaactcactgaatgaatacgtgggtttgggtgggaatcatccctgtgtctacgatcatctcaaggagaccagagaagggaaggcacaaccaatcaaagcagtttccccaattaagcttaagtgcccactaggatgggcgccagctactagggcttcagggaaagcaaaagccatgaggcccaggccctgccccaaggagctggcgctctaatacagtgagagcactcgctcagaagactgtgccttgtggcccatgattggacgtgggacagagtaacaggattgtttccacgtatgtggacaattaggatagggttagagaaatccttgtgatttgagatgggcctggagggacaggtacgatattgacaggcagagatggaaagtgtgtgggcaaaagctccccagggcctgtgcagcaggagtgggaggtggccttcccaggagggtttggaacatactggcagctacgggaagtgaggttggaaagggagtgggagctggaggccaggccaatgcagg

SEQ ID NO: 246461 - DNA, 1000 bp, Homo Sapiens
gtatacaaattactgatgattaagtcttgttaaatacaaatagccatacacatgaagcaaagcaacagccatacatatgaagctagcatttgtttcttgagaactaataaggaactaaagataaataattaaggcaggtaaacagtttatttttctagttgttgagctgtatagttatctgtcgctatgtaacaaattatactcaaaattaatggtgttaaacaataagcacttattatctaatagtgttagaagttcagaaatttagtaaaaggcttagctgggtagttctggctctcttgaggtcttggtcaaaagatcaactgaagttgcaattatctgaagacttgactggaggctggaggatctgcttccaagatggctcccttacatggctggcaagttggtgcttgttagcaaaataccttagttccttgacaggtagatttctttctttctttctttctttcttttttttttttttttgaggcggagtctcggtctttcacccagattggagtgtgcagtggcacaatctcggctcactgcaagctctgcctcccgggttcccacccttctcctgcctcagcctcctgagtagctgggactacaggtgcccgacaccacacccggctaattttttgtatttttagtagagacggggtttcactgtgttagccaggatggtctcgatctcctgacctcgtgatccacccacctcggcctcccaaagtgctgggattacaggcgtgagccactgcgcccggccacgacaggtagatttctcaatagggctgccttggtgtcttcatggcatgggaatgggcttttcccagtgtcagtatggtcaaagagagatcaaagaagaagccacagtgtattttgtgacctagccttggtcacttccaagcttttttggctataccaatggtgagagtggtactcattctcaacattgtgcaagtgcatgaccctgagtgtgaatacctccttaaatttt

SEQ ID NO: 246462 - DNA, 1000 bp, Homo Sapiens
tccagaaaagaaaatcccaaagcaaatttgtgctagggttctttgaacttggctcttttacctcatggttgaagatcttgaaagaagtatgtaggataccactgggtgatgtacttgtcaaggccctgaaaagtagcctaccatgccattctcccccactctcaagtagcacttttatgttatgggaatcaaggggtgggaggtatcattattcctggtagttatgggtttttaataaatatcattactgcaatatcagacttcaatcttgccagaacttcaaaaaacattattcaatttttgtcttacgaaacacttaaaaaaaaagactatcacttgagaattttctttgcaatttcctgtaaatgaaaacatttgttaaaaagttcatctatgaaaagttctcacatatcttaaaaaaaaaattcttctgtacacttgttcccataattatgttgaaattaatggaaaatttaaaaagccaatgtaagacaaaggaaggtaaatactgtacacttgctgagaacctcttccaccataagattcactgttttcccagttctgatcatagaagccatttcagtcttgaacttgcagtagtaaagaagctgtgaaaggcacaacttgtttgactgagaggccacaggtgcactgaagtgggattcaacacgcatgactcagcatcaaactgttggaccaatcagatcagcttctagtacccccacacacgctcacccacgtgttcctttaagtatctataatcctatatggatgttttataaacttgctgtctcacattaaaaaataagtgcatcaagtatctttgtacattcaagtcacttcctaaggcaaattgtctaccatatgtactcccaactgctttggtatttgcttcagttaattggggtggacttgggtgttgctgcatgcaggttaatcgactcagagtggactaagtgggtggacaaatgctgggagcatgccttagatcaatctactt

SEQ ID NO: 246463 - DNA, 1000 bp, Homo Sapiens
ttttttttttttgagatggagtctcgctctgtcgcccaggctggagtgcagtggcgcgatctcggctcactgcaagctccacctcccgggttcacaccagtctgctgcctcagcctcccacgtagctgggactacaggcgcccacccccaccaccacacccagctaattttttgtattttttagtagagacggggtttcaccgtgttagccaggatggtgtcgatctcctgacctcgtgatccacctgcctcagcctcccaaagtgctgggattacaggcatgagccaccgtgccccgcctattcttcttttaaaccaaaaaaactttcaggtgagtcaaaaccaaaaccaataagctttttatgacttaaccatggatgaaagagacaccttcaaaatcaggtgcaaaggaggcagcccccccagcccggaaccaccccacagacagtagagaagggcccttgtcagcgcaggagtgaggggcgctttccagcactgacccagcgacaaaggtgaaggtgggaaaagccccttgtggacgtggacggtgaaactgagctggcgcctcgggcagtgatgcttgggctggcagagaccagggagagagttctcactggtcataaggccaagctctcaagacacaagacaaacaggaaagaaacacctgcccctgggaggaaagaacccttgagcaccaaaaccaaatttacatgagcgtcccgagccacgcgaatgactttctcccaccaagctgaactgggaagagcaggaacaaggcgtgtttgcctcccaccctcagccgggcactgcagacagacagccagagagcgggctgtggtcagagtcccctctgacctctgctggcttcgtgtcagtctcccggatctcatctgcaggctccagagcaggctgcgtgtcagcagctgagacccaaggcacacacgatggagtaaggagaggagcacacgcgtgtattggacgcagacactccacatttgtg

SEQ ID NO: 246464 - DNA, 1000 bp, Homo Sapiens
ttaaggatttaatccaacaaacatttattgagcaactgctgtgtgctatgcaccacgcctagtgctgtgatggatacagatgaataaaacacagtccctgcccttggcaagcttacagtctaagaacagtcaaaggacaagtgcacaaataactataatacaaggcagaatatggtaagtgccatgagaaaggtacaaataaagtgctacggtggttcagcagagggagagatcccagtggttggtacatcagggagggcttcatgaaggacgtggtttccgcatgggctttgaagggaagaaaagggagcattccaggggatggggatagcaagaccaaaggcacagagacagtaaaacgcaggcaccctttccaggaaaaacaactctcctaggctgaccaggggagggtgtaaaggaagaatggggccttatccggtggtctgtaatgtcagaatagagaattgtacatttgttcacgggccggggaacttttaaaggtttgtgtgcaacgggagaggaaaatcactgtgcatgttcaggatggacgggaccacgtgtcagtgtgcacagaggtaatctgggagatgagactgttgctgaaatagtccaagtgacaaagagtcgagattagtgctagtgggaagaattagcaaggcaggacagggaagaatagtcgaagataacgtcagcatctcagactgggtggctgacgggatcacgggtcttttactagaaaaaggagggattgtgggggaaggggacacagatgatccacttggcttctgacttgttgagttgatggtgctgccgtgggagcagatggggtgagtgtccctccagcgggtgtaatcccagcctagagctcaggagagggctgggttgcagagaggagctggggcaggggcagcttaggaagttgcagccgggtctgaaggcaggtgtgaggttgctgatggagagtgcggagggactcaggagaggacgccagtgtaaggca

SEQ ID NO: 246465 - DNA, 1000 bp, Homo Sapiens; identical to SEQ ID NO: 158702

SEQ ID NO: 246466 - DNA, 1000 bp, Homo Sapiens
acaaaattataaaaaacatttttatgataggttaacatgggagcttgcatacataagaagttccagaggagaaaacatgacattcagttaaatgcaacatgggccaaggaagacagagaccccagctctgacaagcataaattaggatattatgcacctgacacattcagaatgtccattttctttcccatcagagtatgaagtccaacaatgaagtcaatacataaaaaaggtgacctgattttacctggtgtaaaattttagttagcactactagcaaattatgaagtttggaaatttgttgtagtatatactaatttaaaatttactcaaattcctgtttgtttgagacaagagtcttgctgtgtcacccaggctggagtgcagtggcgcgatctcggctcactttaggctctgcctcccaggttcaagggataatgcctcagccaccagggagtaagggactacaggtgtgcaccaccacaccctgctaattttgtattttttgtagagacggggggttctccatgttggccaggctggtctcaaactcctgacctcaaagtgatctgcctgccttggcctcccaaagtgctggaattataggcatgagacaccccatacctggcctcaaattccttttttatcttcattctctacttgaacaaatattaatctttaaaataattttagagacagtatctgataatcaaagaccaagtgcttttatcagttatatagtgacacactgcttggatcaagtggaaaatatctcaaaaatacactcataacgaagtatcaaaagccttaaaattttgcatatttggtaacccagcaattcaaagaatttaagaaaacagtcatggatgtacatgggattcagtgaagtgctgtttataactgtgaaaagatgtaaatagtcaaaatatccaatagaagattaaatgaattatgattgagtcatacagcagaataataaaccaataaaaatgatgcagaa

SEQ ID NO: 246467 - DNA, 1000 bp, Homo Sapiens; identical to SEQ ID NO: 158736

SEQ ID NO: 246468 - DNA, 1000 bp, Homo Sapiens
ttagtgatggggatttattaaagcattcacagggaaataaggaagacaagaacagctacacaggcagcctcatggaagaacagaaacttgaaaatggttcatgatccaaagcagctctagagcctggcttatcttgtcaccccctcagctgcaggcatctgttgctcccttctctagtgcttcccaaattggtgactcaactcctttctggctgtatttatactcctcctactgctactgactaacttctttctgcccccctcgatgctagcccatggctttttctgcctcatgggtcctgcagcttcatggctcccggcgcttcagttcctattaatccatggcttttctgcattgtagctcctgctgcctcttccattcctgttgccatgttgccacatggttctggctaccttgtggttcttgcagtctcatcgcttctactgtctcatgatcttatctattcaagccttctgctgctttgtggatctcatagtcagttttgtctcacggtttctgttcctcgtggctcctattgcttcatggcttctagcccattgttgccttgctgcttcatggcttctgccaccctgtggctccgtgatctcattatacaaatgtctcatgacctctgcttacttatggtttctgcagctttctctttgcttttgctgtttagtttctggccacccctcatccaccaccactaatgcctcattaaattctaattaacgttcacttcttctgaatagctcacattctgcctccctgaaagatctggttgtttcatacatttgccatttgatacatgccacccctgtaaggtgaagtccttatgccagtccagctaacaggccactggccagcctagagattggttgcccttgaaccagacactatccacatctagctatctgtggccaggattgtgaggtcacatggtacagagcatggcaacttatgctaaggaaaccccttagaagggactgcaagcatggca

SEQ ID NO: 246469 - DNA, 1000 bp, Homo Sapiens; identical to SEQ ID NO: 158789

SEQ ID NO: 246470 - DNA, 1000 bp, Homo Sapiens; identical to SEQ ID NO: 158803

SEQ ID NO: 246471 - DNA, 1000 bp, Homo Sapiens
gcaaatgatcaaatataattattatgtttatttgaagtgagatgatggaaaagatggcctggctgattttggaccgagtggcccatcacgatacctgaacaagcagttgtgagggtgggcctggcacacccctggatgtttacaggagcatctggtccagtcctgtcttatggctgtgcccagctccagctctggaagagtctctctgaggagcagggcctggagctgggcctgcaaagccagagctaccactagaagaagggctgggctggagcagggccaggaaaggagacctgtccaggggacaaggtgcacgcagccttcaggtgcagccagaacctgccggcagaccccaggccaccgacgaggcaggcctcaccaggaatgacacctggtgtctgaggtgaccttttattcccctaggtgcatgccatctttttaagtgagaagttttctaaagcaaagaataagcatctacatcttacaaaaaaacaaaaaaaggaaaagaagggatcctataacaaaaagcacttccttcttctagaaggaattctgagtctcaaataaagagaagatcttcttttaatatcgtttttctatgtaagaggagcagacgttattattcatgactatcaatcaatctgcatatgtaattataattgcaatgcaatacatatgaatataatttttttttttttttgagacggagtctcgctttgtcacccaggctgcagtggctcgacctcggctcactgcaagctccacctcccgggttcacgccattctcctgcctcagcctctccgagtagctgggactacaggcgcccgccaccacgcccggctaattttttgtattttttagtagagacagggtttcaccgtggtctcgaactcctgacctcgtgatccgcccgcctcggcctcccaaagtgctgggattacaagcgtgagccaccgcgcccggccatgaatataatttatatggacaagattcacttta

SEQ ID NO: 246472 - DNA, 1000 bp, Homo Sapiens
agttgtaaaaactggtttatttttttaaaaataaatacaaaaatataaatataaaacattagcagatagaatttgatgaaatgaaattgcacaaatgtctgtataccaggttgcatatcacacctactaacatcacatgtacatttttgtttttttaatttaatgtacagaacaggatatactgtaaaatttttcttcacctttttaaaagcttcatttgcaagggcaggacatgtacctaacagaagcggcttgtttgtgaggttgcttaagggagaactatcctgttcatgtttctgaaattatcttttatttactaagatggacaacactgtatttccatagctttggctcttggaagtgattaaataaaatgtcatatatattccatgagacatcctacaggaaagaattaatgtaattaatgaacaaattaagaagtaaatgagaaaaaaaattgtgctgactggcaggaaaatgctcctgaatatcaaatattgtgaagtggagacagcatgggtagagttactttctcttgtttgaacagaacatatatcctacgttaagagtctttgtcactttccccaccaccatacatttctgctagcttattaaaccgagggccccattctcggaggtaatcgtagttttggtctccttcagtagtacctgattctaatgaactcagagattcagcaatggaatcatttccttcataggcataggttgcaagtgagtcgtaggggggtgcggtggggtcaagatcatgctcttttagcctttcattaatgaaatcccggacgtccgtgttatctggagctgtaggagtcctccgaggaataaataacgtttctggaataatatctcgccggagctttttttcctcaatggctgcaggattcctcagggtgccgatatcaaaggcctgggtgtcctcctctccaccaccctcatcgttatagctcacaatgttgtctctgatatcttcttttgacaagat

SEQ ID NO: 246473 - DNA, 1000 bp, Homo Sapiens
cagggtaaaaaatctaaaactttcacatcaaatcttaagatgtcaacaaactacaaagcaaatcaacagatactgacacatcagatgaaagaaaaccataactgccaacttttcagttgaatcttgtaggttttgatccgccactgatctcaagttagaataaagtccattactatcagaaacaaaaactgtttacataagatcctatagcctccatgactttaaacggaggggactggaatctgcttggctgaagtgctgtcatattcctgcactaagtcattagtggtgtgataatgcatggcaatatatgaattggcaaatccaaaagagtttactggctgtaagttacatgggctgctctcctcctgggaagggctgctgttatagatgctgtagtaaggttcaatccgagtgttgatgggggtcgagctgctctgaccacagtgttgatgtccagcagagatcttgggactcaccatactttcttttgaatgacttgggccacaagcctggtccacaaatttcttctgtggctttggagataacatgtaggcagagtttgtttcatgatgggaggatttgtttctgttgacttcgaggttcccttttcccatggctcgaagtcgagtcttttgtttgcagcagaaaaaacccaggcctatgtattggaggcaccagagcactttccttctcagccctgcactgttccgagaatatataaaagggtttaatcctgacttgaaaaatataagagtaaatccaaacaattcaaactggtaaagaatgaagctcccattgctggagagaaccacctgtaccaaggaaatccccagtggaagacagcacaccaggactgacagcacaatgatcacacaggtgaccacggctttggaatccttggcagtggagaggttgatggctgatacgagctggagtcggcttgctgcaggggtgaccagttggttgggactcttggtatatccacgggtctgaacgt

SEQ ID NO: 246474 - DNA, 1000 bp, Homo Sapiens
ttttttttttttgtatttttagtagagacggggtttcaccgtgttagccagtatggtcttgatcttctgacctcatgatccacccgcttcagcctcccaaagagctgggattacaggcgtgagccaccacacccagcctcatatctttgtgagtcatgattataccctatttttaaaatcatcctttataacattatcaactatactttgatgatgtcatttttccaggatatgcaaagaggtcatggtcactgactccttaagagtggagcctgacatatgcctgacagagggtcaattgtttaaggttattgaaattgatttcataccttaagaaaaaaaaatagccccaggtcttgcagaagaagatataaattcacagcacagtaagaatagtttgaaatacatttttaatttttgaaaaatcaatatgtaatctacaaaatattttgttacatgattaaggctcaacctgtcttatatttgcattgacagaatacaaaactgtattttaagtaagacattataatagtcattgttaaggaagtccttctaactgactttataagaaaaggggctgtatcacaagcatagctctggaatgaagggaactaacatcctagaactgtctaatatatacatcaggttgtaaaattccagcctttatttatgtgctggaaagtatcttttttacatatctttttttagtggataaactcttgtgattcccacagaaaaaggaaatgttcttaaattcagatctgcacaaatcatctacccatgaattcatttacacagttaatatgatcctgtaactggaaaggtgaccagactagtcacaaactggtcaactccttggaagtctgctcatttgactccaaaatggtcaaactcacaatggagtgatctaagcaaaatgaatgctagaaaggaatatttcctccctcattcctttccttccccgcttccctcccctaaaagcaagggttttttgaagatc

SEQ ID NO: 246475 - DNA, 1000 bp, Homo Sapiens
ggtgcatatgcataagtggagcccagagggcctctcggctcactgggtccccggccccccgagctgaggaggcttcgcaaggccggctgctacaaagtgccgagcttggctgcatagattttaatgagagcgtcaggcagagctgtgctgttgctctccgggacttgcagatcattaccaaaccaactgtaggatgagaacatagcacatcgaaaccctaggaggtcactgagctaatgatctaatcctaccttccgcaggcagtgcccctccccacctcctcctgcccccagccctttccacgatggactcagtccattccagaagccaggccaacaccgcccccttcaaggtcagagcagaatgacagtgagtggctctagctctcccttttccgggcaaggaggatgggggtaatttagtcaaagccattaggcccaaaccctggcctggccaggccccaggtctcctatttgggagaaccactgccctctgcctgcctctccaactactgctgggctgcggcccaggcgccttcaacgaccattttagggttctgatgaaagcaccttcggcttctaaggtgcaggctgggaaacaaggtgggggcccacatagcctggtgtctcagcatggagcttagtgccaagtcctgtgccagagacacctgatgtgtaaagagggaagagggcacacttgggagtggccacagcaagacggcatgctgtcccctacaggctcagtccccacaccctgagttccaggaaagaaggcagaggagaagcggccagcaagggcacagaggcagaacccatgactatacactctctcctcaagccggagggctttatgagggctttggcaattactacaaccatttgctgtgctgggtagggacagatcctgtttctctttgtttcagggctctgaaagccggagaagccagcagaagccgatttcagcataagaggctacacaatagttagggcagaagaaaaga

SEQ ID NO: 246476 - DNA, 1000 bp, Homo Sapiens
tttttcccagtagtgagtatttttatgtcccaggatatgctgaaccaatcagtactgaatttaaaaagttctttatccaaaaagtgaagcataagagatgacgagtcatctcctcaggtcttaattctactatttccaggagctcaagaggtctgtatgaatcatgtcaccaaacatgactttcgctcaaatgctttctctaaaggctcttcctatgcatagaattgcatatacactgtggtgatgcaggaacttgtctttccagtggactgaaggatacttggctctgtttgccttcagttcactcaagcctcagtctctcatacccatttccccctgtacaatgattgcagcaacaggccttcctcctccctgctattagatacctgatgcatacccagttgtgatttccaggtgaagactttctcagtcactggctttatagcgtttttctccactatgcattttctggtgtttaatgagattcgatctgtcagtaaaggccttctgacattctgtacaagcataaggtttctttcctgtatgaattatctgatgcatacttagtgtggctttctggatgaaagctttcccacatttactacattcatagtgtctttctccagtatgagacttctgatgtatattgaggcgtgacttccaggtgaaggttttcccgcagtcaccacattcatagggtttctccctagtgtggattttctgatgtgttatgagatttgatcggtcagtgaaggcctttccacattcagcacatatattgggcttctcacctgtgtggattttctgatgcacacggagttgtgacttcttagtgaagcatttcccacagtcgctgcattcataaggcttctctccagtatggattctatgatgcgcaatgaagtgcgatttctggataaaggccttcccgcattcaggacaaacgtacggtttctctcctgtatggattctctgatgcacgcttagtgttgatttctgg

SEQ ID NO: 246477 - DNA, 1000 bp, Homo Sapiens
ccagtttcatttatataatgaaaataaatttttacacaatcaacagaaacacaccaagattttttttttttttgcgaaaaatatttttaaataaatttttttttcttacattctgatatacatatgtaacaaggtttatggcactgtaaccagaatcaaatcagaaaaaaaaaaaaaaaaggaaaaaggtgggaaggaaagtatttgatatattgttgaattcctttctatctccaagctggcaaatttgcactatttgtctatcattcagctgccagctctaacttgtttgcacacttaaaacatcatattattgcacaagaagccagtgaaggcatataatggtcagttcctcactatttcaaaaaaaatctcttaaacccagagaaggaaaaaaaaaaaaaatccagagcatgaaacacacaaaatcaaaggtatcctttttctccttaaagaatgcctgaaggattcttagaccacttaagctgccctgatcttctctttgcaccagtgagcacaacagggcttggtttggttgggtttttgttttctgtgtggacagcccaggttgatcccaggccttggtgattcaatgtcttttctatttacttttggttctttttaattggtttaaagtgtgtagtatcttcggtctatgaacctgcacagactatttagtcataaactctacaaatagcttaaaaggaaaagggggagaaacaagttgtattatatttttattgttggcttaaaaaaattacttctttaacctccttaatttgtcagtttgtgggaggtgaatctcaatggcatcaaaagttatagtcttcttacacttgttaaaaataaagtgtttaaacaagtttgtttccattcacaaacttactcccaactacaaaaaaaaaaagaaagaaaaaaaaccagaatccatcctccttcctcattgtctcctaatggagagcagcaatcctttccatccagaccattgtcacacaaccgt

SEQ ID NO: 246478 - DNA, 1000 bp, Homo Sapiens
gagtctttcattttctgaaaacaagaacacaggaaaacaagtccttttccctctcccctcagaaatgtgtgcattttcccaccaggctaacagtggctacctctgcaccacatcactgatttcctgtacacatgacaataagttattaaggacagggtttgtcccgggcacaccagcagctgctgaagaaacctgtagctcctgcaggctgagttccagtttgctcacagcctctcggaaggcaaatttgttgcgagtttgagggatgcagtccacatagcctgagcagtagtcaagcagctggtgtccagtgtctaccagctggctgttgggcacaggttccgtgagtgcactggacagtaggtcagcacattccagcagggcctctttgctgattttgtctgctgagattttctcagcggcctgtttggtttttctcagagccactttagtacctgctgtgccattggccattttggctggcgagatggaagatgtgggcagaggcacttgaggtggaggcatcactggcctcccagctttcccactgatgggcactgcgcccagagctgccttctttcctccttcctgtgtttctgatgtggactgtcctgcagttagggcagttggctcttctgtagggtctgagcagatggacggatgctgcagtagtctcatcactggtggtgggggtggggcacactttggttttacccgtcggggtcggtccttgtctccagaggatgtgacctgatgctcagataagagcttgaatttattcccctgagagtctgtgccaatgagctgcacgtcagctggagtgtgtttcagagtgggtgagataaggactggcactttgtggttgtgagtggttgggaggacgggggcagccttggctggagaaggccagcccggctgctctccatcctctggaactccagccatcccaagtcgtgccccaccattcttctctttacccttgggggcagctgccactcca

SEQ ID NO: 246479 - DNA, 1000 bp, Homo Sapiens
gttatcttaccttggtcttaaaatttgttatctgttttcttcattgtatgtgtttattaataccagtaaaaacagattatcacacatcttccataaaatgattgtgatagaaatgtcactgagtgtgtacgatgatacgccacctgcagcagcatcctggaatattacatcattctaagtgcagtacagagcagctgggttcaaatccaacttgactggtgtgggctcccacaaaagctgttaccagtgaaggcgaaaaaaataagaatttgctctactaaaggaataaaaaatgaagttacaaaacacttaaatcacattaattccttcacaggcctttgtcatgcaagtgtgtaattttaatttattctcttcctcagggtgatgtagtaccatgtaataattattccaataaaaatttttatttatcacatatacctttttcaagaagaatttaaactacaacatgacctaaagtgttctgaaataccaaccctataaaagtaccttatttcaaacaaatgtgatgaaagggaggaaatacaaacatgcaaagggggtgtgacccaatgggtgtgtgtcagtgtggacctcaaacagcaattctcatggtcacctaactcatatcagaatcgggcccagcagtcaacaggctgttttttataacactacactttgcctcatatgctaacaggcattcagcattggaaacatcacaaacatttactgtagttcagtcgcgttaatatataatagacaagtttatttgttcacctaaagtagttttaacagcataattctataaaaatgaacactaatggaagatttatctaagccatacaaaagtagtttaatggaaaagacccagtaatttaaacgttttcatataaggaacatgatgcacactatgggatctatgcatcaccttcaaaatgtaggaaggtgtattaatttcacatatttaatgtattatataaatgtatttaacaacctatcaact

SEQ ID NO: 246480 - DNA, 1000 bp, Homo Sapiens
cttgttcctcacaatcgctcttcacacttttattgttaattctcttcacatggcagatacagagctgtcgtcttgaagaccaccactgaccaggaaatgccacttttacaaaatcatccccccttttcatgattggaacagttttcctgaccgtctgggagcgttgaagggtgaccagcacatttgcacatgcaaaaaaggagtgaccccaaggcctcaaccacacttcccagagctcaccatgggctgcaggtgacttgccaggtttggggttcgtgagctttccttgctgctgcggtggggaggccctcaagaactgagaggccggggtatgcttcatgagtgttaacatttacgggacaaaagcgcatcattaggataaggaacagccacagcacttcatgcttgtgagggttagctgtaggagcgggtgaaaggattccagtttatgaaaatttaaagcaaacaacggtttttagctgggtgggaaacaggaaaactgtgatgtcggccaatgaccaccatttttctgcccatgtgagggtccgcatgagacccttctcctagatccttatcagatcccatactgcagccgattgactgactcattaaataacacaagttataaaactttaaaaatggagcatttacagtcagggacataaatacgtgcttttaaaagtgtctacatacatatttacagagttgcaagatcaaccgtagtagccctgaaaaaaaaaatccctttatcgtgtgacaaaccgtgctcatcagagctccctccttccgctctgggtttgatagctcactcttgaaattggagctgagaaaacagcgcccaagtggtctcagacatccttgcctggggtctgccccaaaggcacaaaacccaagaacctcactgaactgggtccaaacgccaagctcagctcacccgtttctccgagacatggactgaccgtcctccagagagcaggagtcagccccgtccgcccctggc

SEQ ID NO: 246481 - DNA, 1000 bp, Homo Sapiens
tgcagttctagcctttatttttctttgacgaggagtgccacactgagggcccctctgcagcgccgcacagggaagcggtgcctcggggagcagcctttcctctgatggcgggaggggtcaagggatgcaggagatccacggcagcacacgcagcctgcaggcgcagcacacaggcagagcactgcccagcagctggaacatgagaatgagggccacaccacccagctgcagcacaagcccagcacggcgtgtcacggcacctggcaccaccagacccagaatggcctgtgcgagaggcgcacgccactgacgtggctatgctgtgatcaaagcccgacacgccggaagaagagccgcagacattgtggggtgcacacactgcaggggagctgtggagaccctgatgggtccatgagcccctgcagctgccccagggacccgcacagcaggcaactgagggccagggtgaaaaccctcaagcacatgtggccacccaccctccctgcctccacagcatgtcaggaagccagaacctgtgctgggtgtgtttaggacaaacaaggccaccatcctggggacagagcgcaaggccccagccttggctcctaggccggccccactctctcgcctctcaggtgtcagacgtgcagcctgggtgctgagtccagatgacaggtgagacacaagccgcaggtggcacatggcatgcggccaatggccccttcacttcctgaccacacagaggcgtccctcctccacagcccctccagggacgactggacggggccggtggaaggactcaggcctgcaccgtggcctggggacgcccactctgacaggaaagagacgagcacacctctgagtcttgcgccaccggcccacactttaccctggagtcctgggggccctgcggggccggcaggacgctcctcccctggctgcacatccaaggcctcggcgactgcaggagcataacagacgcccttcacaaacaggagct

SEQ ID NO: 246482 - DNA, 1000 bp, Homo Sapiens
caggtgtcacaattgcttttatttttatctccagtcagtcacagaccccaggaaggtgaggtcagggaagggaacaggtgcggacactggggaacttgcaggagctaaggccagtggacagcaggagtgtcgggggtgtggcagctggcctgggtccctggagctgtgtctgccctcagggactcaggagaacggctcagggagggcttgggagggggtacactgtgtccgagagatgcaaccatcgttcggcaaaagaaaacagcggtggctgatgagaagacaggtctggggaggtctgaggagagctcgggccagatcctgcccccaacctccagccacatgggccctcggtgactctcccaaaccaggccctgcgtttcctcaagcagccactggagggcagcaaagtgcttatgcaaaaatcccaccccgcccaggagagcagccaggacacctgggacttggcttcaggtgggccagggaaggaggcaaggagccttttggaaaatgggtgtctgtcccatcctgactccctcggaaggaagagtagggaatggaagaactaagattccggggcttccccaggtgataccgaaggagccataggtgtgcccgggaatgagtcccagactcgtgtgtgcctcccgggcccccatctgcagcttccagaagaggacttcagtgggagacccctcaactcacattccggacagtcagattcctggctgcctccagctttacaaaatccagcccaccccttcctgggcccagccccacccaggccaaaaatgtgaagggcctgcagactcccttcctcctttacagcttgtgacacctgctcagctgcggtttccttaatcttgcattcctgttcccctgcccttcctacttctgacgcctctcctggtgtttcaggattcctcactgcctggattggagatggaacgcatagactttggccctgaccctgctgcctacactgtggtacctgccaccc

SEQ ID NO: 246483 - DNA, 1000 bp, Homo Sapiens
tcaatttactttttatttttaacttaaacgactgtgtattttccacagtcttatgatgagaaaggctccagaatcacgtgtaggtgtcctcaacatttcatagctcgaaccgtcctttctttacgttgtgcattgatatgggcttctcagttcagaaaacaaggcactataactattttatcagctacattaatacattgaagatatatttatcctttcatgaaagatacagcatttgaatacaatatggttttatgcagatcaggttcaaaacacccaaggcacacactttattttttttcctttttttttttcttttctgtgtttatttgaaggctcgtattaaaatttcaaaattggcatgaacaaagagttccagagtggaatcaatggacagggattgttgtaattttgaacataaaacggtaaagactgtggaatgtagaacaagttacaggaacgataaacaaaatcaccaatacagcatggattagaaatcaaagtgatgagatctgcggaagtctgagaaacaagtttggaaattctctgattccccacaaagcacgggcagtcctgtctgcatgcagctgctgtggtcacccagccactgtggaatgttcacctacttgcatgggttcatggttgtctacaaatacagaaacacattccagttcgccagttattaaaatgcctccaatttcaagtaaaagaaaaaatcttccaataattttcctagtaaggtaaacgaatatattcatctaggaaaagtggtctggaagaaaccattggaagcaaagtctaggggggtgccaaggtttgggagaaactattggatggtgaagcgggagagcttgagggtgaactacaaaagatatgaggactggaatttttcctgaacgtggaagcatagaggctgctgctcaactggggaatgtgccaaagtagaagaaactttaggaactaaagacaacaagttttcactggtgaggccaaagaagaa

SEQ ID NO: 246484 - DNA, 1000 bp, Homo Sapiens
caaccttcattcatcctttattgaaaaggcggggaggggctatcaagtcctttgctgaattttagtgagaattaattcagatacataccaaatgcctcacacatgcgtggcttgagctaagtgttatacacagctattatttttaattctattacacataaactccctgaggccggtgacagtgctttgcaataataactaatcaacaacagtcaatgcagtaagtgaagagtagaattccagcatactaaagggttaggatctagggatgagagccccaaccacctctatcagaaacagagctgctgggccagctgtagtggctcccacctgtaatcccagcactttgggaggccgaggcaggcgaatcacttgaggttaggagtttgagaccagcctgggagacatggtgaaaccctatctctactaaaaatacaaaaattagctgggtgtggtggtgtgtgcctgtactcccagctactcgggaggctgaggcaggaaaattgcttgaacccaggaggcagaggttgcagtgggccgagatcacgccattgtactccagcctgggtgacagagtgagactgcctcaaaaaaaaaaaaaaaaagagagctgctaatttagaagcaaataacaggaatgctgggttctgaggccagccctaagacagccagaaacgctgagaaacttccacaagcaacaattccttacattcagtgcagtgtagcacttcaagagaaatccagaaagtttcagttccagatgagaacaatgaggtggtgaggggctgatctgcatactattgctgaatttgtctgcacccgctaaccccaatgatgagaaaagggagcgcaaaacatccctcagagccaaggaggcaattgcacaccggtgatcactgggtgttgtgaagtgggcaacagaagcccctgttcggacctcaggagtcctaacttttccttgtcgctcttttctctgaaccacatgctgtttcctgggctg

SEQ ID NO: 246485 - DNA, 1000 bp, Homo Sapiens; identical to SEQ ID NO: 159044

SEQ ID NO: 246486 - DNA, 1000 bp, Homo Sapiens; identical to SEQ ID NO: 159062

SEQ ID NO: 246487 - DNA, 1000 bp, Homo Sapiens
gagaagaaagtaaaaaaattcattttgttttctttcacatgaggtttgttcctggcaaagcgtgtcaggctgaatacaagttccgctaaacagaagcatttccgagggcagtcctttaaatacaactttaaaatgagcctggaagtacaaaggaacaggcaaggatgggagagaaggctttgtggacagagctgccatagcccagcctttactccttaatctctagggaaattattgggggtgtaggtggggaaaggacaaagataactgcaagatattttatttataaaaagggtaactaagctgcttttcaaagaaaacaaaaagatggcaaacccagcacccagctctgaaagatctatttaaaccagcaagacaaactgacttcagctgtggcacccacagcaactaattcctggtccagaagagacagtggagaactggtgggtttgggagaagcaagcccattccccctatactgtgtctatctgcctccagcctgagtccagtccagtagtatggtaaaggagagtatggcctgagggagagggaagacagcaaacctagcagggagctaccagtctccgtttccggatacatgcccaaatccactctggggagacctgctgggccgcagggttcttgtccctgctacccagcacgtgcgtggctgaagtcatatcaaattcctgtaccaggtccccgtcgaatgccacaaagtagcgtctgagacggctgaagtctggtgtggagggtggcaagtaaagccgcaccccagtgaagatgtccagcaatacctttgtttggcacagcgtctcatcagcagctttccgcttctcccctactttcactggagaagactttgtggccagcttctcccccaccttcatagcggaaggctttgcagtctgcatgttgccatctttgctgttggagttactcagcttcccttctgctttcttggtactggctgagggcttgctgggggccttgcgggaca

SEQ ID NO: 246488 - DNA, 1000 bp, Homo Sapiens
tgtactgaatatgaactttattgtgatttggtttatgtaaggcagtgtagtgaaggcactgcagaagttaaacagactggaaaacatggtaaaaaatgagcgagctaaaaatgaatgcttgctggtctaggtaggctaagtactacaactatgtttctttttcatcattgcagaagcgttgaaatattgttgaaggtgggggtttggggtggaattagggaaggcttcatggaggaggtggcatttatactgggccttgaaggaggggcagaaagttgataggttaagatggagggaagtacatttcataatgactgactctagagaaaattctgtagaagtactgaaaaatgagagggcaaacaaacacccccagcgagtgaagcatcccaactgagagaaaagtctgaggagtctgggctgggaccaaagtctcaagtccccagatggggtcttcagtacaaatgatattaggaggcacaggacaatgggcttgtttgtaaacctagcagcagcgagaggtttcacattgcagtcaggggccccaaactggctgtaatatgtctggatgaattctctcatcttttaggtgtgtatggtacttacttatctttcctcttgcccactgactgcctgaatggtagttcgtgcgcgcccatgtgcgcgtgtgtgagtgtaggtgtgtgtggatgggtgggggaccgaggctttgtctcccactgcagcttcttccacttttccgtcttgtggcacacagcaggcttccattgagctgaagctcaggcccctctcactgtctaggactcattgaactccagctcttgattaagcaccaggaagctttctcaacatgaaggtaaaatttactgtcgggggtgacttgggttagggcaggactacactttccggaggtgatgatggtggtgagtggtggtggtggtggtggtcgtggttggtggtggtggcagtggtgtctgtaagggttggggacttaaagccg

SEQ ID NO: 246489 - DNA, 1000 bp, Homo Sapiens
tatcatcaatcactttatttttcttttgctcttaataacaatttattctttctcactcttgaactacttttacagttagtgtaatacatctgttcttcaaaaccagcagaatcgtttctataaagattgagaataacagaacactctgattaatataattactccctaaattaaaccattagatctgaaactgtttgcatttgcggataatcacgaaaggtcatgaccccagaatccatctctcctaccagggttgtctgcctgtaccaataatatcaataaggaaatatgggtgatatctcttctcatgaaagagcatcaatggattatgagttcatgactaaaacaaatatatattaaggcaaaccatatgaagttactgcttgtcagattaaaaacagccaaatatccacaattatatatggttcaacttaatagattttgtcccattttaaagcagcgtgactgaagaatttaattttcttaacaagtggtaaaggagatgggaacagttactggaaatgaactagaaagctattgttttatggcatagtttagttcctacagtaaatttcatcaaattttaataaactctcccttacatagtcatttaactcatttctcttgtatgtcctatatttacttatgggttttaatattataagaatagaggatattcattcatagatattccaaagagtctttgaacgactgcctattcgaatgtttaatattataatagtaacacagtaacctagagctttacctaacactttctagtttacagactatgtaaatatctttttgaaaacacacttccagaaataaatgtaatattctattataaaatgtgtcattttcttttaggttagttttgagagacaataagcccctactaaattattgagaggacacttttctgactacaaaagaatactcgtttatgtttacactccagaactactcataaagtattaaagatggcctcttaaagtagcca

SEQ ID NO: 246490 - DNA, 1000 bp, Homo Sapiens
tgcagaaatacctttttttttttcctggtcatcaaagcctacccctaaacaaaggggaaagtttccagatactactcctgctcttgttggctagctcaggaaagaatggtccactgtgtaagtctgtatttggaccaggtccagggtggtaagatggtctcagggtcactaacttctaccttgtgcaaaactgcattagtcagaaagggggcccaaattcagacaggctcaacaattccttatatatttttcaaagtgcttttgttgcatgtttcattttctgctatacatggcaataaatatttgttgctttggtctgtacaaagtctgtgaggaaggtaagacagatgttacctaaatggacaaacaataaatacagagaacaatcttgttctgagtcccccagacaatagtgaaagaacctgaaaaaggtcttttgattcatagtccaaatcgacaccatattgccacctttcaagttgttgcttacatacagtaaataccaagaaccagacaatattccaggagtcctgcaatgagactgcatgccacagctttctaaaagagaatgtgaaggtccccagcaactcatatatagaaagctatttatttcctatagaaaactcaaaaacaaagaaaaagaaagaaaaataaagagagatagaaagagaaagggaaagaaagagagagaaaaaacaaacacacaaaaggtggtctttccccaaaaggcaggcagttgaagggaggacatgtagttgctggagtggaaacagtaacattcagttaacaatggaatatttaaaaaaaatagttttcttttcaaattgtaacttgtggtaaaacatagaaaaatgtactaaacgagcttgtataaaacagtaaaattttcaaataagcccagggaaaaagcacaatgctggaaagaatgcggtacaacgggagaggagaaaagatttcatacaaaactacctattacaatacagaaaaaagtataaaatgt

SEQ ID NO: 246491 - DNA, 1000 bp, Homo Sapiens
tccatttcctagtttaattatggagaataaagtattgcactttattattcaacacaaaatgatgtagccaacagtaacatacaggtacacaatttaatatttattatatgcattttatatacattatttttcaacagctgtatgtttgctatgtggtacaatcttaaaaatttgctgattcatagtttgtaaaacaaaaaccttacaaaactcatcaaaactcgcaaactgatcagaaaagtttctcggaagactagaaaaaatactttattgtcttaatcatgcattacacaaacaaaatctttagttacaccataaaattaagcacatctaaaaaaataaaacagggataactagtcaaaacacagcagatttctgtatcctgattcaactatttttgtatcctatttgtaatgcaaataaaactttactccaaatatttttaaacaagttagttttgtttggaatcatggtaaaccaagatatatatcttagggggaaccaccttggtttgtaatttaaactataaaatactccatttttagtctattttagactattcaaagagttccaaaatagatatacaggttcctttagcacattaataaaaggatataaagaccaacaaaaagtgaaataaataataggccattagcaagatggataatccttgataaataaacttgtaaatacagtaagatgtacaaaatatcacatagtgataggatgccaagattagtttttttctttaagagttcatttggagtactaaaccccactgtttcattttaatacacttaatagtccttggtttatgaagacatttatgtgatgatgaaagttatttagcatctttatggaaggacttagctgagctgtattaggcaaaagaaggaaagaaagtggttacagggcaacgggtcagtgagatctctgtgttttagggttgtataatgcagaaaaacttcaatacaatcttgagcactgttgtgacaggcta

SEQ ID NO: 246492 - DNA, 1000 bp, Homo Sapiens
gcagttgcaagatttaatagagtgaaatagcatgaaaacagagctcccatacaaagggaggggacccaaagggggttgccgttgccggctcgaagacttgggtttatatcccgatcattgtccctcctgctgtgctctcaggcaatagatgattggctatttctttacctcctgtctttgcctaattagcattttagtgagctctctgattggtcaggtgtgagctaagttgcaagccccgtgtttaaaggtggatgtggtcaccttcccagctaggcttagggattcttagtcagcctaggaaatccagctagtcctgtctctcagtcccccatctcaacaggaaaacctaagtgctgttggggaggttggccgacgaccgctctaactgcttcctgctgaattggggcgtagtagaggttgtgcagctgagatttcctcaggaggggtgcctttgatgtcattaacatcagatcgtgggctagcaggccggtccaggggtctgcggtagatcttagtcttggactgcatcttgggctccatttgtagttttacagcttcgattctggaagagacaaagttaacaaggaggttaaagatacagggtccaaagaggagtagcaatattatagctgctagaggtcctaagaaggggagaatccagggcatccattggctgaggaggccccagggtccagtgtttcgaagctcctctgctctacgttgtattcgatctcgaatttctttaactttctcagtgacgattccggattgattaacataataacagcattcttcccctaaaaataaacaggttccccctctttcagcggttagcaagtctaaagctcttcgattttgaaggactactgctgctagggagttaagttgatcttgcaaggtgaccagggagtcggcgacccgttccatgtccccatttagttcttgagatagtttgtagtagaactgagtagaggttgtgataccgccaatgccagta

SEQ ID NO: 246493 - DNA, 1000 bp, Homo Sapiens
caaaaaaagaaatcttttaataaaaattactcataaaaatcctaataaattttaaagagcaagatattccttattacatttataaaagaacatttggtccttttacaaaaagatcccttttaatttaaatacatttcttatttacagattaaacataaaatatcatctacagttgcaaagcatattgcacattacagagaagcatttgtgtatttccgtaagttttcccagagtttccaactctatacttttttttgtaaaaagatttacctttcttatgcaaaataaataaaaatgcagcttgtgttttgctatttaaaactaaaacaaaataacctttaaaaatattattcctctgccttgcagaaagaaggaagagggtatagaatcagggagttccacaggtacttgatatttttaccagattcacgtccagattcaagcgggagcataaccctgagccctgtgaaacctgggacacagggcccagcccgtcccacctcctcgatttcccaaggggtccctgccctgcagggaagaggcactagaataggagctggatgctgggaatggacaggaaagctcaggattttcttctaaagttcctgctcagccaccctgtggctaaggtaatcactcagccctaccttttcaccagcactacatttgaaaaaagatttttgtttttgtcaacagacaaaaaaaatttatcaaagagaaaggcccctggtgccctccagaaagcagaaaggaatgtctcatgttgagtctacacaatccaaagaggaattacaggtggtaatcattcagtaaactgaactacgaaatcattaagagggatattttcctttggtggggagaaggggaaaggggaggaggaaacaaggccctcagattgcacaactgcactgaccaaaccaggtacttctacagacgctcctctaatagtcacgtgcacagacaccatcctggtgcatttttctttaaatacatagaaaat

SEQ ID NO: 246494 - DNA, 1000 bp, Homo Sapiens
ttttttttttaaagttagtttatttcagtttctaccttctgacaactcaaggtgcaatatatacacatgtttttcttcacagcaaacacctttgattttagcactgttttgagatcttcacccttgaaactttctcaaccttaaaacagagtttgtagaacatcaccgagcgggacacaagattgcaaaaatgcaacagagaagatactggtgtcactgcacgccacttgggggctaccaacaaggtaatgtctggatgtgagcaccgcgagtctaggaaagagaaagcagagggcgtgtgcatgggagacgccactgatagttccaacgggggccaccaggttcaagaaggcggcaggtcaaccgtgttctgacacatttacatgttttaaggggatccatgtgtgttgtctgaatttctagcttttcctagtgttccaacgtttgccttctctttctccacgtgtccacccagaagaccctaagcaacagccccaggctcaccgggatggcagggactcctccccaacagccaaagccaagccaagctgtctcttgcagggagatctggagtccaccccttagggctgcacctcccagagtgcatgcggtcgtcccccacctctatttcatgagcaaatcatctaggattaaggagggagcgggcgcagccccccagttctagtcaatgcacaggggatttactgacaggcatcccctttttaaagtgcaaagtcccttatagcgctgctcaagggagttcaggctgcagtgcactcaggctctgactgttttgtcaggtcccagagtctgcagataaagtggggagctgggttctccccaaatcgtactgtcctgcaggaggggtgtagaagggaagttggagtaaacaaacccagcccatcgtctctccccttggatatggtgaatttttccctttccaacagtaactaagaaaccccacccccacccccagcccctgtgggagcgctgtcccact

SEQ ID NO: 246495 - DNA, 1000 bp, Homo Sapiens
taaacacaaacaagataaatttaattgaaaatgttcattacagaaattaacaatgcttaccattctttaaacaccatgtacattattaatatatactgtatatttccaattaactccattcttaggctcaatttaagaaacacaattgtaacattttatacaaaaaatacttcactaagaaagtagacaaactgcacaaaacagtacaagtataatgtgcatagcaagatagcttgaagcattctatgtatggctttctttaaaaataaaactattaggggaatgggcccatttgggacctactgttacagttgacatatgtaaactgtttcacatcttttttaggcacttgctaacaatagtgttcaatccctgaagaacgaatttacctcaaaaacaaaatctacatctgaaataaaaaccaagaaaataacatgggtaaagtcttatatattccttttaaattaaacaaccagttttattagtgcatgcactgaactaaactgaaagaaaataaacttatgccaaaaatttctgtgcaaaatttacataaaaggtacaaaaatatgtacagacttaatttgttatatacagaaaagaagccctgaagttttcatccattaatgaaaatgtcattaacacttgtaacaatgtaacaaaaaatcatatagcacgtaatttgttaacacaagaactccattatccaaagaaccagcaaaatttgatccaaacttacaaggtgaaaaatctaaatctatgattctgttgtcatcatgaaaacatccattttaaaactctgttgggcatgtcccttaggaatctatcctaaggttttatgcactgcctctgggtccactattgatgcttccttttgcaaatgccaacaatctgtatatatgttttgggttgtcagtcacactgagaagcagctaacagaaatgctttgtcctaatttggacatgttcaaataataaagtgaatacagacaaaaatatgatct

SEQ ID NO: 246496 - DNA, 1000 bp, Homo Sapiens
aatatgacaaattttttatttcaaaaatctcaagttgtaaccagcatagcaccactgacatggatgccttgatagaactccttgatagaactttatgatctgttcaccagaaaagattctacatgatcacgccagactataattaaggctaaccaatcaaaattcaggtacccaaaaccagttataatccaggtagaaactacagatcataggaaccctgggactggttttccagggaaccctggaattattttttaagtgctacagcatgtacaaggacactggcccacaagcttgcttctcacacgtagaaactgacagactaagaggtagatgagagattccaggttccatctagcagtggagaggcagggctccagcatgtatcagagataagccccaaaagcaaagtccacttatgcttcagcagaggtaagcgggcaggctcctggcaccacctcctccaaatggaagggaaggagggctgcaccgctctgcctgtgtcactggctcctctccctgggtccaggcagggcctctcattttctccaggctaacccactgtgtcccaaggttaatctcacaagacactggtccctacatcatgtaaagggtggatggggagcctcctaacaccatgtcaacatgactgctaacaaggagccacacacacaactgaatttcacaggacctcatatcctccaatgggctctttcccacatctactcgaaaggaatcgtgggtttccctttgggcttttcttcctgggaatcagtccatgggagatgccaagcgcccctggaacatgaaattatccacacatgtgtaactgcacactctagattaacaggagagaaaacacgctcatttttgtttccagctacacatacttagctttctaaacacaaaaactgaataatttatctgatttatgaatgatggtttggtatgtctaagaaagctatataaaacataaaatgaactcatgttcatgcatgaa

SEQ ID NO: 246497 - DNA, 1000 bp, Homo Sapiens
gaattccatctcagtttttaattttatatgaagaaacacatctaaaaactatccagtgagagaaatataatttgctctacagaaaaattagtactagaagatattctatagtacaaatcctcttatgaccatgttaagcaactgtccaaaatatttttatactagaattatatcacattaaattgaacagagagaagtaaaacattattagaatcactttatcccttcaagaactggcaagcatgtggggttagggagatgggttgagaaggaggatgataactatgtatgcattacaagatgaatatgcatattatgaagaaaactccccaggtgactgatatacctactatctaacatttgctggggaattttgtttgaactaagtgatgtgctgattatagctaagaaataattttgtcacacagatcaatcagctgaaatataattttacctgtctaatgaatagagaaaactaaggtaccctataccaagtcagtatttcttgcatatttaaggtagtgaaggaaaaaccgtaaagttttatgaaaagttagatttagatatgaactattaaaaaactgttcaatagtgtctataaaatagataaattagtttaaaattcgattgtagaaaaacatcctagctcctacccaccactctattactcaggtgcttccataacagccaagagtattacaacaagagaatataaaaacatttaaaatacaatttcatatatttttatttacactttaacaacttgctgggaatttaaacaacttgctgggaacatcctttgtgaggcactgtagcctttttttatttgaaactacttaaactccaagacaggctcactaactctttttcaagtgcaacaacaaatgtgttagctgaaaatagctaatttaatgattatttgtgacacagacacgattatgtgagccaagagagcctccccacctctgtctcccctgtggaggaggaggtctttgtgtgc

SEQ ID NO: 246498 - DNA, 1000 bp, Homo Sapiens
ctgtacatgtatgtttattgcagcaatatttacaatagcaaattcatggaaccaacctaagtatctaccaacaattgactggataaagaaaacgtgagatatatatagagagagatatataaatggagtattatgcaactataaaaaagaatgaaatcatgtcatttgcagcaacatggatagagctggaggccattatcctatgtgaactaaatcagacataaaaaataaaatattgcatatattctcacttaaaagtaggagctaaacaatgggtacacagagacataaagatggagataacagacactggggactccaataggggaaagagtgtgagcggcagtaagcgttgaaaaattacctgttgggtacagtgtttaatatttggatgatgggtacactagaagcccaattcccaccattattcaatacacccatgttacaacaagcacatgtaccccctggatctaaaataaaaattttaaaaacctcacattatcaataaaaatgtggcggagtatgttcaattttcttttctttctatttctagcatacaagtgagcccttctctgctataaaggaaactgtccataaatcacttaaaatgagactggttaatgatttttagtaaaatacaccattatatgttttttttcttattggttaaaggcaatttattttgaaatgttgctttggttgtttgctttctggaaacatattggaacacttgtttttcataagctgtcctgacagtggcacaatcccatccatcttcaggccttttaataaggtcattatgaaatctgaatttctattaatactctggtgcattcatttcatctgcaaaagcaactggcacaaccactccttgccggtgcagctctcggagaacatctaatattgagtctagttctgtgcggaacttctccagctcacgattctttaactgtgccagtcttttccatttttcaacttctttgttttgctcagtttctac

SEQ ID NO: 246499 - DNA, 1000 bp, Homo Sapiens; identical to SEQ ID NO: 159264

SEQ ID NO: 246500 - DNA, 1000 bp, Homo Sapiens; identical to SEQ ID NO: 159267

SEQ ID NO: 246501 - DNA, 1000 bp, Homo Sapiens
aacaacaatcagccttggatctcagaagtcaaacaaaactcttttagcaaaaggcttactgctgactgcatatagcaaaggcagagaaagacgctgcccacaacataatgaaagatcatctacattttgcccagcatcaatcttagtcatgcatatctagcaccgagagccactgcggggtcacactggggcagttacagaacacatctttctcggagtgcagatgctccttcttggttggacaccgtgggccaattcaatttagaagtgcacaggtgagctctgagaaggtgtggccaggagctgccagggcagaaactggggcgcactcgtccacaggcggcaaacgacgcagctggaggacttcttgcttcagccggagctctggcatgaacccccggggaactgtgctcactgagcgagggagccccagaggctcacacagagcgggctgggtcttaagacgaggggacgatcaccgatgtgagttccggacactttgtccactccacattggccatcagagggggaatcaatgcaacccagtgcgaatgaccacagaatcgcattccttttcgtagcaaggaccaaaaaaagatgacattaacaaaaatgatgaaaaacattgtgcaatgaattcttgcagctaagaaaacagtgctatttgccaacctaaagcccctcagtatcatcagcacacgctggcataaacacattcactgttgtcccacagcaaagaaaaaaatagtgcacattgagctttgaattcttttgccatccttgagatggcaataatttcacttgctggtctctggttctagaagaaacttttagacagggctcctgcggtctgcgactgctggcaacagcagagtgtatgtgagtacggggggcacaccatgcaagtgacaagttctgcatcttaaactttaaaatctcctttgttcattagtgaatttatatttcatatatatatatttgttgtgatactatccacgca

SEQ ID NO: 246502 - DNA, 1000 bp, Homo Sapiens
ttccactttattttatttattattgttattgttatttttacaaacaatagatttgctgcaacatgctctggctcatattattgaattaaaaaatttaacacatttcaaaaatatcaaaaatacactataatgagtcttaagactacaatacgacaatgattgcacaaaaccgtaagatatgagcccactgtctggatgacatccactggcaacagtgagagaaaaccctatagcatctgggagaagtgcatgaaatttagaatacaaggaacttatgtgtgactgactgatcaccaaatgaggcaaacagagcaggattgactgtagctgctttttctcaatctaggaagtgcttaccccaactatggggcaaaagtcactaactggaaagattaacttgccttcatgattgggagtcggaaagcctccacccagaaggaagtaaaaagtgacactagacagtcctatagtgatgctgaagacatcactgaatggcttggagactaattatttaataattggtacatttatcgataacagccagctgctcccttatggaggtctcttcattaataattattggatagatagagaaggtgagcctgtggcttccaagtaccggcttttgctgaaggtctacatgggaagaagagcatcatttgatattcagtagatctgccacacccaactggctccatctcctggaaaacagcactcactacaagcaactgtaatagcacccagcaatgaccacgctgctcctgctggctcttccgtacaccagtaaatgaactcaccaatgtattgcacacatacacttcacagtagtacaataaagccctgtatcaggagtggtaattcaatgacttgactctatagtgcactgcagctttatgtcataccaacattcaaatattcaaatatccttccaatccatttggacaaaaatacaccatggctgccaagacacatgtatttttctttcttccatggactccta

SEQ ID NO: 246503 - DNA, 1000 bp, Homo Sapiens
gtaaaattaattttatttcaaaatgactgagggggtttatataaatagctttcttgatgattcttttggtaaagtcagtacttctttaatagctaagatatcagttgtgaattgaccttgtgggttcattaggaggattaccggctgggcttgctacaggaggcccccctgtagtgaggcatttcctcccagtggctttccaactgtgtcccatgaacctctgctggggtgaagtatgggagaaagggcaggccagtctggccttcctcctcttcctccttctcctcccacccctgactccccacccaaccaactctattggttttcctgccaaaaggcatttacctccctgcattggtgactttgcctcctggggctggactcctgaaaccctgacctaggcttcaggcctgcttcgattcagttgtgtctggcatgctgtcagtgagacctaagcctgccgtctccaggaaatgcactctgaggacagcaaagggcagctatgcttttttagacacattccaagatggaagggacagtgggggagaagcaggtgctgcagaagttgactctgtcactcctgattattttaaaaggccagtttgggtcaaactggtctttgacttaggaatcctgctgcccagaggggctcgtgttctggtctggtagttggtgggacttttcctcctttaggctcagagatcctttttctgtcaggggctgatacaatggaaatttttccaaaaaaaagtttatgaaagttggagaattttagtggtaaaaatgggagattgggagtaaacataacatatcaagatattgaggcaggaaaaaaaaaggggtgagatgggtcatccatgcatcccagctactgtgaaactgcattctaggcttttgaggtgagcttcctcaacttatatctacatagcatatcttttaaaataaaaaacagacgtacctgtctaggcgcacccctaggagttacaggggacaggcgttt

SEQ ID NO: 246504 - DNA, 1000 bp, Homo Sapiens
taagagaagatggcctttattgcagcacgaactgagggggactgcatgtccacagctctccaggagctgccaaaggcgacgggcccgccctgcccctgcaacaggccctccaggggctagagcatggctcccctcaggaagggtaacgcgtgcttgtaaacaagggcccagacaacacagagaggagaggcagcatcatcaggtgcagctttgctacaagaaagatagttcttaatttcaaagaggagacaccgctacacctagccctgccctcccatgcactggaaggctctggaagtagctctcgcctgcctgggcagttaggtccacccactgcccgtgagctgggcccaggcacactgcagccacacaaaaacgctggcagctgactcctaatttcagaaacacaattagaaaagaactggaattttacatttttctcccatacattaaaaaataagaaaaagccaacattttgactgtagaccctggtaggtggcatctgactttaacctgaagttctcattggaatccttttctgtctggcgctccaccgcccacaatcagccccagccccaggcgccccttgccgaaggatcctggcccatctcacacaagggcgggaccccgtggagtgcccggcgagcagggcaaccactgggaagacagatactgatttccctgttggggtctgtgaccctcagcaaacgaaaaggaaacggtaacaagacggtggcctcctgccaggacctcagcaggaggtttgctggtgaaggttctgggtgagctggaatgggtgataaggcgggcttgctgggtggtggcctcaggctgttcctgggcccctgtcgcatagagccctgtgggtgcagtgtggggccccacagccgtcccggggtcgtcctgatgcataagagcagagaccccggaagagaaacccgcctgccccgtgtgatacagggctcccaaacgcttcccggtggaaccctgctcccgagga

SEQ ID NO: 246505 - DNA, 1000 bp, Homo Sapiens
gatagtcaaaagatatcatccaaatttattagatcactagatattaaaacaaacaagacaaaaaggaagacaaattcattaaaaacaggacatttctcccagctatttgggaggctgtggtgggaagatcaattgagccggtaggtagagacttcagtgagccgtgatcctactgcactctagtgagggcaacagagtgagaccctgtctcaaaaacaaaaacaaatgacatttctcttaaaaaatttttgtttcgtttttttgagacagagtctcatcccgtcatccaggctggagtgcagtggcctgatcttggctcactgcaacctccgcctcccgggttcaagccattctcctgcctcagccacctgagtagctgggattacaggcccgcaccaccacactcggctaatttttagtagagacagggcttcaccatgttggccaggctggtctcaaactcctgacctcaactgatccacccacctcggcctcccaaagtactgggattacaggcgtgagccactgtacccagcccaacatttcttttgctcatgaatctgcagactgggcagactgtttctcagctcagcttatgttggctcccctcagtgtcaactaggattgcttgaaggctggggctggaaatgtttaaatcttatccacatgtctgtgcctgggctgggaagactcatgcagctggggttggagcaggtgggcctcctgggtatccctctctctacgtgaaacactgtacgcagcctctccagtatggtggcttcagggtagccaattaagatatggttttacaatctattaaactggtaaatgtgatgcccaaggctggcaaggatagatctattgttggcaagggtaagctgactaaaccacttgggagggcaatttggcaatacacaccaaaatgttaaattccgtttgctctaataattctactgctaggaatttacctttcagatataaacaaaagtgtaccgaaata

SEQ ID NO: 246506 - DNA, 1000 bp, Homo Sapiens
tttattgcattaaaaaactttatttcttttaaaaggtccaatataagccaaattaaccccaaaatttacagctacacttagagatctcctgaactaaatggcattgtttgagatgagtgtcttgttaaaggaggtcatttgctattaccaccatttcacccaaagtagttctagagcagaagctggtattataatacacatcagatatttcagatgtcatcttttatgtataagttaaataaagcaaacaggcttttctactctgtgtgaggataagaaacactacagaacagggcctgaatgctttagacatacaaggtgtaaccataaaggaaatttctacggtgctgtgttcattcattcaagtaattaatgtacttattccaacaatactggcgtagttcaaataccatttgagacagtactttggggtttcccttcattgggtgcagaccaaaggaagtggttaagctggggggcagactctcacagatggattacaaaagtaatgaaatagttttcttagtggggtggcattcgcaagaactaccttaatgtttttggtaacagcatcatttacatataagtgatgcaggatagaagttctggtgtatgtgataaattaaaaacagcttgtcactttatagctacaccttggatttcattagatgtggtaaatctaatagtgtgtcaaatgagtccttctggaaatcacttcagcagagaagtcaaacagcctgtaaaagagaagacatggcagaatgtgcgagattcatccttccaacattctcagggttctcttggaggacagacccaggcccaaagacagaagttaccgggagggaggcttcaactccatctaaggaagacctttctaacagttagagctgctcaacaactgaatggactgcttggtgaggtagagtcacttggaagtgttcaaggtggaaagatcacccttgtagaagggactcctgcatttgttaagaggttagagact

SEQ ID NO: 246507 - DNA, 1000 bp, Homo Sapiens
gcaggtgagaaatggtctggttttattgagaagctgttggtcatttgatggaaagacacatacggtacaaaattacaggtggtttagttcattacatgatacaaatcattagagtctttacaagtcattagagtctttggattttttaaactcccatttactgtgtaccaaatcaatataatcacagaatcaaagtcacttctttatatgtgaactcttcgcatttacacgaatccacacatagagaagctgttccaagaccccccaacaccattagtgtctgcagcccaccaggaaggcaccacggactttgtggagagaaagatgctttgggggttcaatgggtcagtatcttgggcaggaagcacagggtgactcccgtcttgtgtgcgtgcgcacagccaccaacacacactctcaggacttcccgtttcacatacagggaacttttaaggcaagaggagaaaatgctaggaagtaacgggggatcagaactcctccacctctcaggctccagcagtcacattcccagctccgttctcttgttgaaccttggtaggcccagaaacatcttccccctcctcacctctgccctcccgctccctctggtcaggcctgggtacccaggaacccagtcacacacctgccccctgtcccctctgctgctggacgcagtgcccggggcagaagtgagccttctcaccctggagcctcagtccttcataagggcccgagggaagtggcggggtggggccagggatgttctgggcacacaatggggaggcagggcccccagaagcatcccccacccccatctctgacagcgccgcgtgtgcagttactgcccttcccggccttgggtgccatctgcgggccgacccacactaaggtgccactcctggggccttccaggagcgcatcgggagtcctaaggcgggtgggcgggcaggcgttcttgggaggtgagtctgctggtcagggaggcaagaaaagaagatag

SEQ ID NO: 246508 - DNA, 1000 bp, Homo Sapiens
tttgcatcttactctcttaagtcaggtttctggagatggctgtcccaacactggaatccagcctgtctacagcaagggagaaagaggaagctgatgttgggctgagaggggcaggcgttacagggtaggtctcacaaatgccgacgtgacaggcagggcttctgagggggcttcagggaccagcagggaggcgagactcaggcactgacccgcagagagcatggccttggacgcacagtggtgacagcagcctccaagtgtcccccgtgccctcaggcatgagggacagaagcttctggggcccctgcctctttcctgcccatcccctggtgaaggaaaatcgcctctgataggaaaagctggggccagactccctctccctgcattagtgtcgccgtcctgcctgtgaggtccccgggcccagggcacctcccgggacacccgagtggtgatgcacgaccctcagtcctggggcttaggacctctgggtgcccccgcaggtccgtcctggagtcacttcacagtcactgcaaatgggcaccacagcccactttccaacgccccaactttccacacccaagcagctccttgtccctgccaatcaatgcccggtgatgacaactgttcttttataaacaccacacatcttctaatgctttcatgttaaaagcgggagtggatcccacattcacctaaaggctcaggtagggactttttttgcagaaaaccaatttcttgtaacaagtactggaacctcattgtagccttgagtcctcactcctccttttgttctaagtctgggtctgagaagtgcaggcctcacacagctgtcagttccaagtgaccagggctgtaacaggtcctggctgaccctgggaatgtcaggggattctgggaagtaagaaggaggggcatttgcccatagccccggggcagacaatgtgtcccgagggccaggccaggctgtctactccatctccctggggcgagtgcacctcgg

SEQ ID NO: 246509 - DNA, 1000 bp, Homo Sapiens; identical to SEQ ID NO: 159347

SEQ ID NO: 246510 - DNA, 1000 bp, Homo Sapiens; identical to SEQ ID NO: 159388

SEQ ID NO: 246511 - DNA, 1000 bp, Homo Sapiens; identical to SEQ ID NO: 246415

SEQ ID NO: 246512 - DNA, 1000 bp, Homo Sapiens
gaacaacctatgacaattatttgaatgaaaaagatcaggtaccaaggcattgctagacacttgtctttctggtgggtctggggtttcagtttttggtggtttgtcagttactctatttgctgtggggtatttaaaccattttattctgcctatgctctgctgacatgttttaagtataaaaatagcctggttgacatctgggtcaacatatccttggctgctctgcatcacttattaaaaaggttttatcaatactgagtatgtttcacaacgattgggattcaaacccaggttcttggaacagcatgccaagggtgaactttacagcacaggttaaggattactttatttaaatgtgtaccaagaaaaaaaaaaggcagcaagtaagttaatgaaaagatatatggaagtacaatgggcaaaggaaaaataggaatagacaatgctaaaaatcagtgtatgtgcaatagaagaggcacacagaacatgaatgcgggtctgaggtcgcctatcactagaattccaccttctgatcacacaattccatcgagaaactgtacggttaagggaaagattcaggtcacctgaagatgacgttggtaccccaaagcttagcagagcttgaaaatcaaaagaaataaaaaccaattaaatggaacgggttacagcaatgccagttgagcaatttgcagcttttctccccttggaatgtttcctaattgagggtgtttccctttcgattttcctggccagcaaatgaaatcgggagtcgagggcgcaccttggcagcgtgaggtcaggagagtgccaccagcctgctcctcctgggggccttccgctcgcctgcggaggatccagccgtactgaagcgccgcgtggtgggagctgcggtgaagctcagacaagcttcttctgaaggtgtctccctgctttgctttcccaagagctcctgatggctcagccccgtcgtctggccggattctgcctgcccggcttctgg

SEQ ID NO: 246513 - DNA, 1000 bp, Homo Sapiens
attgttcaaagggaggttttaaatcataaatcagacacattaattataactttaacaaatgttattaaaagcagcaattaaaaaccatgaatctttttgaaggtgcagagggttataaggtcagttggcagtaatgcagctattatctggtatgaatgaaatgctggggtggggagtcagggtgacctcattaggccttgtgctatcttcccaggtggtgcagacaccccctccctccttttccctctccaggcccacagcctccccagagcccaggtagggaaggtccagatgtactataacaggattgctcatcccaggctatctcagaagtctggaaagcaggcctagaaggttgctgggctctctgaagccaggcaggaagctacaaattggatcccagttcccacagcacccctgggctaggggttggcttctcagctccccttccacctggccctagttggcccctgtggcagcagctgtggggctgaaaagggggaagaactgggtccaacgccagctcgtctatgcctgggctgtgccagggaagcagaggaaagtgggtgggctgtgcacaggaggtgaggtcccccttaaaaggcactgtgggagctgaggtctaagatgggggggcatctaaactatctcagggaccccctgaacgctcacaggtagagaggggtcaggcctagcaatggaaaaacagctcctgcaggcctgctgccccgccagtgcctcttgctgtactaccaccttcgccttcctgctggcggcctgcaaaaccagccaagctggaggccacagcagcagttggcaaggctggtccccatctggtgcccaccctccacgtcaaggcacttttgtccattttccaatcaagtgagtcagtttctaatatctctggaagcagcaaaacatcaggggtcctcttccccctcccaattttggtttccctccagatgaggcagaatttgaatgttggttccaaaaattctct

SEQ ID NO: 246514 - DNA, 1000 bp, Homo Sapiens
ttacatataaaagcaggagttggtaatgttttattcttaaagacttcacctttggaacttaaaataagcaatatattcattaaagaaatagtttaattttgcaatacagatagtctttaaattttttgtctataaaatatttaaagaaatattctaaggatcttaaagtaactttgggaggcacggggaaggacaaagggactgaatttttatgtcgtggcctctgatcagtgcttttagtccaatccagtcaagtaagtaaaggttcatagaaaaaattgttttataaaatcatagtgatgaaaaaaactttccagcctagcgtcatcccatccaagaaaaatactgagaaaacagcttgtaaaaaagaaggtaataaaatcaaattatactcataaaactctacacttaataacaggaatacataatatatataatataaaaataattaccatttattccatacctatcatttccaaggcactgtacactgtactagatgctttacaatcagatggagtctcactctgtcacgcccaggctggagtgcaatggcaccatcttggctcactgcaagctctgcttccccagttcaagccattctcctgcctcagcctcccaagtaactaggaccacagccatgtgtcaccacacctaattttttttttttttttagtagagatggggtttcaccatgttggccaggctggtctcaaactcctaacctcaagtgatccgtccgccttggcctcccaaagtgctgggattacaggcgcgagccactgtgcccagcctacaatcatgatttctaattccaaaaatcagactttctaattctcaggtagatggccaaagctgattttcaagttttgtgtctttttaaacagaagaaaatgaaccttattaaagctgaatgactcattcaaggccatatagctggtaggtggcagaagtggggtttgaacccgtttttcttctataccacacaccaattactgta

SEQ ID NO: 246515 - DNA, 1000 bp, Homo Sapiens
tttaggtctgaaggttgaggaagagttcccctggccacatcacctatcagaagagaggtggttaaggcaatttatcatgactctcaaaattcttccagcctctgcccatttccacgttgcaattccaaagccacttcaatcagtaggcgtgtgttacagcagcactctaatttgggcaccacaatctatattcgtttcccgtggctgctgtaacaaattatcacacatgtgttttcacacatgtgaaaacaacacaaatttatgatcttactgttctggaggtcagcaatctgaaatcagtttcacagggcttaaaatcaaggtattggcaggactgcattcttcttgaggccccagaggagaagaggctgtctgcattcctcggctcatggctcttcctccagcaattgcatcactctgacctctgcttccattgttacatacattttcttccgtcactctgacactcctgcctcctttacagaggcccttgtgattatactcagtttacctgaaaaatccaggatactccttccatctcaagatccttaatcacatctgcaaagtccattttgctatgtgaaggtaatatagtcacatgttaaggtttaggtgattaagacactgccattttggggggtcactgttcagcctaccagagcaggggtagagttgctttgacagtcccaaatccagttcagggggcttgtccagggcagaaggtcatgaggaggagatcaggtcactgtcctagccaggactctggctgggggctggctgaagccaagagctccaggaaacctggcgcctgctcctactgccgccaaggacagcctgttctcctggtgtggctgttgcgcagggatcaggtgcacttgagtcttcgaagtggccattgctcaacttgaatggctgcctgggtcgggcagaaggccaggtcctcatggcttcccatccctaatgaccggaatacatgggctgccaggtcagatgtgggcca

SEQ ID NO: 246516 - DNA, 1000 bp, Homo Sapiens
ttgaagccaattttttttattgttggtgtaatttgtttaacacaaaatggcacatagcatgatatcatgtcacccattgatccttgattagtcctgaagttatcaaagtatgatttttctttatttctgttgactctaatctttgacttaacgatattttcccagacttactgagttataattgacacataaaagttatatatatttaaggtatacgatatgatgatttgatataggtaaacattgtgtaatcattatcacaatcaaattaattaatacaaccataactagaagtattttttgtaagaaaaatgataacactggacagatttttcatgtagccattttcttttggaaacataaaataccacaaaaccatacatagctcatttgaaaaagattcttaagctttcaacagaaggaataggggagtttaaagctatattttccttttagcaagatccacaagaaaggatagagtgtcatgcttaaaggggaacagattttgtattttttggcaagatattaaatcctctgttgctatatttggctctctgcaaatagtctcttgtacaagtgcaaagcaaagatcaatgctgatgttcttcattcagtcacagccaaacttggtatggaaagtaaaacagttgtgcttgagtgttgtttcgaacaaagtcttgcagctcatttattgatcagcagcattccagagtatggataccttctttacacattaaatctatcaaaacatgtttgcttttccataacagttttccactgcttaactgatagcagatggagtgattcaatctggacaaaagtgttaaagctttaccacgtcaatgtggtcatatttagctatttagtcaaatgtgtataagcaggtcaaataagatgcttggagacttaggacatcgcaagatgggtctaagttcccaaaaaaggaagcaaaacaattaaatcctacttggttgtccccagagaaaacacacttcagcta

SEQ ID NO: 246517 - DNA, 1000 bp, Homo Sapiens
caatttttcttaaacttcaactttatttggaccaggaaatttttccttacataaggttgacatgttttaaacaccttaggacaaactatttaaaaagcaacattttttatttcagaagggtcttgcttaagtggttttctgaattcttctcgttattatgaatatgtgctttataaataaatatattgtcggttactccattgtaatcaaatcagctgactaattgctatctgtactgagttatctgagatcagaagacttgatgcaggtcatttaaaattcacattagcacagtgtctatgagaaattgataatacagattaatgtgatatttacctctagtttgttttcctaatggcttccatgagaaggtcctcacaataaattatataacagtacagtacatttgtttggaaatcgtaaaaataattctacaaattagctccatatattatgttgctacagtatggtttaaatgatataaaataattagtatgtcaaacatcttcttataaacatattgcttttggtcatacactgaactgaaatgtacagcataaattcctttttttcctctcctgaatggcacaaaacaatggcttgatggtagggaaatgctacttcatgagaaagcatggtgcccatcaactccaacagtacctgtatttgcactcaaaaataaaataattcttgtgttgtcttgattgtatacaatttttgataactccagaagatgacacagtgttactttattagatgtatatagtcctttaggcaagagatacatttaaaaaattatttgaaaatcaagtttcttcctacataaatcctatcacacatgggctgggtgagggcttggtaattaatggaatttttttgtaaaatgaacaatcatgtcaagagtagtttttatgcaaatgcagttttccctactctgctggcactacctggggcacatcaatacccctacaacgcaccttcgtcactgaatttctgtctc

SEQ ID NO: 246518 - DNA, 1000 bp, Homo Sapiens
ttttcattttcattatgtagtttttattttagacgaacattattataaaaaaaaagttcacctggaataaaatccatttaaaaaaaacatagcatcagtatcagtacacagttaatgaattggcttaaacaagattaaccacatgacaggtccacttatctgcaggagcttttcacattaagccattggagcaaaaataaaatatgtttaaacatgtacagtaggatagttatatggaaaaactagagagtttccattaggggcatgattttcatcaaacagtttatggtattttgcatgaaaggaactgcagtgtcagctgcaaacaaaataaaagccatctgtaaggccataaaattgaactataataactaaattcacattttaaaaaaaggtaaagtgaaataagttctattagtttcttggcacaagaaatgcaattgcatatggcacacgcatttcaagaaatgaagtaaaatctgaaaatatccctagaataattgtttgctaatttttatttctgtacatttcagtcatttagatttttttcagagtgaacatgacagccattaattttattagtctaaaaaaatgacttattctactctaaaattgtgctagaatttgaaattattttagcatatcctgtccgtctaggtccctctatatcaagggatttcatttttagacattcctttccacccacccctgtgccccccttggatgtaacaaggaaaaaggaatgtctcttctgtttaaaaaaaaaaaattctgagaaacctgattgcagaaatgagtgcttaaaatttataataattaaccaacataatgaaatgtggtttttaaagattgagaactaaatttgtaaaggaatctaagtcatgaacttgaaaagaatgtctgcttaaatgtgtcacttactgatcacaggaaaaactttataagccttaatatagactctgagcattcagaacctgtaaaatggagttataatctctta

SEQ ID NO: 246519 - DNA, 1000 bp, Homo Sapiens
ttaaacttttactatcgaaaggatttactttggtggagttgagggtgggagagaaatgaatctttatgttctcctgttagagaatagcttttttccttccagctttcacactggcacatgcttattacaattctaccttgggaacatgacagaatttttttcttatgcattcatgcaacataaacagataattctaggaagactgtgattaagtcacttgcattctgacctattattttcatctctccctgactctgggtgagccaaaggctattaagatgatgttctcctgctcactcactaggcagacctctactcgagaagtgatctgacaccgcagtagctgatgctcgtccagtgactaaagcagtcaggctgaaaacagattttatctcaacaacagtcctagtttcttctgtcctcaaacactgttatttattttcaagataaaatttagtaacaacattacgaagtagcttttattcccttgggtgaataagatgtgcacatttaataataaatttgcttactaaaggtccttttaggggaaaacaaccttaaaaatacagttctagtccttgggcagtgaacaaagaaaaaatgtgcttgagaaacacagtccaggttaaaggaaaactctcagatcggttaatgcagttgaatttttgcttgagaatgtgagcaacgtatcagcaaatacattcattcttgtgctactcttcattatttagcatagagctaccttaggtgtttctacacatgctctaaaccaagagtaagtttaacatgtcagcagtgaggagtagacattttctactatagcacactgggagatgtttactggtactctaggtagaaatgactccattgtccactaagtttgggaaataaataatatggcaacattgctactggagatacataatgtacagaagcctaactataaagagatttgattaacgagacttaagtcttagtccagaatttcccaaatttatgt

SEQ ID NO: 246520 - DNA, 1000 bp, Homo Sapiens
ctttttctccctgcatggtcctggccttccccaagctgggcctcagtttcccacaagggaagttgggctaggtctttttccaggctcttctgattcccgcccctccgagtgttcttgtttcccacttggtccaaatattattgggcctcaggtgcccacccccatctgcttgcttggaagtggagggcctgccccagatgatcctctcacagccccggctccctggagagaggaggggaaggaaagagctgtggggtggccctacagatgaccctgctgcaccaaggcagccaaggctcaaagaggtgcagggttttgtctgaggtcccacagcaaagacatgtggccaggaccaggacaagacctgcctggcctgctgatcccaagtccagtctctctctgccctggctctctgccatcctggtgacatacagatatgggggacattgtcacctaagaaggccaagccccctctcatcactgtcattcagcccaggtttggacaagggctctacctggctgttctgacttgacaagagagactatgcaaggaattaaggccccaggtaaagagatgatggcacctggcacccccatgtcaaaatcactcccaggtcacacagcagctcctcactgctctcctgcccctccctcaggaggccttcctctgtcccccagatcttccctgctggcttcctctgaccaccctagcccacagtgagttctccaagctccctctccaagttcccgtggcccttggccgtggccctgaccatcgcggccccttagatcaacaggtgggcatgcattgtgcgaaattaggcatctgccccagccccagcacctccatgcccagctgcctgctaagctccacgaggacggggagggtctgccccgagaggatgctcagaagttctggctgtaggctgtttgtgatctgggtgtgggggaaagtcctctgtgttaattattgtctacatcaccggaacaggcttgccca

SEQ ID NO: 246521 - DNA, 1000 bp, Homo Sapiens; identical to SEQ ID NO: 159599

SEQ ID NO: 246522 - DNA, 1000 bp, Homo Sapiens
aatttataaagtaaacacgtttaattgactcacagtcccacaggctggggaggcctcatgaaacttacaatcatggtggaaggggaagcaaacacatccttcttcacatggcagcaggaagaagtgccaagcaaagggggaaaattcccttacaaaaccatcagatcttgggccaggagcagtggctcacgcctgtaatcccagcactttgggaggcccaggcgggcggatcacctgaggtcgggagtttgaggccagcctaaccaacatggagaaaccccgtctctactaaaaatacaaaattagctgggcgtggtggtgcatgcctgtaatcccagctactcgagatgctgaggcaggagaatcgcttgaacccaggaggcagaggttgcggtgagccgagatcgtgtgccattgcactccagtctgggcaacaagagcaaaactccatctcaaaaaacaaaaaacaaaacaaaaaaaaacacccatcagatctcatgagaactcaccatcacaagaacagcatgagggtaaccaccaccatgattaaattactgcccactgggtccctcccacaacacgtagggattatgggaactattaacacaattcaatttggtggggacacagccaaactgtatcagtattacaatacaatatgcaaaccagatgctttaaatcataaaacaaattcagattttcgttcccctggaatataaatagcattatagggcttaatctatacagtaataagagtttaagtgaaatttttccaaagcactaaaaagaaaacatactctttatatttgccttttgtaacattgttttatctggttttccatatcaaaagtctgtaaactttgcattaacactataatctacaatagtagctttataagcatttgaaatagaatgaaatagtaattcgagtctgatattactgggttgttccacacatagttaaataagatcgatccttccaaaaatctaagggtaggct

SEQ ID NO: 246523 - DNA, 1000 bp, Homo Sapiens
aacaagacttttatttgtacaaagcattacaatcttctcagcattcttcactcacaaacttttcactgtatttaacaagttaacagtgtcaaactacacgtcactacctgtcaaaccccaagcactcaacttagaaacaaaaagcgcttggagcactgaatggaaacagaaaaaggctaagaaaggccaacagagatattttagaagcagttaaagaggatggtttagggagagttagattcctgagcaccatcagatttcccttaaggttttttgtgaaggggcttcacaaaataatttttagaagacatgagacaaaattagccaggcttggtggcacgcatctgtagtcccagatactcaggaggctcaggcgggaggatcacctgagcccaggatttcaaggatgcaatgagctatgatcatgccactgcactccagcctgggccacagagtgagagactccatctcttaaaaacaaaacgtgagattagaactaaggaatcaagagatcagaggaactcacactttggagtattaagcaggttatcaaagcttacagactgacagaagtgagaaaaggaggcagatgagaaagtgggatggggagcagaggagaggcaggagagagaaaggaagcaggaggcacagagggagaaagctgtgcctagagaaaatcaagtttggcactcgtcatgaattgaagaatgaaaagccatagtcacaagtctgggagatggactacaagaagaggaagcctggggttttacaccttccgggaggtgatgacaaatcctaaagctgtacagtagcagagagtaaggtacatctgacactatgccatctgtttttgtaaaagacactggcaccatgtttgactaataccattccacactgctgatttaagaatatctgtgatcagattactaccacaccagcaggccgatcatctacaggcaatatagaaaggttttgggccaagtgggtctatgaaaaacaa

SEQ ID NO: 246524 - DNA, 1000 bp, Homo Sapiens
ttaatttttatcttttaattcaattttttcgtgaacttttgaagtccccttgtatttgtttttggtggaactttgagtctgatttctcagctccccatggatggctgcatcttaacagagaaatgaacgccatttaccctgatgctctctacttggcctaagtttcagatgttgaacacacacgtgtgggaatttatgaatctgtgcacctgtgccagctggtgggtgaagtctaagtttcttcaacacaattagttatcttctgcctcctggaatctggtaggaaaggttgaggaaaagcagccatccacagcgcctccaccactggaatgggggcagccctaacgtgtgccccactgccccccatgctgaggagtccttcactccagggatgtcttcaccccaatcattcagactcccccagtgttcctgcgtcacctgaaaggtcggaagcatctcagcacatactctccatgagtggtacttaggcctccctccccatcaatactgaagccctcagaggcagaggggagtcaaggaaaagagtggccatcagcaataaatgagttacaaggtttgatttcaaagagaaaaacttgtcaccaaaatcactactcaggagatctggacttcctctgaatgtgagttaaagaacccttgagggttaagagccaactgcacctgatccccactctcccatcccaagaccctgggaagtcaaaccaagaggtaatcaacagaaaacaagtttaatgcaacaggtgacaacggtctggagcgagtccatgctccggaaggctcagtctgtggcagtcccgtggctcaagacaggctgaggccggctgcaatggaggccagcagcaggaggatggccagccacagcccaccacagctctcacccatgctcccagcatattctttgaacactgatgagttgataggtggcccctctaaattgcagtagcgaattttacaacacttgaggtaaaagaagggcatg

SEQ ID NO: 246525 - DNA, 1000 bp, Homo Sapiens; identical to SEQ ID NO: 159687

SEQ ID NO: 246526 - DNA, 1000 bp, Homo Sapiens; identical to SEQ ID NO: 159721

SEQ ID NO: 246527 - DNA, 1000 bp, Homo Sapiens
acattcttataagtggtttattgagagctgatttgtcaatcaaagaacacaccataatgatgggaatattgatgatttcaacataaaaaaatttaaataaggtcaatctttacatagtaattaggagccacttacaagatgtatcaagcaaacagagcaagatacagaacagtgtgtggttggtttgctaccatttgttttaaaagaggggaaagaatatatatgtgctacagacatgtttatatgctatgtgtactcctctgtacatgtgcttataccacatgtatgtgcatatctaactctgcacaaccccgggaaaggcaagtcgacgctgatgtcattgctggctgaggagagaggtggtggctgtgggacagaatgggagggacgtatccctacataatacttcataccttttagctttgaaccatgtgcaattattacctattgaaaaataagttaaaaactaaaaatcaaatacacaaaaaacctgcagcaataaaccattaaaaaacatacattcagtttatcacagtccacagtatactgggagctgtccatttagtactgatggcttatactgtcatatgatttaaaaaaaaaatctcctgagttcctctcaacctcaatttctaatctcaaatacacatttcagaaagacatgattaaagaatagccagagctgcacatattcttttttttttttgagatggagttttgctcttgttgcccaggctggagtgcgatggcgcgatcttggctcactgtaacctctgcctcccgggttcaagcgattttcctgcctcagcctctcgagtaactgggattacaggcatgcaccactacgcccgactaattttgtatttttagtagagacggggtttctccatgttggtcaggctggtcttgaactcccaacctcaggtgatacgccagcctcagcctcccaaagtgctgggattacaggcgtaagccactgtgccagccatgcacgtattct

SEQ ID NO: 246528 - DNA, 1000 bp, Homo Sapiens
ttgctttgtcatttgctatttaatgttcaaacattgaaagtaattgatttcttccgagacacctctttccttggagactttcaccctcccggtctgggctagactgaatgcccacaagacctactgtgtggctgatgcgtgggatctccctttgcttccttcccgtgttggagcccattttctagatccttcacttctttgttcttggtttgcttcgtcatttggtggaatacattcccagcagctgcctgagtggggaagcaggggaaatatccctacacaggcagtttttcgaggtatgactgaaaaatgcctttatttagccttacacttgattgactgtttggctaaatataggattttgtgtttaaaataattttccatcagcttttggaagacactacttcactgtattgtggtattcagttgttgctactgaaaatctcaataccatctgattcctatttctttgcatggaacctaatttttctcctccctgcaacattttaaaattgtctctttttccccagtgttctgaaaaagaaactttttatatagaaattcctttagttttggaaatatttcttatattactccttagatactgtcttctcttcacttttctctggtatatatttctaaagccactatttgttagatgttagaccctggatgaatactctagttttatttgtctccactcatctctttattatattatttactttctagatttcctcaactgtacctttcaatgcttccattatatctttcatttctgctatcttatttctaaaagctcctgtttttactttaatagcatcctgcttatgtctcactgattccataaaaagttcttttatataaggatattttgattctactgaagttttcttctgctcccttcattgtctgcttcctccaggactttgttctttttgctctgatctctgtctcaatttggaagctttcctcaaatgtccagttatccttggatggg

SEQ ID NO: 246529 - DNA, 1000 bp, Homo Sapiens; identical to SEQ ID NO: 159734

SEQ ID NO: 246530 - DNA, 1000 bp, Homo Sapiens
gcacagaaaacatatgacaatatattttagattctctaagacaaggtctcataagtttagatgacaagtgacaacatcaatggactaagtatatcacctcccataacttaaaaggctaatactcataaacatgaaagttctggagtatgaaatttaaaacacaaattttggatataaattatctgagtacaaagctgtaggtaattcttatctttcacttcccctcataactccaaacataacgccattgtaggtgggttgctgctagactacatccaagattgttcagctgaggacttgcccactctcccagttacttggaattttcaaccttcccatactctagcccacatggcatttgcactcagcttctcctactgatccagccacacatcatcttcttcatgaatgtgggcagtctaaagacttcctgtctggcaaagtattatttcaaacaactaagaggaaaatctttggaagcagaagtggaaacacaggaaaagtggcagcaaaaccctcagcctcaggatagtagcttattcaaaagtatatttaaatgtcacagggtaaaatagaccagctgagtccgtatcttagaaaggaagcctactgctttctcctggtaggcaacaaagagaaccccacctaggactttaacccactcttttcccaatgtattccaatactattagccagctgaactaaaagagaatgggtgctggtaggcaactccattgatctccctttctttagcaataagtactggccagctgagggctaaagataatgaggattgaaagaaaagcagacataccaaaggtactgtgtcaagtaatacatgagatgtgttcataaacgaatgagttattccagagccatacaaacaaatcaatctctttactggacaggcatacctctcatatgtatattattcgaatatactaacacatgaaagatcacatcaccttgtttacggatacatttaatatcccttactctt

SEQ ID NO: 246531 - DNA, 1000 bp, Homo Sapiens; identical to SEQ ID NO: 159788

SEQ ID NO: 246532 - DNA, 1000 bp, Homo Sapiens
acgttttcacttcatttattcctttgaaacaagtcacttaatacagcatttagatatttaaagtcatacacctcataaataaaatcaatgcatcttaatgacaatggcaaaatcacataagagttgtagaaaatgaagttagacatcttccaggtagcagcagtgtattacttcaaaaaatgctggcaaataggcaaaacatttttaaaacaagaaaacactgtccatctgcattaagaaaaaatattttcttatgctgttttgcccatccctactttttcaagtcatattctaaagctctaatttgacggtctttacttgtggttttctttttgcgttaggaacctctgtctctactgcattaatacagaaactataggaatattgttgttctctaacccttttcacaaactattcatattcattctgtatttaggctgaattcaaatttttttcaaggaaaaatactattctgctaagtacatatttcctgtaaacagctggagtcctgaatggcaccaatgtgactggaaaactgacaaaaattaggtcccctggtcctttaagtaacttacgggctaattacatagcctataccagtttataaagtagactcatgtaatcatattagaaattctgagcctaagatgatcctttctgtttacctacaacttaatcaaattatatcttcaccattcctaaactcctatatgttggttagtacttttaaaaacatatgtataaaagggcatcatggcaaaatgcttataattcatggtttcatactttaatgataagctttttcacctatggccatgctacattctatgacaagaaatggggaagaagggttgagttgacacaaaggcattgctttaaaaatgtttggaaaagggtaattcatgactaggaatgcatctatttgacaatctcttctttatcagtggtactttgtcttcttggcccttttctcccttcactctaccatgagggggttacc

SEQ ID NO: 246533 - DNA, 1000 bp, Homo Sapiens
cacaaggcaaaattttattttttcaagttacaaaaataggagcatgtcaaaaatacagtctagtccttatacgagtagttccagccatttaaaagttatacagagtttggaaaaagcagtttatatacaagtcttaaaacacaacaatcatgaacaatgcacaccgttcaatgtagttattgctagttatatgcagcttttagttaccattgttcttctctgtaagggaaaggacagcatttggacattctgattgttgctgctgaagctgtggttttggaaaatcaatccaaaataagaataagctcactatgagtagaataaaacgtgtaagtttcaatcagtactacaagaaagcatggtttaaatttgagttccatacaattctacataactctattttgttactataacagaaatacagtgtatagttttgggcaagagtaaatgaattactggttttataattaagtgaaaagaaacagtttttggttgcaatgtagaaacaaagctggcatatctagcttacaaacattaaaaaatggaaaagatatttaatgtttaagcaaaagctgaacctaggttatttacctttagaaattaagagataaagttaagcattttgttcttttgaggattatcatgaagatttgctattctctattttctttttaaaaagaagagttatccacatagcgggaacatattttgaaacagatctatttgctcaatgtcatatggaagaacaaatcacaaaattaaataattctacctttaaataattaaagataatgcagttgacagtacaaagcactgggaaaaaatcacttatttgggggatgtgtgatacataagaaactttgggcctaaagttcacatggaagactggaagacttaaaatttaagggtgtcaccaaaagataacaatggctttgactccaactctcatgttagaccctgttaaaaggttaggtttattgctgttattttaccccagtaa

SEQ ID NO: 246534 - DNA, 1000 bp, Homo Sapiens
tttgacaaaaatatttatttttccagtggagcctccctacctccagatgaactagttggaaatggaattgttatggtactgaatctacaaatggattgcactatgttccatgcaaagttgactttcctcccttccctttgccacatccttcagagtgcggcagtaaattcagaaagtatcatcagttgtgcagttgaatgcaaaggctgggaatgattgatctctcccattaaataaatgtttaaagaatgatatcaaaattttgagaaaagaactgcagttaattaaaacccaggaataatatgtctgcttaattaagattggagctccagtgaggatcttaaaataaactatactttggattgattcagataatcttttatttttgtttttgttttctttaaaagtggtatgtcaacatcacttcatttctacatttcagcgttctgtacatttcttaaaaggaaataagcaatgctcaatgtacaaagtaaaaacagaaaactagaaaaatctgaataaaatggagcaagttgccagaggtcatacagtacaaattagtaattagatgtcatctgaagtgcaataccactgctgtgatgatgagttaaggaatgaaataaaaatactctattttaaacaaacagtatatatatatttatatgtatattttttacagatagtagacccagtgatatctgcagtattgtaaaaacttatgtacaaataactttttttagacattacatatacatcagcaccgtagtaaaaacaaaaccaaaacaaaaccaccatattaaaatctacctattagttggtcccagtactgagcatttggaggaagcttttaaaagataatggagccccccacccctgtctgtctcacttccattagccacctccagtttctcatcattgcttatatatttatttcctgtacctttcaggaaaaggtaattatgttttgtgtcttctcatttgtttgtttgcttttttttgg

SEQ ID NO: 246535 - DNA, 1000 bp, Homo Sapiens
ccaaacgtttttattacaaatattacattaaactaaagctcacaactgttattatgcatcaggaattaacagtcatttctcatttgtgttattctcctatttgataacatatagtgactatctctttatgggttaaatatcagtttcttggccagaattcaagatctgcccctaactaatcctacttctcccagtacccttacagcactcctaccctactagtaactctgatatctcatagtcctcagatttatcaagcaaacgaaactgaatgagcactactataaggtaccacaaactacaaaaggagacagttttgcccttgttgctttcagttaaattattgtgctattttttgcttaatttctaggttttttttgcgtgtttatcatgtctccgtaggtaaagtgggcagaaatctttttctactttacatttcctgtaagtgctgtttgtttgaataaagttaatgtgtgaggttacggttactttttatttttaatcaacatgatagttttgggaatttattactaaaatttatcaaagcaggcaaggaatgaagttgtatccttcactgtcaaacattacttgagtccctttactacacaaaaaagccaaagaatacaagaatacagagacatacttcctgattccacagaactcataatctggaagcacagcccatgaaagcatttcagtacaaactggtaaataatagggacaggaaaacctaactaactcagctgtcagctgtggttgcaggcaggccggcagtggatggttccttcagtgatttctgaactgagtttgaagcatgggcaggaattagtaggtcagacacagaacaaaagaagagcagtcttcatcagacatttagcttgcctgaaaatcacaagcacaatctaaaaaggtagtgaaaggtccttgagaaacaccatttataatgttgttttggtttttgaaatttttagactcttagaatgaacctaaccttggcgta

SEQ ID NO: 246536 - DNA, 1000 bp, Homo Sapiens
tgaatggcctggatcccctcactctccatccttctagaactccaggctagggaactgggaccatgtgtggcaggacagagattcaggaagagaagaacaaggctgtgttcctggactaagttagggaagccaagagatctctccagtgggacaccctgcttgagactggggacagagaaagactgggtttagaaattgggctttggggtaagacaccagtaccagagaaaggcaacgggtcaagaacacagcacacaccccttctgcagcggaacttcctttattgacaaggaggatacaagggcaacacatggagcacctggcagagctgccgatgggtctgccagagacactgaggacctgggctcccacccacggaggtagccgcctccacgttacactcctcaggtctcccggaaggtggtttccacagagagctttaggctaccctccacacagcccactgcgtactctgccctccgacaataatctcatccaaaccaacttacctgcagggtccgagaactctgggagctccagtacctgtggtggcaatacggggggctcaggaagtttcccagacttaagcatgtctaattctgcctggagctcccgaaccttcttctttaggcgaatacagttagggcaaaaagaggtggtgggaagttcatgagggtcagatgcaagggaggcctcggcaggactgtcggccttgaatgatgaaggctcctcttcttcatcctccaattggcctggctccttggagaccccctgggggaccttccagtccccctccccctgggtctggcctatattctgcacaccatgggtcattgttgttgcacactgactgtaggcgtcatcctggtatttggggactttcctgatgaccagtgaggtgctcagggccaactggtgggcttccaccttcgcagattccagtgaggcctccagaacatccttgaaaatcaggtcaattttcttcttcttagcttggggg

SEQ ID NO: 246537 - DNA, 1000 bp, Homo Sapiens
atttttcttatgctgagttttataagacataagcaaattatcatttaaacatttatttaatataggttaaaatgtaatacataaagagaaaaaatgaacacaaatgtcaaacagaagaaaaccctttatattttattttggtcaacaaaaagtctgtgcataactcagcagcaggcctgaattaaattaaaccaaagctgcattgtgatggccatcaatgtacagactgcctgtctggcttagcacatcaaaagtctaatcaaggctcaaaccaccatccttagaaatccaatatatatatatatgaaaaaggctttctttctcagttaaattagataagtcttaaagttgggaaactactaaaaacaataaaaatttaaaactgtattttgctaaagggtatagagtaaataacaacaacaacaacaacaacaaaaatgacaaaccagaaacactaaaatgtgtttacatgtgaaagaatcatcacgttgatttacgtcaaagaacatcatatttgtttatcttaatgcttggcatagttggttttaaggttttagaaatatttttgaatttattattaaacaataggaacgtactgtacagaatatttcaaaactgctaccaagaaaacaagtacaaattctacctagcaatataggtttcttatcaacataccttttttcctcactggtttcaaactgacaaaggtgtagggagaaaataattgaatggtttctgaaggccacactagccctttagccaagagttctgcttctgaattacatagaacatcttggtccacagacaatggaatggatttttggagagagtgtcaatttagggctaaagaaatacagggtgagaatgaagccctcaacaaaagctccaaaagggcacagaaactggtaagtgacctaaatatggagagacaggtgaggagaaaatacatagtaaatgctggctcgttattgcattttattctctcccttctctcatccat

SEQ ID NO: 246538 - DNA, 1000 bp, Homo Sapiens
aactgctaatggagagctttaatcatcacatgtaaaagcaatacattcatatatcaaaattggctccaaattctttatcatcatcaccatcaacagtctagaaatgaaatgacacactaatataaaactttcctgtttataactaaaagatttatgaaacttttttttttaccctgaggctgatatcaccaaggtgaaaaagaaaagtcattatcagctggaatgtattcaatatagagttttaaaaaccatttatcattattctaggtttatgtctattcattctccccacccactctatgggatgataacaggaaaagatggcaaatggttgtgtccagtattattatatactggttatataattctcaaatgtactgattatatgattctcgatttaatctacttaccaaaacaaagaaataaaattttaacatccattaactctgtactatcatattttaaaatatgtatcaaaatcagttctctcttataaaagaggggttggcagtacattctcagaccaaacaacaacaacaagccccaaaaaaccggtatagtaccttcttacaatggctactgcagtgcattctacatatttcatagaaaccaactaggtaagttcagcgttcgcagagattgcctcacagatacttagctctgggttcctagtcaccttgagataagatctgcaaagtctaaaagaaaaacaactcccaaatgctgtaacagtttttccattcaagtgctgagagagctatgcatataaaacttgaaaaaagatagccatgttgaagggaggactattttaatgtggttttttggtatgtaaattacaaataaatcgaaaaaaagattttcaaaacctgaattcctaatgtctctaacattgttttttgtgaacgggtttagagccatggtatgctgcctctcacaaagcagcctagtgactttgtctccaattattttcatgataatctctagatgctttttaaagcgc

SEQ ID NO: 246539 - DNA, 1000 bp, Homo Sapiens
ctaaggtctagattgtgtttcagaattaaaaattttccaaattttaaaaagaaatacagtttagcattcagtaatgaaatatattaatatttttgtagcaaagtatatgaatgattacattaagcaaagtacataaatagctttacatttgttcagggcatagaatttacgcctaatttatgaaaaatatttcagttttcagaggtttggagattttggaattgtggatatgagattgtggccctgtaacattagcactcagtattttcctctattcatatgtacagataattcatttctgaaaattgaaaattgttctttttccttagtatttttggatcattctttgtccttagattctaacctttttatttacaagtgaacatatctctaaattattgtttatcaggagacgacgatttcagggaatgaatgccagctgctgtgaggataataaatgatatgacatcagtgattttccatataagaaaaggcaaagcaatattctggtaaaaggcatgctttgtgactttccttctaagttctggtactaattacagttggatttggcaaatgtttacaagagtgatgacaattttccagtatacattatttatgaaacagtttatttataaaaacagtcataagaaagcagaaagcaacttccattagctatgtgagattttgaaagttctcgaaatcagcttatgtaagagactatttccaataataacagaaggctacaaaaatgtcagaccaaaatagtaggcagaaggtagaaaactaaaccctgagaataatagtcattaagaagaccttgatgtagacattgcatatgagcatggagattcaggaaggaaattctggatgactggtggctgacaactttcaaatataataaatagagataggacttcaaaagaacttcaacaggaatatatgattttatagtagcacctggccttacttagaataaaatcgtttgttacaactaaagcca

SEQ ID NO: 246540 - DNA, 1000 bp, Homo Sapiens
acacaatgtacaattccttttaaatggatcaagaaatagcttatatacatgaacgagtccttgttataacatctcggcagcaaatatcataagctaatgaaggtcttgatggaaaggatgggagcctaggacgggggtgggggtagggggtgtggagagaagggttatgccttctggaggagtggggagaaaagggaatgattagggaaaaggaacaaaagtaaaatatcaagaagcatctttacaaagcagttctatagctaattccttttaaaggggaaaggaaaggtaaccaaagcaggaaaacatttatctctgtgtcttaaaaaaaaattgtctaccatacatatatccaaaaatgtgggaaaaatacttattccagggagagagggagttcagatgctgtggtcaaattataaaataaaatcgacaaataagaacctctgtcccctagttttactcaagccttaccgctattccacccatttcaggcttccagggagtaagacaccaaccttaaaatactgcttttagtgcctctggggatggaggaagccaggcagaactggtgggatcctcactctactaataatgctccaaacagagggtctttcctcctgtccttagggcatgaggtttagtgtctacacggcccagagcctggagatggatagtaacaagtagacttggagggacacaaggcaatcagtgatgaaaaaaaagagacggagaattgaggaagacagaaggatgaggaaggaggagggaagggaggaggtggaaggttaacactttaccatgattagggagacctcacctccatcactaatccctgggaagagtatgaaaatggggagaagaaagggtaagaaatcaaacctcagcggttgaacaaagggtcaccgagctatactagtcaagaagcagcttctatgtaactgaccctgaggggataaaaacagggaagattccaccatctcccctgtgacctcagcaccta

SEQ ID NO: 246541 - DNA, 1000 bp, Homo Sapiens
cctggaaaaaaatcaataaacatttatttgatacagtcattttaatacatacagtgatggcccgtccccacgccactcgggaccagggcgcggggcggggacgaggaccggggacagatggtcacaaggcgggcggggcccgaactcaccgttgaaacatctcgcaaataaacactttgtagatagaatatatatgtatatatatatggttacaagtgatagctggaacctctttcaaaatgcacttatgtactgagaactggcattaaaaaacccaaaccaagaaacccaaagcacgggacgcccggccgcgaggcaggggaaagcctggggccccagacccgggcctgggggagccgcctggggccccgccaaacgcggcacacggggacggcccctcccggggtcaggctcactggctccttcccttcagcgccaccaggcaggagggccaacggtcacacaggaggcaccctcacctgcctttgcaccagcaaataaagtgcatcccattttcgtgtgagcgtcggcccggtgagtcagcccttccgggccctttcctgttctcagggcagggggcgtgcgctgagccagaggtagatctgcagaaagggccccgactgggcctcgggcagggccggcgcccaccacactctgggggtcagctatgctggtccctctcactgagggctcctggaggcctatgtgggccagcgtagggagtgggcagaccctgctgagctccacccagggccccaccccttgggaggagggctctgcggaccagcatgtggcagagggagggcagaaaggagggggtcagacccaacagccacttctggcagtagcccccacgcctaccttaaagacaaagggggttaaagtgctaaacatcaaggtatccaggactcctcttcccacaccagggattatctgtgggctttgggagtgtcccggaaactcacccccagcaaaaaccagaccctcttctcttctcccc

SEQ ID NO: 246542 - DNA, 1000 bp, Homo Sapiens; identical to SEQ ID NO: 159936

SEQ ID NO: 246543 - DNA, 1000 bp, Homo Sapiens
cagcaaaatgtagcctttatttacttaaacatttatttgcttctaggaaataagcgctttcctaatttcaagcaattataaaagaactgctgttttcttccacactcacttgccagagggtcgaattggaagtcacatatatgtctatgaacggaagttaaaagggaaattcaacatgaagatgaaattctgaactttcctagataaattaacattgctgggtggaaatattcagatgctgcttaaatacttcggtaaacactgggtaagattcatggaacttagaaaaaagctgtatgaactgctttaccaaatatcactactgaggaaatgtataaaataccacatagtataaaattacatgttaatacaatgccagattttaaataaagacctttagttttcctcatggtgtagttttattgtttcttccacgatattcagatgtgcaaaaaatttcacaagaaaacaagtcagcaagctcttaagagggcagcaaattcttcacaagtcagagggctcttgaacccacaaaaagacaagaagtgagtgtaagattataaaatgttaatgatgaaattccagaacaatgtacttttctcaagctctgctgcaaatttaacacaaacatcagtgttaattacactttgtcatgtatgactgagcttgctttaagctcttacactgaaaggaagtctcatttcatgcacaaaatctgttgcatgcctggcttccttaataaaactacagttgaacatttccagtgtcaaaaaaaattcaacgaagctaaactacaggaaaatgcaggttagtagacttttaactaatgcttctgaggaataatataaagttatcaaactgatacttagaaacaaaagaaaagacattgtcatcttggtaatttcattagtttcaataccaaacattatacaaagcataaatttttctcttacagttgtctaatttaactcaattgtgaatcagtattgaggatcaaaag

SEQ ID NO: 246544 - DNA, 1000 bp, Homo Sapiens; identical to SEQ ID NO: 159967

SEQ ID NO: 246545 - DNA, 1000 bp, Homo Sapiens
cctcttccccaagatgattttattgaatgcacacaaagttcatccttgggtttgcaaaaagtcccacaagtgaagaggcagcagtgctcatgtgaacatggagcgctcaccccagcccctcagcacagccagggggccttggggtacacaccctccttccctggggccgccagcacctcctctgccctatcccggatggggcctgggggtctgcccagggtgcgaaactggaatctatgctgaaacacctaagtgcccaggaggtgcccccatggcccaggagtgacacggctcccccagcagccagagcccattcctgagccagacaggtcacggttgacccaggaagagccatgtgccaggatggccgccaagcctcactgagcatgtgcagcagtggcagcctctcagacatagagggggctccctgggtgacatctccagagacccccttgtcccccagacacccctgggtagactgtgtctgacccttcacaaataggaaatgagagctcgggtcgaaatgctcacaatttcctgcgtgtctcagatggttgttttcttaaatggtcgggccatactttaacttggtttatggaaatgaatccatttcaagattcatcaaatcaataaggtaaaaaggaaaaagaaagataataaacattcaatctaactttggtgacgttggcctcaggaatttctgtgctggcctggagctctgggcaggtggggagggactggcttctagccctcctcctgcttccccgaggcagagaccaagtttgtcctttctacctggccctggagaaggggctcagggccactgcctcgttccaacccaggaaggccagctgccttccacatcagtctgaggcattcagcttgacctttttgggttgaaatctgggttgcagcttctcagctttgcccacaaagctccagatgacaagaggctgagccccagctttgacagtgaggggagtacctggaggtatcagcg

SEQ ID NO: 246546 - DNA, 1000 bp, Homo Sapiens; identical to SEQ ID NO: 159986

SEQ ID NO: 246547 - DNA, 1000 bp, Homo Sapiens
ggtagggaagaggtctttctatattgcccaggctgctcttgaactcctgggctcaagcaatccacccgcgttggcctcccaaagtgctaggattataggtgggagccactgtgctcggcctctgacactaaataatgtcagttaagggaatgagaaaaagggcaggtcacgcacctggaacctgggctgtgccaaaaggtcaaatgtgcacgtatatacagtgactaggtgacaaatgcaatggagcatcccaggctgggatgaaggccaaggccacctacctatgaggaacaaccactgcctggctggaacgttccagaacccagtggtttccatagctgccctacgacttccgagatgactaaacccaccaaggactctatcacactgcttgtcttggccactcacccaccgtggatgtgcacagaccagtggctcccacgcagcacaggccagacaaaagctggaaggtgaaggcttcttaccttagaaagacaaagtggggcaaccgtggaaggccacattccagacactaaggggccaggagcaaacgcagccctgggccccggccctggggagatgtcaggcccgtcacatcccaggcaacatgtcaggaagatggaactcaggggtgctttcccgccccaggtgtcttccgccctgcagagcagctatggatctgcaaaggggactggaatgctgcagagccccgggctccatttggaaactctggcaggatgaagaagctggagaccacgtcctgggaaggctggggtacagcagggctccctgcagcagacgaggggtccctcaaattcatgtgcacccagacctcagaatgtgaccttatttggaaacacgggttttgatgatataattagttaagatgaggtcacagtgtattgggggaccctaaacccagtgagtggtggccctaccaaaaaagagactgggcatggcggcacacacctgtaaccccagctactcaggaggatgaggc

SEQ ID NO: 246548 - DNA, 1000 bp, Homo Sapiens
cccaaagatatttgtatttaaaatttaagacctatcctgagccaccaattccaacacacacctggtaaaagtgccttatcaagaaagaagtatcaaaaagttatcaagaaatgatgtttcaaggcataagtggaatgttaaaacacaaacctgcatgaaatgagtcaacatttattttacaatactgaaataactgtaatttacaaaagagtcatgattaatgttggagcatagtaaaattaaatacatccctatacttcaacacaatattttaatatttatatatagtaaaataacagtttggcacttagcagctttgttggttattgcatcccatattatgtggcaaatttattttataaaacattatctaatttctgcagttatagagtcaatgaactgaaattaaaaaaaaaaaacactatttttataaaatgaatttaccaagtcatgcaggtactgataatattgcaagaggaacacattcactcctaaataatgaactgtctccttggagaggcctggtgtagactggaaaaaaaactttaaatatcagaaattaaaaaaggagaattgctgacgatcgtggctttaactggatgtcagttactgttttaatgttccccaattacagctgctgaatgccaaggtactgttctgtacaggacatttcaccaaagcaaatttagtttttcagctatttccttcctctaaaactaatatctagttgtaaaaagaaaaatcttcctttctttgcagaggccacatagtttgctttcattaaaaagatctccacactgtcactacgaaaatgtgcagacaacagctgactggtacacaaaacaattctgaatttggttttgactgacatattaaacatgattgaattacatgactgtgcggcacatctggcctggtgcctctggcatataagataaaaaccttacaccttctcttatcaggtatcttctggctaaaatggagagttaatgtaccacac

SEQ ID NO: 246549 - DNA, 1000 bp, Homo Sapiens
aaatattaaaacaataaatctttattaaacagttttcacggcattttaaaataaatttaaaaaataaatatttgcattatagcagaaagtcacatgtattgcatcaactcacttttacaatttaatggcatgagacaactaagcatcagcaccataaaactgttaagatttgtttcttaaattcaaggaaatagctctaaagcactgcagcatcaataattttgaaagctataacccagtgattggtgctcatagtagccaatgtttctttttattactggcaactgtggagacagagttcttccagtactaaatattaataagttctctgatcgacaatcccccatctatcagtgtgtcaggattcacaaagaaaagaactgcaggttatgtagtatattccctatctgtgatttaggtttgcacaaagacacttattctagcaaaaaagaaaagatagtgtttccaccatgctaccttttttttctttttatagagtctcagagtaagatttaaatcataatttttaacctttaaaagtctgttcaagttcaattacaaccatagaaactgtactggtatcagaacataactattttattacaaaacttaacattatttacaaaatgaaaaaataatcaaatgactattgcaggccaaagttaaaggtttttcactcaatgattgaagaaaaattaagcaatatttccatgcactcacaccagatcatttctgaaatatgcaaactcttaaaattcatgttagtaaaactttaatgtattcataatacttgctatgtttattagaagatggtcaaaaaaaatccatggttctgtacaataatattaacagtttgttcattttcctttaatattttttggcttccatgaacactcgtagattgaacattctgcaagtaagaattataatagtacctctgtcaccttgctgaattcatcaccacaagaaaaacacaaatagtttaatgcttttgcactaa

SEQ ID NO: 246550 - DNA, 1000 bp, Homo Sapiens; identical to SEQ ID NO: 160877

SEQ ID NO: 246551 - DNA, 1000 bp, Homo Sapiens
aaatcaagtggtttattattttttttcttcaataggaatttaagttacttcattggtcactgattttgctacagaaaaccctccaaagtgatagaaaataagcaaaaaggatctgatcttgctaactgtccgatcaaacagtaagactcacggtgctgagcactcccacaaaacccagggctccaatagtgcagggcggggaaaagagggagtctgaggcctggtgggcatgaatgggagttgcagaagagtctttgggaggaaccaattatcaagacagtcaaattattcaaagttgaaatgagtgagaatttattcacaacatatgcagctctatggacgcaattatgcaaatgactgaaaagagggcacttaaaaatagcagtaaggcggcagctttggtctccagcatgctggatacaagtcagaacttagctaaacatgagtccatcttagccccttttatcccctttattcttcctcataacaccagaaattaaaagggggaggttcacactgttttcctaaaaacccaatgggaaaggaggtgacaaacgtccggttgtctcagccctaacccctgggtcatcagaactcctcctctgtgcttctttccagagaaaagatttgcattagcagaactttaaatacatagatgtaaatttccagagatttccaactggtgaagtgctgggtgattccttctcttgccctaatccagtatatatgttgctgaagataagctgagaaaccttgccgttccagtactgtctttcctacacatactgtgcaactactattttgattttcaagaccctcataaagacgggcaaaaatgcaggtgagagggaaggaacctccatggcttgaagcttggtgacatgatttgttctgcgggctatctgagcactcccagaccgcagtgaccactacccaccccgccccaagctgccacagctggtggtgtctcctgcgaggactgctcacacgggccatcaga

SEQ ID NO: 246552 - DNA, 1000 bp, Homo Sapiens
atatccaagaaagacaccttgacattttttgctttattaaacatcattcactgagaatttccaaagcactgtgtggtgcctagacctgtgtaccagcgctctgggggtcgggagaagtctaaggcacgggccctgccctggcgcacggctccttctccctgggaaggcagctccactggtgaaaggccactgaccaagtccagaccctgaggacgacgaaggcctcggggcagaagcctgagagaatcatgccccactggcagtgggaggcggtgcaggctgggagccctgcccaggccccaggctgagctgtggggaaagctatgacccagtttgctgagagctgcaatgacgaacattggctctgtgcccagaggcccaagaaggccatggactgggctggcctttcctgggaaagggggaaggaggaagaactggggcctagcagggccgtctataccctggagaggcagggcctgacttctccctttagagcttgcatcaagaggaggctcaggagagagagacttgcatcagaacactccagacagccgatctcccactcagtattcctctcctgggagacccacccagaccctgcaggcccctggcagccacgaggagcagaggccctggagtaatttggcttggggacgtccccaccccaggcccaggccagtcagtcacccaggctacagcttagggtaggggaaggggaggataccggtcactccttcttactatgcgaacagaggcagaggagggatagaggcccagccccagtttgggtctgtgctggggctggcagaacccgtgggcatgaagcttccctgccccatgtgacacctcgctacggccccacatgtcttgcttcatccttggggctgggcttctggttggcaaggcatccccacaccctccctccccttcatgtccacggggaataagacacattgggctctggctcctagggtgagagccgctcccgcagcccgcaggc

SEQ ID NO: 246553 - DNA, 1000 bp, Homo Sapiens
ttgtttgttctctagttttattatttgtcaattttcccaacacaggaactataactcattttgaggatttttttcagtgcatttcacagcaaaaatgaacaagggaatcattaaaattgttgtacacaaaccaactctttttcttataatttacaatttgttgaaaaaattattgttttgctgttttcatcctactaacctctttaacagaacacaatttatcagagcacaaagcttaaacttcttatgatgatgcaacagacacagccacctacaatggctgataaacaacaggtatgttacacacactgattggaagaccatatcagaaaaaacagagtaaggcaccactcttgggaaattaaggtagcttgcagtaacaagtgttgagcaccataataagtaggtgctcaataaatacatgaatgaatgatgaaagccataattagctctattcttttaattgccagcaattcttcaacctcaacaaaatacttatttaaaaaaagatttgtacctgaatacaacttcctgatctttttttcctgataccttttcatttcgttgtttctttagcatttaaatttcctcaaaaaaaaaaaaaataaataaaaccataccttacatgcgcgttcagttacacatataagttttgaattactgacaaatatgaatagaatcatttattttaatttttaacagaggtaaaataaagcatacttatccaaagggataacacataatactggatattaacctaaaggtgaaaagaaagaaggaaaaaagtaacagttttattttttaatatttgctattttctttaatgccttagttctggagaaaggctaaaatctcatcatattgacattaacacatttttaaaaagtgtctctcaagtgtaatatttaataaaactaggtactgaaaaatgttctgaaatttttcaagtcaatgttgttttcaagtatattaaaatgctcagaagaaaaaattctccatg

SEQ ID NO: 246554 - DNA, 1000 bp, Homo Sapiens
cacttgaatgctgttactatttattgacatcaaaacgaaacaagctgagactaaaagttgctatttaacaggaatagacactggtgcagtttccttcctggagagggtatgcactcagatcatgagacctaagatcaaacacactggattgtcaagagtcaaacaaggactacattttacctcttaatagaaaagatgctgatgacaaaacacgaagtttaaaaatattctttacgctaagctcatataagcaaacaaaaaactaaaactaatcctaaaactttaggacactggatacagaagtaacataactatttaaatttttgtatcaacgaaagtgtgttctatccttcactgtacctgtactacaaggacatgcttgttgcttctacactacccaatgtcaacacttatcatcaacaatacaatagaattagatcggaacaaggcttcaaagcgactctgctccacccaaattcagaaaattcaattcaggatgaacaacagcttttgattttagaaccagctcttacttttctctcgtgtcatatgtgatgaagtcctcacttgacaattccccctgcaaattgcaatgcatgtccttgccgtcacctttttctgacactttaaaattaatttgtagaaattgcaaaagcaatgaaattgtacttccaattctgaacctctgatcagattcctgctttgacacaagacttactcctctgcagtgtaccccaccagcacagcggctccctttctctctattctttgccctgaaggcacctctggattgcttaacgtgtgctctttggctgcctagacagtcaggacacctaaggccatctggacttatcactcctctcctccttcttttctatggctaataccactttcctgcttcctttctgctgctgaatctccagacttggtgctgtcatcagggggacagagtcgatttcggcttcgagctcctggttggtaaagctgcatcgctggacga

SEQ ID NO: 246555 - DNA, 1000 bp, Homo Sapiens; identical to SEQ ID NO: 160675

SEQ ID NO: 246556 - DNA, 1000 bp, Homo Sapiens
aggcaattcatgttaattctttaattaaaaagaccctcactaaacaataatagtttacaaatgcatgtaccttttgatcctgcaattccacttttgggaatttatcctagagatacactttatgcttgcacatttgtacaagattattcactgcagagctgattgtcattgcaaaagattggaaagaatccaaatgctcatcattgtggaactggcgaaataaattataacacatttatacaatgaaaaaaatgaacaaatggcatatgaattgatatgaaatgtctccaagatagattgttaagggaaaaaagcaaggtgcagaacatgtgtataacgtgctaacttttgtgtataaagagagaatgtgagactctacattcccatttgcttgtatatccataaagaaatgctggatgtacggatgagaatagtggttacctctaggccagggtagacaggaactgagcaggtggagaataaggattggagggagacttttcactctatatatcttttgggtgtggaaacatgtgagtgtattatttatttttgaataaataatacaataaaatataaaacatacacttattgtggccctctgcacaagcaatctggttgtgcagagtcttggtgtcccctgctagtcttagtacctgtatagagctcttcagactgggtgtcgtgttgcagaggctagcaccattcctgatgtcaccctgggtgagacgtggtcctcagaatccagatttccttttttgtctttttccttcttccacatgttctaagaaaacatagatttctggccaggcatggtggctcacgcctgtaatcccagtactttgggaggctgagacgggtggatcacgaggtcaggagttcgagaccagcctggccaacatggtgaaaccctgtctccagtaaaaatacaaaaaatagctgggtgtggtggtgcatgcctataatcccagctactcaggaggctgaggcaggagaattg

SEQ ID NO: 246557 - DNA, 1000 bp, Homo Sapiens
tatccatccactcaagtatttatttgtgttacaaacaatccaattatactcttagttatttgtacaattaagctattattgactatactcacccggttgtgctatcaaatactaggtcttatttatactttctaactacatagtttttgtacacattaagcatccccagttcccctcgcacaccccttttcccagccactagtaaccatccttctactctctatatccatgagttcaattgttttgacttttagatcccgcaaataattgagaacatgcaatgtttgtctgtttctggcttatgtcacttaatatagtgacctctagttccatccatgactccttaactgcccctgaatttttgacactattatttttaagtattttggaaaactcacacctgttctcatttttaaaccttaataataacaatttcctactaagctaataaaacttccccttatattatttgtaatgtgtgcataacatagtacacttttgttacagttacatatatgaatagttagcagaggagaaactcctccgttgttcctacaccaagggaaaaaatgtaaggactgtatagctcatgaataatattaacatttttctatcacaaaatattgataaaattggaattgtatcaattcatgttatggagcttaacattttagccgaaatattaagataatataaataaggcttttagcttcatatcaagacctatttgaacacttctagaaaagaacattaaaagttttttcctcatttatggtttgatttagtgtagtgcctcaactgttcttaatggtgtcttagtataatgcataattattagaatataattataaggcattacagaattttatgtggatacttgcaaagatatttcagtccaaaacttcaaattacacacccaaatatgtttgttgccttaatctatacttggacaaaggcaacattttaatttttgctaagtcttaactttagccagatgggt

SEQ ID NO: 246558 - DNA, 1000 bp, Homo Sapiens
tgcgtattcaaccaaatttatttttgaacattcagaacaccagattatcacagattaaaaagaaagcaccaaaaattactacacattaatacctgagcagagactgaaggcaaatattcatctattaaacctacaccataatgctcaaacacaggtaaaaacattcacaacacactctacagaatatagtaagtagtactttttgtgaattacaatcacataaatgtaataattttaattataccatataaaaatacacacaaaattacacataaatgtatttaatatactatacattgtacaaagtactggagatcatgcatgtttaaatggaaagatcagcaaggtgacaatcattttttattatatactacaggacaggttcctctgcacttgttaagtgttgttgttatgcactgtactttctggatggatgagaaaaaaataatcaatttgcaaacaaatgattactgagtctatctcagcataacacataggttgtcctctataaattttttaactatagtataaaaattgatgcaggttgagagccatttattttattacatacccttgctcaaactaccttcatgtcaataagatcatgttttaaggaaagacattttctttgtatgtgtttttagagaaatctatatttttgtctggcgagtaggtagtggaggtaaaatgggaaaacaatgtgttgagtttactttcaaaattgaaattgaaaaatatacaacaactgtgagtacacagaaatgtgggcatcttttatcagagaccatgattatcctgtgaataaaataatttggaccttaatataaattatatccattattttaaataagcacagtaaaaatgcaagtctacatttttttaaaaactgaagcccgttttctcttgaagccttaaaaatatataggaagaaaaaagagaaggaaaaatgagaggaaataatgttttaaaatatactacatgaatgagtttattaattatt

SEQ ID NO: 246559 - DNA, 1000 bp, Homo Sapiens; identical to SEQ ID NO: 160277

SEQ ID NO: 246560 - DNA, 1000 bp, Homo Sapiens
atgtgattccatttataataaatgttcagaataggcaaatccatagagatagaaggcagattagtggttgccaagggatggaggtgggggataagttgggcgaaaatgggaagagactgctaattggtgctttgtttcttatttgggtgataaaaattctctggaattaaacagtggacacaacattgtgaatatactgacaaccattgaattatatactttatttttattataattaaaatggtgaattttactttatattaattttatgtcagtgaatattaaatattttcatgaataacacaatagaaaaaaattaagcacaatatttcactagctatatttttgaagatataacaaaacacaatcatcgtcagagtctttttattaagataaatccagtaaaatttgtgtattcacatataatcaaaactgcccttctgaaataaacatttgtatttattttaaaaatgggaatacaatttcatttttcccaagctaataataaagttatatttgggaaagataagtttaactcttaacattacatgaaaatagttcaccttctttataaaagcaacctgcagaacaagaatgttggatgaaactctttttttgggatccctcactttatgaaattatcacatgtataaaagagtaaaattaaaattcaaagatttgacatataacttacacaacacgaaattcactcacaaagttgaaagcatatttttttctatgtattccactactataatcacaaaatttatagataaatgtttcatgttagaaactttatggctaataatcaatatgaagatgttctgaaattaaatcaatgctaaagaaaggctgtgtttataaaatttttgataaaaatatttatctctattaactttacaacatgaaggtacatgttaccaaattatgaaactacatagggcagttttaaacaatactctgtggctcctctttttttccatcatcttctttgatctca

SEQ ID NO: 246561 - DNA, 1000 bp, Homo Sapiens
agattatttacattttattctatatacttacaaaagtaatatcatagtttattgcaaatactcatatttactatgtcaaaaatcacatttttgcaactatatgcatactttggtgatattgcaggttcagttccagactaccaaaataaaacaaatgctgcaataaagcaagtcacacagattttttggtttcccagtgcatataagttatgtttacactcaagtcgatgcacataaagaagaaaatctggaggaaacggctaaattcctggaaacacacaatctcccaagattgaaccaggaagagacagaaacccctcctagaccaatatcaagcgctgaagttgaattagtaataaaaaacttaccaaccaacacaaaagccctagaccagatggattcatagctgaattctacaagatgcagaaagaataactggtaccaatcctgctgaaactatgccaaaaaatcaaggaggaagggctcctgcctaactcattctatgaagccagcatcagcctgatacaaacattctggcagagacacagtggaaaagaaaatttcaggccaatattcccaatgaacatatttgcaaaaattctcaacaaaatattagcaaactgtatccagcagcacataaataagttaatacaccactatcaagtcctgttctcatcacttcacagtagatgaaggtgagaccttgtatctcttattcattcttccctcaaatctttacacactgattgcttaagagaaggtagcagaaataatttatttgcacagtgtctggatgtagcagcagttcaatgaatattgataggtaaaagaagatattggagaagaaacatcatcaggacaaaaatgacaggaggtgcctcctgaggcacgttctggctgtggcaggtgataagcctcaagcattttcataaggttttatagcaagtcttaatgatgccccatccttgctgttgatcttcccttctgattcctccaagtg

SEQ ID NO: 246562 - DNA, 1000 bp, Homo Sapiens
ttttgtttatcaagttttaatgaaaggatacaactgatgctactttacaacatgataaacatttgcaatgtcccaaattactactattgttacgagaataagattgctcaggttgctaaaaggaatttttaaagtatttcctcttttggttgatgtagtacctgatcagagttctaaactaccgcctaccaaatttttctttgaaaaatctacctttatatgtgaaattaatatacacatatattttaggtaacagtaatttacaggtttctttattaaattaggatctttgcattaagcccaactcatcactgatcaacatatttcatgctgataagcatttagcaaaatttgagactgatattcaataatatgtattaaatcagataatctgagtgctaaaatagtttgcctcctggatttatagtaatttttaattgaaaaaaacctcatttattctgctcatttgcaagttataattttaactggcaagaattacacagcagaatttttttaatggtcattatagaaactagcttgcacttcacctatttcttgattttaccgaaatttatgaccacattaattggagaaaggaaaataaactctcttgggaatacgctgtactagcacgaagagattttccttcatttctgcaaaattaatattctctattcatctaatgcctatccactagatttttttgtatatgtcacagaagtacttttttcttaggtagtatatttaaacctttcagttataattattaccaccccctccacccccttccccccacttaatggttataaaaagttacatcccttaagaaatatttagggataaatatggatcaaatccttgagacaaaaacccaaactttataccaaatcctttcatccaaaatcttatattcaaatgaagtgagaattccattaaggaaacaatattttttttttcaactaatttttatagttacatcagcctgggctaattatacaga

SEQ ID NO: 246563 - DNA, 1000 bp, Homo Sapiens; identical to SEQ ID NO: 160399

SEQ ID NO: 246564 - DNA, 1000 bp, Homo Sapiens
tttcaaaggaaaaactccagtcttaagttcaattaaaaaaaccccttcaatattcttaagaatattgcttcggttacgtgttgctaagaatgataatcctgagttggatggacagcacatccatatacttttttccttttttaaacaatgatctaagagaccctctcagggcattttggaataatgctttcaaaaagagaactgaggtccaagaaacagtgacatggaggacaggaagaacaaattttatagaaaccttgtgttatccaaatgtacttcagtctgatttactcttctgataggtagtcagattttttattttcaaacgtgccaggtacatttcccacttttgaataacagcaaaaccggaagaggatgctttcacacataataaatgttctccatcctttctgaaatgcaccaaagcaaaaagcctctgaagtcaaaacatgagacataattccttgctcattgcaggagacatgcaggtgccccctcctttacccaataccaagagacagacggccgggcaggtgtaaggcgggtggcgctgcagctgacatggagaagagtctaaatctgaagacacttttccacacttaggacaagttcttcactttcatgctttattgaaagtagaatatgaatcaaagacaggcattggtaagcaggttatgtctctaaaattacttttcgttcagagcagaatgttgtcccatctacttgatacaatcctttatggaccaacgcatctggtatgaaactcgagcaaggaaatataacagaactttattcccctcccacgactataaatctcatatgtaaacatgatttactattactgctactaaacttgttccgtctttacttgccccctcccacccaccaccccccttaaatataaaattggaaacatttccttcaagtctgatgtccatcagtgcaatctgctttatttgacataaggcatttgggacagtcacgtttgaatggatttctg

SEQ ID NO: 246565 - DNA, 1000 bp, Homo Sapiens
tagaaattaaaacactttaatataaacatttccagaatatagactgaccttatatcagtactttttgagaccgttttaaaactatatatcatctaagtttattatagactgtttcattttccactttcagaactagaaaatgcaaaaatacactgcaaattagatttaacaaagaaaaaatcagtttaagttatttcatacatattccttggagaaagctgagacacataaacacagaaaaacaacaataaaataccaccaacactaacacaaaaccaaggaaagaactgattttgtaacgcttggtaattctgtcctttaaaataaattatctcccatgaataaataattcactatcacagcaatttgatgagcagaagtagagacaacttcatttagggaaattacattatatgtgagatatgtgagaaacatttaataattttttttcttttttaagaaaatgaaggaaagtaacttgaggaaaaggcatactgaatacttttacttcacttggcttttttagagattaaagtagccatccacctagaaaaattacaataacatgaattttataaaaccaaactttttttccttcaactttgaaggaacaaaactaaaaagttgaaaatcctagagtagactcatcccaaatcactgtctcttctgtcttttcttgagtaggtttctttttctcttaagttcttgtgttctcatgttagtgttgttcagaggctaggtttaggcttttttgttgttgtttcttctttcaattaaatttcaagtttttttaaatagctttcctgaagtgacactgactgtatctacctctccttttcttcatctgatcctcttgcttttgtctaaagtccattttcttagctgatttcctcaattaatccttgggcaaacaaaactaaaagttcaatacccaagaatagactcattccaaaacacagattcttgtcttttctgtaacaggtttccttttctcttatgt

SEQ ID NO: 246566 - DNA, 1000 bp, Homo Sapiens
ttttatatgcaatttaaaatctgacctttaacaaggaatccccctttccagtctttatttctttaatattatcaaataaaatggcagagagagaaattccctttcatcctcaatactacccattaagtatgctccttcctccaaacagcgtgcttcccttgaataacatacagcagttccaaaatagtttgttaccctctttagtaaaaacatctacaaaattaaatttcttaaatgttgatgaacaatgaagaatgttacacaggggaaaaaaaagaaaaaaaccttccaagaccagcccaatcacttctttttggatgcaaaaactaaggccgatggaggttaagagatatgtccaagatcatatttagttaatgaaagagctgggattgggaagaacccagttatagacaccttctctcatccaatgtgatccttctggcttctataaggaggtattggttttggttctcctttctcacacgctggctgacaaagcccagccagagctacctaatgaagacgctgctcactgctaagcacaccaagggcacagccttcaatacaatgagagctgatgctaagcaagcactcgtcaattccccctcatgccatgacacagacatgagcatcacagactcttcctgtcctctggctgccttctgaggcttgtggctttccatgatgaagaatggaaatcatgacacaacagtggcaacaggcttttagtatcatctagaaacctcccctccctcacatggaaagaaaacatgagccagtgttttcctccttgtcttctgaggtgctccagtagatgccccagacaggagagctgaaccttccctatagcaggatccgaaatgacaggaaatgcccacaaactgaatgcctgtggctgccactgtgacaggctgcacatcatcctacgaacagacaaatcagcttcagcacaattggagttcctgggggtattcacttctactctcgcgctgctcaaaat

SEQ ID NO: 246567 - DNA, 1000 bp, Homo Sapiens
ttattttcaaactgtaaattttataaccattatataaatgggcactgatatacaaaataatgtcagttgctaaaacaagacaattcacagctggcctacatcatataatggcagaaatctttaaacacaaaatctaatgattagaaccagaagttgaaggcccactgaaggagtccttaatattatgaggcctaggtttcaaaaagctaccaattctagaatggattttactctggaactgtttcttgactatttcttgttgcatctctttcagtgtgaagtggaatctctgaaactcaggtgtggcatcaacaaagtcaagaaggtagtccaaactctctcttacagcagataatttaaattcagcagtctgcttctcagcttctcctcctttttgaacaacttcctttgttattccacctttggtttttaggagacaacccttttcttcatctccatttaaccacaccctatcatcatccaacttagtttccaactccccacatttttcaagaatttctctataatccccatgttctaagccttgaaaatcatattcaggttcctttttgtaaagaagattttcccatgcatttgctatggttatttgttttacttcttcccaactttttgcccagttaaaaattgcactttttatattgtagattttaattttggaaactcctttatctcctttctcttgctcatcatcactttcttcaaatattacaagactctcttcaagttgcttccatctatacagccgtttgcagctcaagatcacaccttgattcattggttgaatcaaggttgaagtgttatgggggaagaacatacattttattcgaccatcctcactggttagggattcagaggaaggatgagccgggcaactgtccagaagtaacaatgccctgacgtcctcgtcatgaaatcttagaacattaagttgaaaatgtcggacctcaggaacaaagttttgaaaaaaccattctgaaaa

SEQ ID NO: 246568 - DNA, 1000 bp, Homo Sapiens
gcaaattaataacaattctttattagcaaagaaaacagaagaaaatctttacaacaaaaaagtagttttcccataaaaaggtagaatacacacacacacacacacacacacacacacacatgaactcatttttcattggtccattaattagagaacaattaaacaactacatgaaaattaaaattgcctactattagaaatacatttcaacttagtctagggatccaacaaatttttaaatgaatagacaaaaattatgttaactgatgagaaacaaaacacagcctattaagctcatgtactatggcttataaagtatctgtgaaattctcagctccatgattccctgcaaaaaactgaaaatctaaagtatagacaccttctttaacaatgaaccactgataaaaatatatttgaaagcggctgggaaaataaagtgttctaacacatttttcgtattttatgacgttctttcccaggacgggtccttctaagttttagaagggaactaggaaaattgcatacattctaatcttccttacatgtgttgggtttctctctaatttgagtttttaattttttcacgtgttctaatgaaactagaataactgaaagctttaacacacttcttacattgacagaggtgttttgttgttgttgttttttaccacatataagctctttcatgctttcgaagggaactggaacaactgaaggctttaccacatttcttacattcatagggtttttctccagtatgagtcctttcatggcttcgaagggcactggaagaagtaaacgacttaccacattccttacatccataaggtttcactccagtgtgagttctttcatgctcacataggttactagaatatttgaaggctttaccacattgtttacattcatagggcttttctccactgtgagtcctttcatggactctgaggactctggaacatctaaaggctttgccacattttatacattcatagggttt

SEQ ID NO: 246569 - DNA, 1000 bp, Homo Sapiens
taagatcaaattatattttattctattaaaaaatgtttttgaaaaaagatacttaaattttaaagataacttaattcctaatgatttaaaataatccaagcagagatgaaagagcaaatgcaaatgcataaaaagaccccagagcattgttagcaaaaagcaaatatagttagccaagcatatatatatcataaaagcaataagaaggcataaagcaagtttggggagagcttatttaaaacttgtaaaaatcatttgaatttttaaaagatttcaaacaaattttgttttattaaaaaaaaaattttttttgagacggggtcttgttctgtcacccaagcttgagtgcagcggtgtgaacatggctcactgcagccttgacctcttgggttcaagcaatcctcccacctcaacctcccaaagtgctgggattatagacatgagccaccatacgtggctactttctaatttttttaatgtggtagtgtggaatttagctttgaaagagaattaaagttaatagaatattaacagtgggcttatagttgatagataacaatctgaatcataagccctctatattcatagctggattttgtacgtgtctggtatttattgccaccagctaaaaacattcccaaagccttaagcataagagaaaggagacagtgttattgttgttaatatcctatttaactttagctcttataaaaaagtgcaaaacaattaataaagtagaaaatctagaaaattagtaaataaacatagtgttatatctaaatagtaccatcggccaggcgcggtggctcacgcctgtaatcccagcactttgggaggccgaggtgggtggatcacgaggtcaggagatcaagaccaccctggctaacacagtgaaaccctgtctctactaaaaatatttttaaaaaattagccaggtgtggtggcgggcccctgtagtcccagctactcgggaggctgaggcaggagaatggcctgaacc

SEQ ID NO: 246570 - DNA, 1000 bp, Homo Sapiens
tctgatgggagttttcttcctttttttttttttctgtattttccaagtttacgtttttctttagttcattcctctggtgtccgtttctctcttttgtgcgcgtgtgcacgtactctctctcgctcttgcttttttggttgtgtttcagtttttttttttgaaagaactttggatttgccgttggtgggcagtgcctgtccctggaggctggaccctcacgtggcagggctaggacaaggggcaggcccacggccgctgagaggatctctgtgtttaaagcctttgagaataagttactgcagttcccagggtgcaaggtagggattggcagaggggtttctggtggcggcatcccctagagtccaggccacaggggctcccctgtcaggcaaggagagggttaggagggagagggtaggaagagtgaaccagaagcacttctcccatgccagcctccagtttggttagagttttgtgggctccctgcccatgccaggctccaactttgggagccaactgagcatttggaaagagtttgtgagcggtgtggtgctctagacaaagggttaggaaggagaagagagagtggcgaagtttgttttccttcccccttctttgccttgggctttctttttcgtttcttctttttatcttctttttcaaaattttttggtgttttctcagtggaacatcatgggataacgtgtgtgtgtgcatgtatgtgtatgcatttatggggatggggagctgggaattcagtgaggaaaaggaagatagaaccaaggatatattttgtgtgtggtaggcagacatgtatgaataatcagggtgccaagatgggtgtatgtgtctgtgaagatgggcaagggctacatctgcaaggagctgaggaggaggatcaatgtgtgtgtctgtggggattgggaggaggcaggactctgctggaagtggggtgtgtggtgcccactgagggtgggaactgaacagttcctgtgaggtg

SEQ ID NO: 246571 - DNA, 1000 bp, Homo Sapiens; identical to SEQ ID NO: 160548

SEQ ID NO: 246572 - DNA, 1000 bp, Homo Sapiens
tccagttttcaagggttatttattaaaccccttggttctgaccccaagctaagtgggactcagcatcagaccctgcactcagagagccccctgacttggggaagacagagtcagagaaaggcagccccagtgtggccagggctcagctggaaggaaggacaaggggctgggagaacccagagttcaagagatctgggaaacagggaacggcattccagacggagggcacaccttgggcatgggtaaggaaagcccatcgtgtgttctaggaagcatggatggatgaaacggggtcccagccgctatggacagccccgagtttcacctgtaaaaggcaggattatttgtttttaattttaattttaatttttttgagacagtcttgctctgtcgcccaggctagagtgcagtggcacgatcttggctcaccgcaagctccgcctcccaagttcacgccattctcctgcctcagcctcccgagttgctgggactacaggtgcccaccaccacgcctggctaattttttatatttttagtagagacagggtttcaccatgttagccaagatggtctcgatctcctgacctcgtgatccgcccacctgggcctcccaaagtgctgggattacaggcgtgagcccccgcacccggccaaaggcaggattatttgttaagcgggttgcagtgttctaccagaccccccaccctcaacccaagcccctggtctcactgggacttggccactgccaggagcgtctggcccttcacggcttcaggcccagcacagcgcgtgtcattctgggaaaacatcttgtctttttgggcctgaagccaacgatagaggtcgctcaggttctggtcacagatccaggggttgccggagatgtcgaagccatcccgcatgtcccagtttggctgccctagggatgcccagagcccctcgggcacgctggccagtgagttattggagaggtccagcatgtccagctgccgcaggccct

SEQ ID NO: 246573 - DNA, 1000 bp, Homo Sapiens; identical to SEQ ID NO: 246409

SEQ ID NO: 246574 - DNA, 1000 bp, Homo Sapiens
tttatttgccaataattattttattgatactttttttattgttacaatgggaaagtaaggtgtcaaggatatagaaaggaagggcatgcatatgagggaacacagtatcattttagatcttagaaagcaatgagcatctgataagtctttggggaaataggaaaggaggaaaatctaataaagacaaagatcagcaaaagaaaaacaaagagaggctacaaaatgcagttatctacctggaattataagagaggggctaaatgtagtcatctcctctttttggagatcagaaggtctctgggaaaagagaagaaccaatttttcagaaaataactagggtcacagaatgaacaagtggaattagagagccagtgatggacgtgaggaaacagctgtgtaggttttgaccagtgagcaggtggtggtaatagtatcacagggttgctacttactgaatcactgctacaacatgcaaggaactgtgctagactttacagaatgattcctaatcattgaagcaaccctcacaaggtaggcattattatcatcccagtttcacagaggaggacatcgaggctaccaagttaagtagcttgtcctggtttcacagccagcaagtgacagggtcaagagagggacccacatcggccagacactgaagtcaggatgttttccacattcctacttccccatattacaaatttcacagagggtttaggtgagaatgacttggaagtttacaaagtcccagtgagggttaaagaacaacaaggagattcagatgtgagcaggatatttataagtgtcacaggaaaattattggatcctgcctcccaggatttctaggggatggaaagaagacagggattatggtgggaggtgattttgattggaggatttctttgagggagggaactggcagaaggagtcaggccctacggtggccctaggcagaaatccggtagttggggtggacctggggcctgacgtcgcagaccat

SEQ ID NO: 246575 - DNA, 1000 bp, Homo Sapiens
caatgaatgtggagttgaatggaaccaaacccttccttcggttaaagttatcctttttttttttttttttttttttgcgtgtggttttgatggtggttgtagttttgtttcgttttgtttttaagagatgagtcttgaaggcagagttgtaatggccctcctctctcccctcccattcccgaaattagggtagcttaacagaaagccaccttgaccacatggccagggactgagattcaatggggaaagaaagactgtagctggaatgtgaagaatttgatttgcagttgattgcaggttgggtttccggaagggcagacagctcaatgtagtgccatcatagggcctcagatgcccacactccacccccagagcttcacaaaatggaaggaccctggagtcacccttctcccccacccccataagcactcagcctacagattatttcaagtgatcaggagaattaaaacacaccccaaccctgagttgctctttagcaagtctatttacaatttttttctcacctctccctggaggtaaatctgggtttcaagttgggaagccatggggtgagggagttccccagtgcaatggccgatgacgagtatccttgccactgccagttaacagggctgggatgagctcctgtagacagcagcctcacatccatcagctagggtagccctaggttctcactctgttggcctacgctgtgaaaatgatggggctctgcagtggagcaaatccccatgacagagaaaatcacacctggaatatcaaagtgctttggtccaggttcagtgaccagagaagaggaagaggggcatctagctcatttaaaaacctggaggtttgccctgcttcccagacagggcagtaagaaacaactataacgtttttcccattagggaaaaacatcacaaaaccaaacccatagaagggcttttaacacagcttcctgatgcttagctgggcaatgtctcttccttctgtgggggga

SEQ ID NO: 246576 - DNA, 1000 bp, Homo Sapiens
cagaggaaggaacagcaccttttatttcagatttacagaaaaagttagcacgtttccacttggagagatttcctacattaacaaagtctgttttgaggaaataaacactgaatacatattttgaatggaaatatataaatgttaacgacacacatgaggctcatttcctgatcagggtctgggacccacatacagaatatagaccttacaatagtacagtccatgacacagattgcagagattccgactttttcccaccacaccccctcccagccaccggacagacaactagccacagtcggggaggatccaatgctctcggctcggcaaccacccgcaaggagagcaaagtacgagggcgtcccacagcaagccttactccagccgcaggctccacctccacgcaccaggtgacgtgactcactcggagaagccatttgtggaggtggcacattcacctgtacggtcccaacatagtcccaaatctcagtctacaacatctacgatctattccatatccaacgagatgcatttggaaaggaaaagtgcagggactgagcggacacagactctgtcaagaactttcccgttgtttcccgcgtccaccacagccatgctgcggcactgagctccgagcagcttagctcctgacttttcaaagttttcttcagtctgaaaatactttctccactctctactcagaataagatagtaccaagttgcctatttgccttagaaatacattccttcagggcagggaatgcagtctccttgatctattacagggacttttcaagatgatattaccaaacataacggaacctagtgaacacattccagccaactgctaaaagcacgtggcccttcagggtgacctgtatgagccgcagtcagatgccaccttctgtgactgcaaagcgctcacctactcttcagagtggcgtcatacacattgagtttttaattttttgacaaaacaaatcccttcacaacttgaata

SEQ ID NO: 246577 - DNA, 1000 bp, Homo Sapiens; identical to SEQ ID NO: 160645

SEQ ID NO: 246578 - DNA, 1000 bp, Homo Sapiens; identical to SEQ ID NO: 160645

SEQ ID NO: 246579 - DNA, 1000 bp, Homo Sapiens
tttttcattaaagacaaaggactttattactcacagcgatagtagtagccagggaatcagcttttcctgtactggctcgttgagccccatttcccaaagggtgacatgaagagagccaggtgacctcagaacatacattggattgtcttatagtaaagaaaccccaattttagggaacctgaaacttttataatgagaagtatgtttgccctttgctcccaagagacatactatcttccaaggcagttcactctataaacatcctctagaagatactccagaacaaaagtagacagtacctttgttcatcagacatgtggatatgtgacaagtctatgaagaattgtctctcagtgggaagttttacatattttattgaaaaatctaagaaatcatgtgaatcatgtataatattttctcacaagaaaaattttaagctggcttttgaacgtttcacataattgtaaaactttttaatttttaaaaggaagaaaaacacaatgaaacgaccaccgtattatatgctttctgtttttccttgttcctagggaaaaggctgagaaatactagtaaattttctaattatgattcgtgaggctaagtactatactctttaataaatctgctaaaaagatacagggaaatgggtggatcaatgttttctttgttaaaaatatttaaaaaaagctaaaatctagtgataacatgttaaaataatacacattttttgtaagatgtcaccatttctaacgatttctctacactatatcaacagtgcaattgtgattcagtgtaaatcattacagtgtttcattgttacaatacttgtgttcaagtacatgttcatgaacatgatcaaagtctctattttgacttttcttttccatatcaaaataaggttataattacagcagaatttttcctatggatgtctataaatctgaaccaaattcataatacattctctaaaaacctgttcaacagcatgaggttcattatg

SEQ ID NO: 246580 - DNA, 1000 bp, Homo Sapiens; identical to SEQ ID NO: 246574

SEQ ID NO: 246581 - DNA, 1000 bp, Homo Sapiens; identical to SEQ ID NO: 160683

SEQ ID NO: 246582 - DNA, 1000 bp, Homo Sapiens; identical to SEQ ID NO: 160719

SEQ ID NO: 246583 - DNA, 1000 bp, Homo Sapiens; identical to SEQ ID NO: 246477

SEQ ID NO: 246584 - DNA, 1000 bp, Homo Sapiens
aatttagacaatgtttatttcatatgtttactgctacattccatcaagaaatttcttgttttgatgttatgacaatttagcaagtaaaaaacacatttctttgaaaaaaatacttctaagctcaggctcttaacatataaatataatgcacaaaataaatatactgcaaaaaaccacccacctacaaattgctgtatgcatcatttctgaaacatgaaatacttataaaagcgtaactctacattgcttttattttcagctctaagtaacagaaaaacttactttgtaaagtgctagatcttaggctcaagggcatgtggtgtctgctacaactactcaactctgctggggtagtgcaaagacagccacaggtcaaacataaataggtgttttttgtttgtattcatgttttcaaaactttatttatggacactgaaatttgaatatcatataattttcatgtgtcacaatattctttgattctttcaaccatttagaaatataaaaccattcttagcttgcaggatacaaaaatgggtagtgggccagatctgtctgatggactgtcatttgtcaaaccctgacttagtgtagtcaggatctgcccctaaatcacttgtaggaaaacaaacaaacaacaaacaaccaaatcaaggcactggcagcaagaaggtggggaatgaatgttgggtagccaacattttttttttttttgcagcgtaattcacaaaatacaaataatgatgataacctctaacatatagctcttgtgtctcagacactattctaagtgctttgaaaatgttaactcatttagacctcaaagcaatcctaagatgttgtcactatcactactcttttatgggatgggaactgaggcacagagatattaagtagcatgccccatgctggaatcggggcccaggcagcaggagcccagagtccacacccttaactatgccatgttgcttctatgaggaagaaaaagttggtgaagaac

SEQ ID NO: 246585 - DNA, 1000 bp, Homo Sapiens; identical to SEQ ID NO: 160758

SEQ ID NO: 246586 - DNA, 1000 bp, Homo Sapiens; identical to SEQ ID NO: 160762

SEQ ID NO: 246587 - DNA, 1000 bp, Homo Sapiens
gtaatttaaactttatttcatatctattgttaaattacacaaaatcagtgaatggtttgtaaagctacaccaatggacagatgtttacagttgaaatcatgggatttacataatggcaaaaatgtatatgtatatttataacatcctctatatacaataatcagtatagacagagaaaatgcacttaatctttgcaaatcatgcacaccacagcaataacacaaaatgttttttctgtaacaagcttttccactggctcaggcttcatcctgctttccaacaatacctatcagttttaaaagcaaacattttcaattaaaactaaagaaaattgaaataccatagtgatctactaactattttaaaaacacaattgtacacaaaatagttttactctaaaacactgtgacttcaaggtgtggaaaaattcctttcagttttttagctctcaggattttcaagactgcaatactgtcagacaaaacaaaagctagaaatactgatacaagctcagagtcaagaaaatctattttaaacccaaatacccagcttcttgtccagtttgtggctatattactacagatgaaacacatgagcagattgtacaagatgtgactttatggtcacacttctaagcatgtcccttgtgaaaacataaatgccactttcagtcaccttgtttgatttacagccaggaggttagtgtaagtccttgcataagtatagcaaaatccacagtaaaatgaaaactgcccggaatcatgatgcttgacagcacagtgggttacatacttctttttatcttggtcagcttgtaataggtaccatagaagtatttttgcatcgacttacactaccaaattactctgctcaactcatatgttcctgatatgtaacctcactacagaacactttttacttttgctcttttcaaaacaaaaactttgtagaagggtttgcccacattatcaaggtgctattgaataactggctagccttc

SEQ ID NO: 246588 - DNA, 1000 bp, Homo Sapiens; identical to SEQ ID NO: 160715

SEQ ID NO: 246589 - DNA, 1000 bp, Homo Sapiens
ccttgctaagtaagtttataagctccattttagttgggacagattaagcacaaacttgtttaaagcaataagataatttactggctcactggtcaaccccaggaccaatgggcctatcatggggactgcctctctctgcaccacacccaccctcctgcaagaggtcgacccccccatcctctcccagctgctgacaggtacctgggtatcctcagctcaggctgttcgccccacactatccccacagccaggcctcccagggtacacgtcccgacccccaggggtgtccccagcactgataataggcagagatgtccagagttgcctgagccacttcttggtgttgcagacctcaggctggggcggctcctcctccgtgtggccccggatcagcacaccaggctgctgcctttcgctttttacaggtacctccacccacagggctggtcagggctgggcagtgtttcccagacccccatctcagcacctctgggtcccgccagatgggaagggttgtctgtgcctctgctccacagatgagcagtatcccttggcatcacctgctacctttccagcagtctgtagccatttgtcactatgtctttacctctagtcttctctcctacttccatgaagacgcggccatcagggaagaggccttcctgcatgttgctgtggacatgtacttgaagctggtccagctcttcgtggctggggatacaagcacagtttcacctccagctggcaggagcctggagctcaagggtcaggcaggtgcaagggccagtcccacctccaggggagctccccccagccggaggctccttctgccaaagaatgttccggcacagcatgcagactatgggggacacaccagccctgtttctgtatgtcttctaacctgtgagtttgcctgttttctctctagggcaaccccgtggaactgataacaaaagctcgtctttttctgctgcagttaatacctcggtgcccgaaaaag

SEQ ID NO: 246590 - DNA, 1000 bp, Homo Sapiens; identical to SEQ ID NO: 160834

SEQ ID NO: 246591 - DNA, 1000 bp, Homo Sapiens
gaataaatacaaaagattttattttttcctcttaatttctttaaaatacatatcattatttaaagcagaaattgtaacttatgacaggacttacaatatttaaatatgtagatttaatatgtatgacaactacagcataaaagacaggtatgataaatggatgtacatacttacaagatttctacattttatgtgaagtggcacatcaactctaggtagactgaaaaattaagaatgtatattgtaatcactagaacatccaacttaaaaaaattattaaaacagtatagctaaagagccaataaattaaaatacaattataaaataatcttatctaaacaggaaacatgtaaattagaaacctattaataattacatttaatgttaaacttattaaaagatacagagagaacagataaaaatgcaagtctcaagtatatgttgtttaaagaaactactttaaataggcacagaagcacaaagtaaattaatagaaagaggtatactgtgcaaacactaagcttaagaaggctgcagtggctatattcacataagataaagtagatttcaaacccaaattaccagagacagagggaaatttcataatgataaaatggtcaatacattaggaagacataagttattagagcttcatacaaaaactggtagaatttaagaaatagacaattccacaatcataattgaagattttaacatcctttctcagcacctgatagaaataaacaaaaggatcagtaaagacatagaagatctgaacaatactatcaaccacttaatctcatcgatattacaaaacatattaacccaacaattcaaattacatattgtttttcttagagacatggtctcactatacattgcccaggctggtctcgaaatgatcctcccacctcagcctctcaaattacagattacagctgtaatctcagcatgtaatctcatgctggattacaggcatgagccaccacacctggcctaa

SEQ ID NO: 246592 - DNA, 1000 bp, Homo Sapiens
gtggataaataaatatattttttattcaatattcaatttaatctatattagcctatgtttcactttataggcaatgcgtagttcttaaattccaagctctagaatgctgcttgagactgttctggctgttgtgcatctgagaatgagcttctgggatggcattccttgacactgaaaacttgagaacacatattaccatgaggaagccctctaatcaggcaggaatgatggtggtcaaggaagacttcctggtgaaggtgactcttgaaatcagttgtgaatgacaaatcagaatagcaggagagagaatgttagatggaaataaggcaatctcaacagagagaacagcatgtatatagcacaggttgagaagtaaagggaacaaagagggtaatgaatggaaaaaataagccaggggagatgggatctaagaaacaggtggagataaggctgtattcacaggagacaaaaatggcttaaaggaagagattcacctgtaaatgggaacaagagaatggagagagttcaagtttatgattactttattttttgaactcttctctctcctggagcaatgagctgggagaagggcaaggggtacaaggagtgtgtgtgtgtgtgtgtgtgtgtgtgtgtgtgtgtgtgtgtgttggggagagtgttatgtggtggatggggaacaatatatttaccttccacataagtttttattgataccaagatgaggtaaatagaactctggtgtggatctgtgggtttgagtccaataagctttctcttttacattcatcttatttaaatctttgctgtcacagtgaagaaataatttagaaaacttataaaagcaattgagtttaacacagattttattgccctatagacagttatgatgtgaccagtggatatcaatgaaacttcttaattatttgagtctgaaaatgcatatttaaaacattaaaagattgactccactttgtgccaagctctgcgggtaggcata

SEQ ID NO: 246593 - DNA, 1000 bp, Homo Sapiens
acatgtgaaagtctagttttttattagttttacacaaccagctattcatgaactgtagttaaaacattgtaaatctgtatatttactgctactcaattacaaaatcttcagatggcattgaaaaaacatatccaaagtaactcaagaaaaaagtaccatggcttcttaaacaaaaaatcaaatgaagtatgtcacttgataggaagtttaaaacacacatttaccatactttaaagtaggttttcccctacttgtagcacagttcaagtgcctggaaactaacataataatttactgttaaccatttcaaacttaacattttgcatttatcactttaaaacacatgctgtctaaacattttaatacatgatactttaaagcagaatacttgccagtcagtaccaatgagtctcaacaaataacctaaatatcagagttgtcttgggttaacttttgagatatacagctgttggcttgttttgggaccacactttgattggggggggcggggggcgggcggtgggggaggtgtcttaaatgcctgaggttcactgcacattcttggtgtgttaggtatttactcgttataaactgacctacttttaaatttttaaaatactcaatattttgaagtctctttaaagtcatatttagtcccttctttaaagcaaaccagtatattattgttcaaaaacaaaagcatatttctaacctgtatactgaagtttcttggcaaaataggcatcctgaagaccctgcaaccagtgttttattttagaatgagatattattaaactgttttctgtcatgagtgtttttaaaaaaaagataaaagtaaatacttgccatgttcttaggcctttaaaatatagcttataaaatgtatactatttaccaggagagctcacatttttctgcagttttccagtggacctgcctatggaatactgtaaagaaaaatctgcaaaaatattcctagcaattgaatcagtgcttttaa

SEQ ID NO: 246594 - DNA, 1000 bp, Homo Sapiens
ctctgtaagaaggtgctatacttctgtgatacaaaagcaaaagagggctattctattgagataaaaatgtcatgctactcttaagaagctgaatgctcctttaatgtagtaaatctgtagtgtctgtgttgtgtttcgtgtgtgtgtgtctgtgtgtgtgtatgtgtgtgtatgtgtttgtgtgtgtgtgggcagaatttcttttaatttaaggcctaatgagtaaggcttatttgaacaaatgaagtgtggagatcaaaagtcttgaaacaaatgtatactggcataaatggaaaagcaccaatgtgaaaggaagcagaagtccccacacaacttgctttgtagatttcctggtaaattccctgcagtagaaggccattgaattttttaagttattctaaatttattaactgttaataattccatcccatgagatggctaaccctggctttttctgtcattttacgcactctgcctgatctggatgtaccaagattcagaggatcctcagtggacacaaaattgtcattatcagaatcatcattatataaaacagtcctcctgccttggtttcttgttttaattcgaggcagtctactgaaacgtcctgaaaacatggtatcaaattcatcatctgcaatacgtgctcgtttggctctggtagctcctctagaagcacctcttcctcctctccctcttcccctccccctagtgccacctccacctcttcctcgactccctcgtcccctgcctcctcttcctctgcctcctctactccatctaccccatcttccccatctgcctcttcctcctgtgcctctggtcttccaatttctttttccattgccatgttgctttctgagttttcttttaggtctggtttgtatgaatttgctataatcatggtctccatctacgtaatcttgatctgttctggaagttgattcagagtcagagtcagaaccacaggtactttcagaacttaaactggatcctaact

SEQ ID NO: 246595 - DNA, 1000 bp, Homo Sapiens
aaaaaaagaagacaaatgtataagaaaactggaaaaaaaaaaagcctcaccttcattcagtgcttctaccacctcccaatcggtcaatttatcgcaacagctgcgctcatgcgaaaaaatccttaaaacatacccaatatatatacagatatagctatgtatatatgtatatatataatatatatataaatttttatttaaataaaaaagaaagctcgaatcccaagccaatatgtgtatatcaaatccttgaccagccaggtctgtagggcataatcaaattcaatgtgaaatagtatataaacacggtgccttgactgggcaaattaaataattgctactcaaaagagtgttctgtttggactctcctactggtaggcaatggcaggactgtattacccttcccacccccaccacccatttgtttaagttaacagtatgatggacacagagcttagactgaggttgttatgacctcagcaggagttaagggttaagaaaataagaaacaagaaaaatataaactcttgtttttactcaaccaaagcaatgtagtaacttattacataaccagtgctttctaatttagtagtaaaatacagaaagggaaactgaaaaaaatcaggcaaatagaggaatggagagggcaactatatcaaacagtccccactaaacacgttttatagggtcttagttaattaagcacagacacatggcatcagaatatgtgcagcagaattaaaaaaaaaaaaaaccttactcttttcaatattttcatgaagaaacatttgcaacattggacagttaagtctatgaaaaatgacttcaaactatttcctacctacttatactaatgattctgagcaacaagtgatcaattcataaactatccttaagactcaatcagttcacaagtaaaacaaaacatccattaaaataatgtggctctattcattttaagttcaaatcaaatgttgcagttttaaaacatagttgattg

SEQ ID NO: 246596 - DNA, 1000 bp, Homo Sapiens
tcaattgtaccttttttctttaaaaatagagctctttatttaaacagtttagggtaataccaacaagcagtaggatatcgtttaaatatgacataaacatagaaaaaatagaaataaatacaaatacataagaacaacatataccgttagtagtctaaagggatacatgttgctttcacctaaggcactaacacttttcacgggatatgcttccagcgcaggcccagcccacaccgcgcagttcccacctgctgtgcacgtgaaagggctttgtaaacagttaagtgctgaccacacaaggcaaattattatactgattatcatgccctttccaaatgcttctcctggctttttgtgaatgacttaatgacgataaaggagatggagtttagagttactggaaaacttaagctatgtcagaaattaaactctggaaaaaattctttaaaaaaatagtaaggtttggctgggcgcggtggctcacgcctgtaatcccagcactttgggaggccgaggcgggcggatcacctgaggtcaggagttcgagaccagcctggccaacatggtgaaaccccgtctctactaaaaatacaaaaaaattagccaggtgtggtggcgggtgcctgtaatcccagctacttgggaggctgaggcaggagaatcacttgaacccgggaggtggaggttgcagtgagccgagattgtaccactgcactccagcctaggcaaaaagaacaaaactccgactcaaaaaaacaaaacaaaacaaaaatggtaaggtttaagaatagaaacggagtggttatttcatacaagtctaagatgatgctgatgatagcttttacttttttgaagttacctccacgaagcagctcggctggtgccagagagaacatcggtacaggtctgggaatttccctgggagctggccccaagccacagccctccccagctccgtagtttgtttgttcttcctctcctgggctcaatcatctggaca

SEQ ID NO: 246597 - DNA, 1000 bp, Homo Sapiens
ttttttttttttttttttttttttttacttttcagataatctttacacggagttgttacaatgccacaaatcaaaaggattattccagttccaccaacttaatctacgtgcaagataaaggacccagctggtacaggtgtaccagttttcttgagtttgctttacaaagcacaaagagacgaaggttttgcattggggtacaaaacagatttgcctcttgaggttaaattcagtattatgtgtataaagcatccctttggcaatagagtttgcagtatccccacaggactccacagtataggttttatgtagtaaaatctattaaacaaattctcttctacttgacacatctttgcagctacagttaatgagacacccttggaaacacctgcctccatgcctattgataatatagtatttggaagttagaagtcaacaaaaggcactttcatcattaaataaatgtcctctgtatgaagtaagattacatgacctagatcttgttcaaagctgtttgctcctcaaggacctgtaggtagtcaggggaactctgcagtttcgccttcagttcaaaatactcactcttcctttgttccacaacaattttactgtggttgccacctatcagtgacttcttactttttttgtctggttgtttttctggatagcggatctcaaagccactgacacctatgctattatactcctttttgctttcaagaaaattctgaataaacacattggaatccctgctagggaataattcatccagctcatcaattgtgctcagtctcttcctggtatctacatgtaataaatctttctccttgtcggccacatttctcataacaactttctgtcctggaggatctgaaaacatgaacccagtttctgactctttcaagccacaagtgtggctcttgctcatctgttctatagtttgtggaatgaaagcttctgtgctcagtccatcttttttattggttttgtggtcatgctt

SEQ ID NO: 246598 - DNA, 1000 bp, Homo Sapiens
tttttttttttttttcagagacagggtctcactctgttgcccaggctggagtgcagtggtgtgatcacagcccactgcagcctcgaactcctaggcacaagagatcctccctcctcagcctccctagtagctggggctacaagtgtgtgccaccgtgcctggctaatttttttaaatcttttatttttgtagagacaggagtctcactatgttgcccaggctggtcttgaactcctgggctcaagtgatcctcccgcctcggcctcccaaagtgttcagattacaggtgtgagccacggcacctggcctcaagtttctgtgaaaatctttggggtaggagcctctggtggctcataaatgagctttgggaagatgacagggttatcacgccaagcaagaggccaggcttcgtgcaaagaagggcagcatctcgccccgagcgccaacaccgcctggcacgtctctgtgctggaggtaatcgccactcaagtctctgcccatcttcctgggaaactgtcctgtctctcagaatataggcatcttccacattcattccccaagcttgccccaggagccaaaatgattttagtgtgtggaggttgaacctttcccagcgtctccccagctctagggcagcagtggggggacgttgtccccactcaagacaggttccaagacatgctctgccacgctggcagagcttagtgaccttgctgagtagatgctgccaacggctgggtgcaagaggctgtgagcggtgcccaggcacacacctgaggctgcccctccaagctccgggatggaacggctccagcaagatgctggggctggaaatgcagaggtgtgacagtgcgtccatcctcagcccttcactgcgtcatctccccttgaagatccggattttattgatggaggccaaggtggccgtcacgttagactcaaagtctgcatcgtgcacccccgtcttgcgaaaagcccccgcggatgggttgttctccca

SEQ ID NO: 246599 - DNA, 1000 bp, Homo Sapiens
tcctgcaaaatctgttatcagctttattagggaaaacatcaggtctctttacacgttgaacaggaactgctggttaacaagacacgattaacttgctaggaatggacaaggacagcgacaggatggtgcttcacagtgcctcctgctgatggcaccttcattctggctgcagaattctcccaggaagggtcccgggctcttcaggaggcatttacttggaagtacaggtcagcgttatccaaagttgtccagcctccggcctggcccatgtcttcaggcagctctgaggcaagaataaaagggacgagttccctgccccctttttacccgctggatcagcttctacgacttggtcaaactatctttctttctgtctgccatgccaggaaatccagtgacagcaagacccagagtcaggcacatttggagggcaggtccatcggccactcctcacttctgtgggctccgatgccagcagagccacctgagcggctgctacctcttgccggaggcagtttcttctggcctcacccacccaaccatggctacgtcagggcagaagggagagaagaaagagagatgagagatgaaaggatttaaaatgggcaaccatctttgaggtttcccacatctgcaccgctccacagtgtgaaaagggctttctcactttcacatgatccctgggggctactatccccctgtaaccaaaagggaaactgggactcaaagggaagaagaaacgtgctcaacatcacgcagcactaggtctatgtccagtgctctttccagggtaacaggttgcttctactcattttaaaggactaaaaacagaaaaacaggcacccaactgacccttcctccctgacgatctagaacttacacattacgtgctgcctttgcacatgccccagctggaatgccctttttcttttctgcctaaacctgccctttgaggccccactccatctctctcctctggggcgtgcccaggctgagcctg

SEQ ID NO: 246600 - DNA, 1000 bp, Homo Sapiens
aaagcagcctccaggctttatttacttagcccgtaatccttccttggaattctgttgtgccggcagtgccacccatgagatacaattttatgagcactttgaaatgagaaatgtgatgggcaaatatcaagtattgttaatgatttatgtaattatcattggattcatcgcagctgacaagtggctgcttctgtacactctctcagcaggcagggaggagattagaagaaggtcccccttcaaggttgctggctttgctgaccatccttgtcataggaacagagctgtgaggagtcaggagcactggagacccctagtttcaatggattcacatccaccgcagcggccccaatctggacctggtcagtgttgccgctgctgatggatttgtccagggagcaggagaacatacactggtgattaaaataatgttttctctaagttactgcaaactttctcctgtgtagttgaggcaacacttccagttgtggtgagagattgaacaaaagaaaaagcatacaatgttaaagctggcaggaccttaaagacactgcctagccctctcactcagcagtgagtcgtagatgattcctccagatcttgacgaggcccacaggcccttgtttaagaacgtcgcttgctgctttgctgcttctatggggcacattctggtgataaaggccagctgtttttctccaccagcatggagttctctcaactttgtttctggtttttagagtccctggccaattgtctggagacccagagagccactgttagtctaaggtcgcttcataaataagggtaatcccggtcctggattctgccagactcctagaaagactgacagtgaaagtgtcatttcttgcttgggaaaccatacttcacaatggttttcaatagggcagacccattaaatacataagaatccaacaacactcttttttcagagtcggaatgactcagttctaattcagtcttaaataaataatgtgctgga

SEQ ID NO: 246601 - DNA, 1000 bp, Homo Sapiens
attatgcacatgaaagaagattcatttatttgaaaaggaagtatctggagataggaaaaaccaaagatgttttttcctactttcttttttgtacagacaaggtctcactatgttgcccaggctgatctggaactcctggccacaaggatctgccctatcctgaaactttctaggggcccccagccaccagtcatcacatgagcatacaaaagacacttaactctgcagattccgctggatgtcagggattggggataaagaccaaatacatatttcacaatatcatagcacgttattttttgcgtctcagcaaaagtgacaaacacaatgggaaaaggagactgatttccctcatgccattatgagaaaaatatctgagtgtactcactcagtaacacacacggcaaaggccattatgagaaaaatatctgagtgtacacagtaacacacacggcaaaggcaaagttattccagaggtaatatgtaactggcaaaattttcctcaaattctttcctctttttactatgacctaagctgcacacacatttctgcctctgcatccttgattgtacacgctgcaaatatagtcaatttgcattatttgtggtacttatgttccataaagtccacaaacactgaagtagtgaataccaaatcactgctcctagaaaacatacagggttaggtttctgcaagctttgtttttgtcaacagaacaatgcaacatattgttgattcagtaacactgaactctctgccaacagcattataacttgtgcatgaatgaagcttatctaatatacttattttctcctaagccttcctgagcttaggaacatcagaaagcactccagcagggcatttggaggccattttaaacagtaaaatcaccaacaaaaagaacagaaattaggaagagatgggactaagtagactcaaaaaggatacatgtttacggtatgagagctgaaactagaaggcagagtaccatttgtttca

SEQ ID NO: 246602 - DNA, 1000 bp, Homo Sapiens
tctctctttcttgattttattttaaacaacacacattaacattttaaaatagaatttaaacaggtgcccagtaacagaatgacagacgttaagtgtgaaatcagaaagttaaaaaactaaaccgcagatggtcacctttttattttttttaacatccgcctgcgctggactgttaagtggcctcatcactgtcaagccaggcaggatttgtaaagcttgggatgtgtgtattcagagatgacatttgcttggtgcctttaatgatttctgtaattagtcatttaaacagattgccctgtgatccaaaacagggaatacagagagatgagctgagaaaatcatttcctggaggcactttagagctaattgtggaaaatgaggcttgtctctttgcaagactctctggatcatatttcattgggtggggatggagctggagagcaacattctccaggaatctataaaatgtatatgcctgggaggtgtttttctttttgacaccacagtgctaaaagactttgttgggtcacaaaatttaacagatattaagtaagtgatccaaatttgccactggcaatttagaaaccagagaaagaaatgcacccggtcagagaaagttgaggctacatgacagagaaaagccaagaacttgatatttcacaggaatggggtaagacttgggagacctatgactttgccttcattgcactggacagttgttctttttattaataaatgtccttggagtgacaattctgctcttcaaagataaaagcggaagctttcagagacagtcagaaagggattcgactattttaattaattcatcactctcactaggtaacagcctctcagtaaatgcctttatcccagcaagcctccattgcttcctctgagaaacagctgtttaattctcaccaataattttgccactgtcttgtgggaacggtgttgataactcaaaatttctcaaaagttgagatgatttaaaattctgtgc

SEQ ID NO: 246603 - DNA, 1000 bp, Homo Sapiens; identical to SEQ ID NO: 246440

SEQ ID NO: 246604 - DNA, 1000 bp, Homo Sapiens
ctcattcaatgcattgtttattgagtactaactagctttgggcccaggctctgggttagcagcatgcgtgaaacaatcagaaacaatcatgagcgcctgcccacatggggcatacagtctggcagggcaagactgtagacacagaaataaatatccgattataagctgtgattagaggcatgatggaaaagagcaaggcttcctgagagaaacagggcgagcacaggaaaacctctctgagacagtgacatgaacttgaaacttgaagggtaaacaggagtgggcaagacaaaaggggaaagaaggaatcttccaggcagagagaaagagaaaagacccaggcacggtatagagccgaggacatttgaggaagaaagggccgccggggttggggccctctgggtgactgggagaggaaggcgccggaatggatccagattaaatcggatgctgtatgccctgtggagacatggggtgtacctctaaacgcactgcgttgtaagcaaaggagtgacctgatttaatttgatcttttaaaagtcattctaggccaggccgggtggctcacgcctgtaatcccagtgctttgggaggccgaggcgggtggaccacgaggtcaggtgttcgagaccagcctggccaacatagtgaaaccccatctctactaaaaatacaaaaattatccgggcatggtggtgcatgcctgtaatcccagctactcaggaggctgaggcacgagaatccgcttgaacccgggaggtggaggttgcagtgagccgagatcgcaccgctgcactccaccctgggcaacagagcgagactccatctcaaacaaaacaaaacaaacaaacaaaatgtcattctacactgtgaaaaatgagctggaggaggcaaagggaagaaaggggagatcagtgaggaggctgttgtcatagctcaggcaggagtatggtagcttggacttggcaacagcgtgcaggtagagcaccaccgctggagt

SEQ ID NO: 246605 - DNA, 1000 bp, Homo Sapiens
tcaagtagtaagcagagtgtttattttttttaaaattacttaaaaaaggttgtttacagagatgtggatttatataacttggtgacaacatttttaaaatgtacaggctatttcatattattgcacttactctttaatatataaggcattttactttacataaataaaggttaatgtataatatcatacaaagttatggtgccaattaagtcaaccatcaaattcaatgagatgtgtgggaagatggaaatgaaacccagcctactttaatcttcatggtatattcttgcaactacggtttacttgttataacacatatttatttaccctcatagcttattgtgaatgactgaccagttaaaaaaaaagaaacaatgacagttttagtaggacaataccattagtgttcacttcagaaagtgtgggaatttattaggctaattagaaatactagtcatgccttgaacactgaagacaaataaatagctttctatctatcttagggtcaaagacagtttagcttttgcttcttcccttaaatttcaactgtttgttggcgagggaaaccttctggcaagatgtagtagcagtggctgatgactttagcatagtgtatgtggtaagccagaggtctacccttgtactccagatatgaggattaaaaagacttgcggaaggagaccattccatttgctccacattgcacaagaaattcctgtctgttcacatagggctgtgcgtttattaattaattattattaggcacagctgtaagagtggaggcgaaaagcagttttcagtgttgttgacttgaaatagtctttgatttaggcaagaaagcagaaaccacaaaactgaccccagagactgaaaaacaatcaatcaatatctatcaatcaagcatgcaccttgcactgacttcctacagtattctacctgtaactgtagtgaaaagtagaagtaaaatcaataagacctttctaactaactcctgtaccat

SEQ ID NO: 246606 - DNA, 1000 bp, Homo Sapiens
tttatttttaacttttgacactaaggaaacttgtttaaaggctgttttttgtttttgttttttttttttttcacaagaaggcacagcttctaggttaagtcagttcaaggtgactacaaataagcagtgccttcattaacacatttcaaacacatagaaatttagcaacgttgcttaagtgatattcatttcaacggcttcacagttaataaaatgcaatcagacaaaacaactgtgttaacctgtaaagtaaacaaaataaactaaatagtcaaggccctcaagtaataagaggagattatgggtaatcttcagtttttctaaaggaaggaatgaatgatgaaaggtaagaagaaatcaattgatagagggcagaaaaggaaaggtgagtgaataagtccttgatagatatgcaacaaattaagaccacctttgaaaagttacgtgcttttcaaagacactgaaaatgcttggtggaacatttgctcagacctactgtcatgagaacaaaggatgtgtgtgtggctgggaggtggggggacttcattctccaacacaattgcaacattgcaaattgcctgtgtgtgagaacacaaagatgttggggatgtttaaaaaaaagtgatataaaatattgcaccattacaaacagtgtgtgaggttcctttggcatttggacttcgagatactgaaaaaagcctcatgctagttcctccatcttgaacttttactaggaacagttgaactgtgtgttaaagttgagaaaaaaaccctaacaaaacaaaacaaacaaacaagaaacattacattctgggtggaattacgatccgttcatagctaaaagcaaatcttgtaaacaagttaagactgtttgaaaaacaaattaccccaaaaaaagctgatcagaatgtcaggaatgactatgtctcaggttttgcccaaaatttcactggctgtcatagcttctgaaattaacaatatctagtgctgtactgaatgt

SEQ ID NO: 246607 - DNA, 1000 bp, Homo Sapiens
ttaattaacaataatttattgtggtacatatttttattactcaaaaataaagtgtttaaatgaaaataggacattttatgcatgggataatgtattttttagtcaatcggcagtggtagacttgtataaacagatgaattctttaggaagttaagaaattggaacccagatgaaaatgatagtctgaggattacacctagactatatatgataaacctaacatttgtcatgataaccagttattagtaagaaagttgacatcatagaagcaaattatgtctttaggaacttaccaggaatgttttgaaaagaatcagaaaagcttattatagtttgttttttttttattgcttttttggaggaggtggattttataaaattacttacaaatttaaaaaaaacaggaaaaaagatagttggagttctgctgcatacttattcaagtactaaaattatgcagggaaatcgttcttgtattaaaacttagataattaaaaataattataaatgccttttaacatgaacctctttaataatctgttttagatggcctaacttatagcatagtgggtttttttttaacttgttttattttgaaattattataaattcacaggaagttacaaagatggtacagagtggtcctgggtacccttcacccagttttccccaatggttccatcttacataattatactataatgtcaaaaccaggaaattgaaattggtacaatgtgtgtatatagttctgtgtcattttatcacttgtgtagatttgtataagcaccactgcaaccaagatacaaaattatcaccacaaagctcttcttcgttacagcagagtgttattcacttatgcctgttacaattattttcctatattgttcattttaattttcatgttttgtacatttattatcttgtttcctcttcttggcttttatttctcccccttcccccaacccattctttattataagttgcaaccacggcgtctgag

SEQ ID NO: 246608 - DNA, 1000 bp, Homo Sapiens
caaggttaaaatgaagtttattatttttttgattttttgattttttttgttttttgtttttttaaataaaactgtttgtgaaacagctattttatccccatggcagagtgacccctgaaagatgcactaaccccttcttaaggccataacaagatttttttgtacttttttctttttttaaaactcagatatttaaaaattatacaatttacaaaacaaaacaacacaacataaagaatcacgtagcatggggctgcctatctgacaggtcctcttttcctttataaaaatgaaagcaaaaagaaaaaggggttaaatgggtgttcctggtcagcttaacccactctgatcacagcgacagtccctccccgtccctgcctacagctcacactgccagctctggcaacacaggcctggacctcctcccatccccacgggtccctgtgggtcagggcacagctgcctggaatgtgctgaggacagggggccccagaggagggtcatcccttgattttgctgctgctgtgtacacttgatggggtccttgaggtcctcaccagccacagtgacccaggacacagctatgacctcaggcatctgccaatttcacccccaaaaagaaaaaattaaaaaaaaaaaaccataaataaatagtgtttctggaaatgaaaaaaaatttatttttgtgtttaaacatcattcccctactcttgaaaacatggaccatccctgtatttccccctcccccaaaaccttcccactttgagacaaattaatgacaaaaggatggttctgctgtggtttgctttttcaatcctgggtctagtgttttctgaactggtgtgagacaggctaaagatcaacgccacacacacaccccgtccttcatgagatgagggtttgttcagttcaatctcacatttaaatttcacttgtcatcggaacaaatttggagatctttaacgagataattttaaaacagaatcaaaagggatagcgc

SEQ ID NO: 246609 - DNA, 1000 bp, Homo Sapiens
gagacagagtctggctttattgcccaggttggagtgatctcagttcactgaaaccttcacacccccaggttctagcaattctcctgccttggcctctcgagtagctgggattacaggcacccaccaccacgcccagctacacagttgtctttttaaaatataaaccaagaccgggtgccatggctcacacctataatcccagcactttaggagaccaaggcaggcagatcacttaagcccaggagttcaagaacagcctaggcaacatgatgaaaccccgtctctaccaaaaatacaaaacaacaacaacaacaacaaaaaaacctggggatggtggcgcatgcctgtggtcccagctacttaggaagctgaggtggaaggatcacctgagcccaggaggtcaagactgcagtgggccttgatcgcaccactgcactcctgcctgggtgataagagtgagactctgtctcaaataataataaatgtaaaccaaatcccaccattcatccccttaaaaagctatcagtggctccccattgtactcaagagaagtcctcagcagggaccctgctcatccattgagccttgggtcactcaccccttactctgtgggaaggtgaacctgtccatcatgtcaccttcttctacctcctcaaatgctctctgctccttctagcagctgggtctgcaccagttttgttcctttgcctggaatgctatttcctgcagctttatctggctagctcccacttatccaggtctcagcttaagtgtttttcttcataaaggccttttatgagcatattttatgtatttgtgagtttgcttaatgtctgtctgacataagctacacaagagtgaagtctgtccgtttgattcaccacaatataagcagtgtctggcacagggcctggcacatagtggtcccgctccatatccacagatgaatgagacagcccctgccctcagggatttcactgatgggtggggagacaggcaa

SEQ ID NO: 246610 - DNA, 1000 bp, Homo Sapiens
gattttttaaaatttttagccaacttttatttttatgcctagaaaaatacatgggacgtttaggactaatgtgctgggcaatttgctacttagtgatagtaacacaatcctgaaaaagcaagcacaattattctgtactttttaaaagttttattcagcaataagaccataatttttcatatttaaggagtatgaaaaatttgtggagttttaaaagctgaatacatgtagcgttggatcaaggcacatacaagactggccaaagggcgtacaatgcactttggttttttgttgaaaaaaaaaaaatcatggcaacagaaaagtgatatggtttttcaacaagtaacagctcacaattcagtaggaagctagaaggaaatgttacattacgagttcattatataatatctggaaaattgtgacagtaatgggcagtattcttgatctttgtaaaagtaaattgaacatttatgtacagtgttaaaacctttgacataaaccagatctaaatttgatgtctagtatttatttttctttaaattatctcttatttaaagaactactttctctggattgttgaggggaatcgcttataattacattacatttttaatatgcataaagtttctctgacatcctttatgataaaaacatcataaacactaacaattttgtgtttataattcacttttcaaaaatcaggatggtataggcaaaaccaaaatgcagttttggtatttgtgttcattacactatacaagtctaagtttccatgttttcctaagtacacattttccccccaacttggaagcacatttacattaccgtttttgtgaagtcctttattttcaaagctttgctgacaatggctttaacagacttcatgctccttttatgccagctgatgtattcagttcagaagatatgcttaacttttttaaggataattaatttgcctagagcaaaaatggagatatgcaggaagtttgatattgcccat

SEQ ID NO: 246611 - DNA, 1000 bp, Homo Sapiens; identical to SEQ ID NO: 161170

SEQ ID NO: 246612 - DNA, 1000 bp, Homo Sapiens
acgtcaagcttagctattgaggtttgtattcatgtagactgtaggaaaaacattttagtaataaatatttagatagagccactttgaggagcaggcagaagagctgtgaagggtcaatgttattaactttcttatataaataggccaaaatatggaaagtattcattgagtcttcaaaatatttatttgttttggaatcagtattggaatttaaagagtcaaagactggggaacacttttggtgaataatcaagggaaatatatattcagagtacctatagttagtgctcaaatcggtccttacatagcattctgaaaaaccacttcacgactctcataggtcagtttcatgaatcttccttaggctcatagaaatgtaaaatatattcaaaagaaagaataattagcaatttgggtagtcacaaactccatatttcaaacaaatggaattggttcttattcagataaagagtaaacctaattatcaatccaagtaaacttaaactttgttaggttaggagctaatttgctgtattgagcaatatttgaataatggtatcgatgaatattataaatacattatacatttttaactgtaattaaacttttctttaatgtaaggaggaaaaaagtgacagaaagcgagagaggcaatgaaagagaacacagcaatgtctttgaataaaaacaaactgctatcccttgtcttcaatgatgtatgtggttaaattcctcatgtattcagtgtactggaatattaactatccccgctccccaatagaccaagatcatttataaaaaatgttttcatcacataattaatcacatattcagctacgaatggcagactcaacaaaaacactagactgttattaatatattttcctttgtttgtgtttcactacttttggcacatagggattttctatgcttctaagaccatttagctttataccaaaaattccacttcaatgcataaacagtggcatgccagagatgc

SEQ ID NO: 246613 - DNA, 1000 bp, Homo Sapiens
ctccttccaaaatacttttatttaaaaaaattacaaacaatccaaaaaaaaaaaaaaaagccaccacaaactctgcctttcttttaaataacccggcatggagcagtttggtttccaccctattgcacgtggtccggcctggttatgaaatcaggaggctgctgagactggggtcctgccgaggaagtggggttcagcctggagggaggacaccagcccctcccaccccctcaaggtgcaagaggcagagcctgggtttctatagcaacctggcagcacatccctgtcatccttcgacaggcccagctttctttatcttccctgaggccccagtggtcacaggggagtgggaactagcaggaaaggtggaagaaatgtgtaagtggaaaatcagactcccagaaacagagtctcgttaaggcatttggaatagataaattaattcaggaagacccaccttcacagaaggtcggggtaaccagacacacacacacatgcaagacagtttgtggaaccctgaaatgggaacaaaggaggccatagtcactgcttcgagcccccacaaaaacacacacccagagttgcattcagggatccaggccaccgaagatgacatgaggaaggatcgatcccctctatcacagttttaggaccccagaatgatttccatgatgtgatccagttcattccactcccaagaacctggggcacagaagaggttgtgaggaggctctggtggggcccgtgcaggctccttttctaccgcagatgtgtcaatgtccagaaagaagtcatccaggccagagtcccccaagtaccgggagctcagagcttctaagaagactggatcaggctggggtggcacttcattctggaggccaaggggagtcactggattctgagggggctcagtcccatccatggaggtgtccagctccctgaggatagagccaatggtggctgacagggagaaatcctcctcgcccaggaagaggggctc

SEQ ID NO: 246614 - DNA, 1000 bp, Homo Sapiens; identical to SEQ ID NO: 161253

SEQ ID NO: 246615 - DNA, 1000 bp, Homo Sapiens
tttttttatttatgtgtattatatttttcaagcagctaataagttggtaggacataatatttaattcgttggggacctaattatttataaattgaatggttagatatttcttttggcctaagccaccatgaaaaaatcactgaggcgctaagggaaacatgaactaagaagcccttctgagtctctgttttctcaactgtaagatgaagaaacctgctccaccttcctcttgcgattgttgaacggcagttgagatactgcgcagaatggaccttattgatggcctacccaacatccattctctactccctctactctgatggcacccggattagattgtggaatctaccccttcctcacatgcctttaggaagttgagtccagggaagctccaggagcaggctggttttatgtaaagacaatcccgtcttctttgtcaaagacaggtataagaaaggcttgtaacttaactcagtccaaggagacacaaaacgacttgctggggggtcctgagatctttatttctggatgttgctgtgtgttgggtataagatccagaacttgctaccagcctgaggagaaatcaaacacatggagaaaggaaagctgacagcccagagacccacggggaaacaggccccgagttactggatacaggcaaccctaaaactgactgtccctctggactctacgtagtgagccaacacatttcctcattattttggatatgtttttttcagttgaaggcattctgattcaatacaggtgaaacttttctttgcaaattacaaagtgtgataactgttgctaaagtttggaatgtgcttagagggagatcatgaacaccaagacaaaaggcctggatgcaaccaatcactctgtttcacgtgacttttatcaccatacaatttgtggcatttcctcattttctacattgtagaatcaagagtgtaaataaatgtatatcgatgtcttcaagaatatatcattcctttttcac

SEQ ID NO: 246616 - DNA, 1000 bp, Homo Sapiens; identical to SEQ ID NO: 161275

SEQ ID NO: 246617 - DNA, 1000 bp, Homo Sapiens; identical to SEQ ID NO: 161289

SEQ ID NO: 246618 - DNA, 1000 bp, Homo Sapiens
cctaagctttaaaaaatactttaacgtaataatggtaatgcagagaactagaattcaacatattacactgctaaaatattcatataaatactatatatgcatgggttcattccattagaaaaattcacctatcagaatattaaagaccagtatcagcaaagcccaaggagagagtattttaacagtaggaacactaaaaatatcaactatgaggtttataaacaagtggtgggaaagagaactttttacatttgctattgttatgacaggcacaatctgaaatacaattttagattagcagtgtataaaaatactttttaaacaatagttttgataggtacagtagcatttaaacaaacagctgtgtggttattccttttgaggacctactaaaacaattcgacttactgcccccagctacacctgaaagtgcgaacctggaaagcaagtctcttacccaggtacacatcacacacacccacatactgaaaccacctccatctatgatgcatactgatgaggcggtgatctcaaacacggcgtgagacgagtgtttgaagcctgtttccatttccaggtttgggatgaatgaacaagaggcgaaggccaagtggagtctgtgtgtgcctgggtcctctctaggagtttaatctggcatatcaatatttaacttgggaggggggggaacgtatttcccagggctctgggttataactactctggccttctttccaaatattggagcaattttcggagcttctggaactgatgtttcttcagcatcttcactatcttcgtgatggagatcatatgaaatgttcccatattctcttaaaaatgggaaaatttcaagcagaaactgacagaagtctctgcgaatgccaaaccaccaatgattgcccccctttcgcctaaatgttgtggccattaaagttagtaaggaaagccaaagggggacaaatatggagacgtaggagaatgtattgtggccatccaatct

SEQ ID NO: 246619 - DNA, 1000 bp, Homo Sapiens; identical to SEQ ID NO: 161314

SEQ ID NO: 246620 - DNA, 1000 bp, Homo Sapiens
ttttttttttttttttggtatttttagtagagacagggtttcaccatgttggtcaggctggtctcgaactcctgacctcatgacccatccccctcggcctcccaaagtgctgggattacaggcatgagccaccgcacccggccaatttgtttcatattctatgttaagccctcacatttatctaccttgccccctgctttagcttgcaacagtcaaatcaccttgagggccctgaccaggaccaaaataataactcgaatttgacggaattgtgcaaggagtttgagagacctcagcacccggcagatcctcagaagctgaagccacaccgattggcctgttacccctaccaataccacaacctcgggaagcagggactgtggaaaacacacaggttataagtaaaatacaccccaaggcacccaggcagaattgcagcttcttcatcttatcctcttcattgttccctgggcgttatcctttgaatagcattctctgagaagtgcttactattcagcctttctatattaagttgcttaaacactatacttcaacttgttcagatataaaaagggggataaaattcatggttatttaattaggttgttgtggagcataaatgagataatgtaaggaaaacacttaaaatagtgcttggcacttagtaagtgctcagtaaccggcagatgctcttgttggcattgatgttgtagttagtctactttgctcctaataccaacaactcctgcaatgattgatgtttagttttaggaaaaaaaaatcaaaagaaagaagttaagtaaatttttgtttcttcctattatcatgttaacttgttctttcgattcacctaggcacattcttcatcccactaaacgaaccctcaggatctctatccttaccaacatggtaacaacaaagtcaaagacattccaggcactcttccagaaaacagaaaagttggatagccacttaagaaggatctccaggatgaaaataa

SEQ ID NO: 246621 - DNA, 1000 bp, Homo Sapiens
ctactggcaaaagggggaggccgtggggtcgaagcctttaaaaacatccttcagggatgccgcatcctgctcaccctcgcgggccggactgttcccagcaaatgggcttcctgagcccgtcttgggtgtctgcttcaccgtcccgaagagggtgggcacgggcaggttgtgcaccccgggctggggtggggcaccctcggggggtggggtggcggtggtggcagcgggggctgcagcagccttgggccggggccggttgtagctgttgtatctgtccgtgggggtgcccccatcagcaccggccttccctgtctctggctgttccagggcagacttgcggacgaacgggggctccttagccttggaggccgagctcttgccattgccctcagcacccttgggctgggcacccgtgtcagcagccggctctgtggctttgccccccgcgttgggagtcctcgggtcgtagaggctgataccgctcagcacactgctctgcccgccccctccgccctggcccagtccaccggccgccagcacgcgggggtcgtagggagcggtggctggtggggaggcatccccactcgggctggcggtgggagagggcgcctcagcagggccgggcttggcagcccgggaggaggccgtagagtctgtgggtttctgcagccgagggtcggtgggggccttccgcacccgggggtcactgggtttgtcgctggaaccgggggcggccgaggagccggtggcattgactgtcttgaggatgcgagacagaagttcaaagtcggggaggttggcgccctgtgtgctggaatccgtggaggcgcccgggcgctgccgggcgttggggggccctgccgtggcagcgcggtgcagccgggggtccagggtgggcatggattgcagggccgcgggcacggggggcactgcgtcctgcttggggatgggtagggggatcaggtcctcgggattccagagcacggtgcgggcgaagctg

SEQ ID NO: 246622 - DNA, 1000 bp, Homo Sapiens
cattttccaaaacaactacatttattcacatttacacacaaggcccccaaggcactgcttcccaccccccaggccctcccttcctgccctccccgttcagccaccttctccctcccctccttcccctaccctccaaagctaaggcccagcaagatcagcactggaggagaagcagcctttgctttggggcaccgggtgccatgagggtccgagacttcagagccccacttttggggactggcatcagagagtctgccccatggcggcccctactggctacaatgccgcttcttcttcctcctggaggccaaggggtcaccctttctcttttgagactgtgaggggccacccagcccccaagccagggattgctccccagagaccctgagcccaggccctgggtgcggtgtcttttcagcaggggatgggcttccaaagagaggtcgcttcttggacttgctggcaggagaaggtgatgggctgaggcctcttttctgagcagatggagactgaagagctccctggggtcctctccctcctgggctgagaaggcccgaggaagggacagggctctgggacagcctccagggcctcagcctgtggtgggaacccacgacatagaccatgccagggagttccgtctcctcacttgaccccttagccagcccatgtgactccttgacaggagactctccagggagacccaaggcgtccttggtccccaggccggggcaggtgggtctgtggtcctggggaggagaggttggccggacagccttcagcctgggggaatcctgacatcccaaaagcacagcagggtcttcggacctggccatgccagtgcgcactctgccctgtccctgagggtcctgggcagctgtctggggtggggaggtttccacgctgaccctttgttgggggtcagggacctctctcgctgcttcttggccagctgcaaactcagaaggacttgagtccaacctggccgtgccatgtcgag

SEQ ID NO: 246623 - DNA, 1000 bp, Homo Sapiens
atttgaaaaacttttattttgcataaaacagacccattccctttgtgggtcagatgttaccacctttaaaaaaatgttttttaactctcctttctgtcccactgaaaaatttattttgaaagggttaagaagagtctatcattgctggtcaaaatcggcctgaggatggccgccagggacagaggcctgaaggcatcatctgggcaggcctggaagcccacggggtgcagcatcctcaagcccaggggcgggagcgcctccggcctgccctccagggaagctgcatgtggacctccacggtattcagcctccagtttagtcagccttgagtctgggctgctcccgcacctggtgttttatgcgtgtgatatatgtgtatccatcctgcttccctgccttcaagggaagacttaactctccgagagaaaacctgcctggagctgcgcacattctcacagcttgagaacgcttgacgcaggaagtcaccagagtactcaagtcaaccgcaaactagtggttacaaaatgggagctttaaaaaaagtgctctactagaactgggtgtcctcacagtcgggagcagaaggctggggcgcaggcctgcggctctgcggcgcctctctgcaaaggctcgggtccaccttccagactgcaggctgccgtgtgtgctgtggaggatgccacagtgttaaggctgaccaggaccagaaggtgacactgggctctcctgctacgtctggccacttacagcagatccctaggccacactccttccaagccactttgcaaactgtttccctgttgtggggccagcaggagctacaagggccgaaggcggctctgccggggctggaccggttttgtggcattcgaggagaggtctgggaaaggccacgcaggcagtgaaggtcttttcccacgtccaattttatgggacgactggggtttgaagatggaatctagaaaccctcctctccccttttttaagtaaagagaaaaga

SEQ ID NO: 246624 - DNA, 1000 bp, Homo Sapiens
ctaatatattttactgacaagcccttgagagctgctttgctacttgcatgcaggcctctgtgtgaccaggcacacagactacatgtgctccatcttgtctctccgctgctccaggggccttgctcaaaaaccccctatattactggaaactgctggttttacctatgtgcttcttcctaaggcatgcaaaaaaaaatatgtgaaattcagaaaacatttacagttcaggcagctgaggcactgaagtcctaagagacatcacctaaatatcagtggctgtgactcccctgtcccccacaccaattatgaaggtcaggcatgggacacacttgtaattcccctctgctttatggtccagcttaaaacgatgccattagaaggaattctaactcaggtattgcaattatttgaaattcccaatcctcaggagccacacaagcccagggccagcaacaacactttggggagcggggggatgagtttcctgaagtttgtggctgaaaagcaggccttccttggcaaggcttgtgggagcgctgggtgctggagactgaccccacaagtgatcagccaccaggcctaagactaaccagctgcaggacgcccccttccacagtgaggtgaagcctcgccagggggcctgagcagcaggcttgctcttgtccctacattaggacacccgaatggtgtgacaggagagctaaagaaccacccacaaggggaaaagctgatgtcaacttaagagccacacacctctggaaagcaacaagcctctccttcagtttagtccagaagggaaatcccctcatttgtgaacacatcattcatctcaacccaagctgctggctctgtggactgggcctgggcaaggctgtgctgctcctcccaggactgggcccacggccagtacggccagctccttcagggaaacgggcctagcaggggaggcaggcactccactggggaagatggctctcgtggagcagcatctgaggcttga

SEQ ID NO: 246625 - DNA, 1000 bp, Homo Sapiens; identical to SEQ ID NO: 161334

SEQ ID NO: 246626 - DNA, 1000 bp, Homo Sapiens
aagagaaatgctttaactttataaaaaatgtgataatacagcaagatattgttggggttttctttttttctgtcaagtaagaaaaaaaaacacctggaataaaaattagaaacataatctaagaaaaattggaaacaagcatttcaaggaaacaatttggaaagataaggaagagaaaacaacaagcagcatgagcagcaaaagcagcagcaacatggggggaaagctggctctgctgtgaggacagaacaatcaaagaccaacgtgcaccttgctttccataccaggctgagctgaggggtggggtaagggtgggcagtaaccatcagagaggcatgaaggtttcccaggtgggatcagctgatggctgctggctcactgtggggagagggtaggcaatggcctcctgcaaacgggcccagatccgccctcttataaggcctgccagccaagtggcagtgacggatttggcttagctggctccctcctctgtccacttgctccaatctgcagctctgcaggtcaccatcccacagtgatgagctcagcaagcagagactcatcagaacgtcagcctaagctagggtagcgaacttgccagggagaaccaagaaaactagatgtacagggctgtatacaaaacactttttggaatgtctgcaccatagccaaggcagagttaggaccactttggagaggcagctgggaatgctcccagcaacattccccagcctttccccctagggaagggacatccaaagaacactgggtgaattcttgactacattctgaggtagtctaactgtgacttggcacaggtagctaagaatgatcacaaaaaacagaagaagggaaggcagaaaagtcgccacagagagaaaaggctaacatctctaacagaagaagctacactacaagtgggctcagagatgaccagaatgcgtcctgggctcggggtggccagtggcagggcccacccctgggcacatacagctctcat

SEQ ID NO: 246627 - DNA, 1000 bp, Homo Sapiens
gagattcagagttttgctttattaggcgtctgtgaagacaagagagtttgcagacacagtcccgtctggtggtgaactgctgcaaagttctgtgaagtttgaatttatcttgtagtgaatgagaccccagtagctgatattttagaatactggtccatatttcaagcagatgagaggtgtggcattatggccaacaacttttatattagccatccactcaagccgtttcccagcatacatatgcagcttaatcacagctatacatctctacaatgtgaaattcgatctttgactaataatgcattctgactcctgtttacattggtgcatgcgattctttgctaccctggcaattaaccagacctggactctaaaagctaaacttggtctaaataacattctaagggtaaggcaacctctataatctggactcagccatcattttgcaaaaacagttgtatggttcctcctctttcccctcctgtctgtaacttgtctgttactcagcatttattcatgcctgctgtgtacggaaagggcagttacaaaggaaagccttgatgattctgcttccaagaaacgtgaagatcagataatatgccagggacaattgagtaatgggtcaagacaacaggccttgtaggtattttctaaggttagaaaaatgtgttcaagtgtacttatccagtgctcttattctagaatattccagtgggggtagggaaggagggatggatttgggggtttcatttaaggactctgacaactggggctgcagctctgtggccagaagataaaattatcatcctctccatcacctatctgccaacactgcagatttctatctgctcatttaagagaaacagtacacagggagatagcattaatgcaaggcaggaaaggctttacattagcccaaaaaagaggggcttgaccatgttactcacacttacacttagcccagcagaaaagctgggcttatgtaccacttggtttcttt

SEQ ID NO: 246628 - DNA, 1000 bp, Homo Sapiens
catagttcttgccaccattttattttgttacttgcagtcaaaagaatcctcaccaatgcactctctaaattctcaattagaaacccagctgaaaaagcaagacttacgctgaagacagcagcagcaagcccaactcttcactggcaccaaaacatttgatcagtcaacaaatatttattgattgcctgctgtgtgtgaggctctgggttaagtgctgagttaatgatgtggtctctgcttttgtaaagcccttagtttagagagagagtctcaggccacacaagaaattacatatttatgtatcaggaacggcaaattcaaggattctgggacttaacccaagactaagggaggggtaagggaacggtcgtctaagatggtaactgctactcttagacttgagaaatgaatgacatatgggaaaaagaagtgttataagcacagcaaactctaggggcaaaataaattgtggctgagagacagactgtgatactggagtccgggggcagagaaagaattgggaggggaggtcagggaggccaacagaggccagaccacaaggttttgaaggtcacgacgatgagtttggataatatctgaagggaaatgcacaggccgtagaagcgtttaaagagaagagtgacatgatctgatctgttttaagatgaagatgctgggagctggatggggtgtggcctacaggtggcaaagtgaatgtaaggggaccttttcagagaacatggccaagctccctctctagctcagagcaacacagcaagccctgcctgtctgctgcagaggcttggaggttgtgcaaaccacacagttagatcagcaagagtttcccagccaagaagtcacatctccttacttgcacaaatacaggaagactcttcttctgcagcaagagagggagacagaaagtcccactttcagggtccaaccctcagtcatagcaggccctggctgctgctggagtgaaataggaagttctggccca

SEQ ID NO: 246629 - DNA, 1000 bp, Homo Sapiens
tttcatttagttttgttctgattttgttatttcttttcttctgctgggtttggatttggactgttctagtttctccaattctgtgaggtgtgaccttagattgtttatttgtgctctttcagactttttgatataggcatttaatgctatgaattttcttcttagctccacttttgctgtatcccagagtttttgataggttgtgtcactattatcgttcagttcaaagaatttttaaatttccctcttgatatcattgttgacccaacaatcattcaggagtaggttatttaattaccatgtatttgcatgcttttgagtgttccttttggaattaatttccaattttattccactgtggtctgagagagtacttgatataattctgattttcttaaatttactgagacttgttttgtgccctatcatatggtctattttggagaatgtcccgtgttctgatgtatacaatgtatattctatgcttgttgggtagaatgttctgtaagcatctgttaagtccatatgttccagggtatagtttaagtccattgtttctttgttgactttctgtcttggtgatctgcctagtgctgccagcggagtattaacatcccccactattattgtgttgccaactacctcatttcttatgtctagtagtaattgttttataaatttgggatctccagtattaggtgcatatatatttaggactgtgatattttcctgttgaactagtccttttatcattatataatgtccctctttgtctttttaaaactgctgttgtcttaaagtccgttttgtctgatataagaacagctactcctgctcgcttttgatgtgtccatttagacgaagtgtctttttccaaccctttgccttaagtttatgtgagtccgtatgtgttaggtgagtctcctgaagacagcagcaacttggttggtgaattcttacccattctgccattctatatcttttaagtggagcatttagg

SEQ ID NO: 246630 - DNA, 1000 bp, Homo Sapiens
ttgggtaaaaagtgaaacaccaatagtttaattgaaatttcagaaaattgaacatatgaacaaggcaaataaatactaagtaagttaaaaacacaaaatatgtccaggaagtatcgatgagaatgttcaagttaaagttctccaatgccattgctacagcaacctcaaaccctaggttctctctgcactattaacacagacatctcaggacatggtttgcttttttttaagacttaaataggaaactaatttttctttctttaaagcaattgcgttcttcagtgaactctttctttaggccagttgatggcttcttagcagtttattgacgagatcctagggtagcttccgaagctgggttgattgattgcatttgggtgcggatggccaaagtgagtggccctactgcctgtgctgctcagggctcctgggctgatgtggtggcttcttccctttgtgctgctgaacatagggaaagtgaggttcacagtccaccatccaccagccgccgtctgtgagctccaccagcactcgcagcaagtcagtcgggctgagagtgtggttgtagaaaccctggctttgtgccttcccaccttccccagctcaccaaggtgacacctggctgctgctgaaatggcctgagcagtcttgcattagcagggccagccacctgccagcctgctgcatccccagtgcctcttgacgcagaagtgccgagcagctgaccggcagcgaggcctggagttctacacacttgccttggagccttttatttagggcctcaacttgcctggccttggcccttttgtaggtggccacctagtttggctcagctctgcatctcggggaaggtcacacagaccctcagccagaagttgagcgctctgttgaggccgtgcagcccctggaatgctgtacctttgccttgcttttttctgcctctgtacaaaagaccagcccatgccctggggctgggtcaatggccggagtctcaggtaga

SEQ ID NO: 246631 - DNA, 1000 bp, Homo Sapiens
gctgcattttctttattttaagccacaggtctacttggagggtcacgcagcaagtggcttataaataaaatgaaagtctatgaatagtgtcatcgcattaagagacaattgctgggttgttctttcattatgtaaaaagctcgcatcttgggaatccatgagttggtaggttttatggaatacctgagatgtaccttgctctgattaacattgccatgctactcactataaaaaagcccaagggcagactacagaagacactagggtcaccactttctggagattgagttgtaacccaacccattgacttcatcacagctttcttccatgtagaataacgaatttcactttcctcagcattaatctgaggttcaaaccgctccattgtgacggcggagaaatcctcaggttcaagactccatacgacgactccttctgcagcccctgccgccatggcagcacccaatgcagtggtttcgggcatcaagggcttcactactggaatatacagaatgtctgcttgtagctgcataagaattttgttgctggtccttcctccatcaacctgcaaatgactgagtggaattccacagtctcaattcatggcatccaaaatctctcgaatatggaaacaaacagcttctaatgcagcaaaagcaatatggcatttattggtaaactgagtgagtccacagattatccctcttgcgctgggctcccaataaggtgcatataaccccgaaaatgctgggacgaagtagctgccataagaagtacctacttctttagcaagtttttcaatttcttctgaggtctttataattccaagattgtctcttagccagcgaataacagcaccagctatagctacagaaccttccaaagcataatataccggtttgtctctgccaagtttgtaagccattgtggtgagaaggccatgatcagaaaatacacacttatggcatgtattacatagtaagaaatatcctgttccata

SEQ ID NO: 246632 - DNA, 1000 bp, Homo Sapiens
aatttcactccttcatgactgtcacatggacaaaatgaaactaaacttaaatcataactaaaaaaaccaccaactatatttttgaagatttttctaattcttgccactcaaaggacaacattttccacaccggtttgtatgttatccttttggtcattgtcttctgaaccaatgaaatgttgattctccaagggatttgagttttcgtggcacacgtcacctattttctcctgctgacttgggcttttgaataagtgtttcttttggtgcattccaagggcagcagctgttttgcaaattttggggcactggaagcaggcatagcccttcccattatgctcccgaatatgcctctgctcgtgattccttttggtggagagatacaaaaatctctgaaagcagaactgacagtggtaacgcttttctccagtatggattctttcatggattttgagggtctcattcaaggtgaatgccttgttgcaatactgacagacgaactccttcaagcccaggtggatgcgttcatgtttctgtaagtttccttgcaccgaaaagcaccgtccgcaggtcttgcactggtatggcttctccccggtgtgacatctcatgtgcattttgagtgtggaagggctctggaactgcttggcgcagagctcgcaggcatatggccgagaagtaagatgtcggtggggccttccttggtttccagcccccactgctttgtctccatcacagagttcacactgcagcttgggcatctctttagtttcttcttcctcaaagggtttatcctgaggagccttccccacggcgcaatccagttctgctgggtatttacatttatggctcgggctcctgtttccgtgctccttcctccagttgactttcctcatttttttcaactgtctggatttctttttgggtttgtagttgtagtaagggcgccacggtttgtcagtggaatcctggtcacttgcgtcatcgaacacttcactca

SEQ ID NO: 246633 - DNA, 1000 bp, Homo Sapiens
tttgaaatactctaatttgaaaacatctggtacattctcctttctggttgtgctgtgattttttttgcccatcaacaaaacatgtaccagttgttttggagttccgattccacctcttcccctcttgggcatatgaagcacatttcctgttttatgataccattttcacattcccctcatcagtttgaaagcaacgccctaacgttccttctaatactttgcaccttttccattttttcaacaagatatatcagtagattcaattttaaggtttccctgacaagcatgtcccctcacttggtaccagaaacggcatatggtgatatgaagcagagaattagcaaccccaggcacaatctatccccatttgtcttgttttgacaacactggaactcagccgaccaaagtcaccacagtggcctgtcacgtacagagggtgactgtcatagttagctaagcaacttctgattccagcccagaaaacctaccactttgggacaggttcaatatagaatgaaatagtcattcttgtattttcttatgcctcttcctttctcctgcatctcaatgcatgctgtattagggaaggacacctcacctgctacaatttggcaaatgaggcaggtagtaacaaatagggccttaacttgctttaatttaatgcacagataggcagatgcctaattctgtgcaaagtgtatttcataactgattttcagaagacaaagatgaatctgagtctgtaagagtcccatgagatggataggtaagagttaataaagtttctaactgtaaacaatgctctttcatgttggtgattattttccagaaattgaaatttcaggacagtgcaacaatgctttgtgtcttctttggcagtaaatagcaaggatctggatggaagagtggagtggtcacttcagaagggccaggtatagagctcgagaatacttcatctcccgttcctgttccatacaaaatatcaagtccctgaggcaga

SEQ ID NO: 246634 - DNA, 1000 bp, Homo Sapiens
acactaaaaagagtaaattttattgtttataaattatgcttcaataaacctgcctttaaaaaattttttatcagtaattacaattttcaaaagtggagatacttggtaggcccctgctttcttggcccctaaggtccctctctctgttaaactgtagagctccttagaaccaaaaccaaaccacctttcattttaatgaaaatgaaatgcaaaaactggggctccaagcaaggaagaaacgtctacctgcagttcatctgggggttggtgggagaggtggtggagagagtaaggctaagcgcccccagcaggcccaagttctctgtaccacacttggaggcaggtatatgggactgaaagtggatgttctcagccacaagcctgggcctggataggaaacaaaggataagactggaaggatgtcaggtagggtagacccagagcaccagctgggctcacttttcacgccctccatccattcgtcatgagtatccggatacagcaccacacggttcaactcctgagcacagcagtaacctttacacagacagcctgatttcccagaatgaattctcgtgtttacttccagatttaatgactttgactttagtagtcatctgaactatttattttactttgccagtaatatttagaccttatatatctttcattatgccatcttatcttctaatgtcaagtgaacagttgctaaactgtcttctgcatttatcacattaaaaatgtctttcttggaaaatcttcttgatatgaataaagtatcttttagagccatcatttaaagcaggtttctctccaacacgagtctgctgaggtggtgtgagctgtgaactctggctgaaggctttcccatacacactgcaatgacatggtttctgaccagtgtgagttacctgatgttgaataagggttgactttccactgaaggcgtttccacattcttgacatttatagggcttttccccagcatgcattatctgat

SEQ ID NO: 246635 - DNA, 1000 bp, Homo Sapiens
agtacttagaaggcatttgtttgttgaatatgcgattttaagagtgacacccctaaggctcaggagaaatgagggtaaatttccccttaacaatttgtcagcagagaaacattttctccctcataattaatgggatcagaatatcaagaacctctctgcttgtggttaacagggtgggctctggcaccaggctaccagggttcaaatcctggctgctctgccactttgtagtcatgagactgtgggcaagttaacctctctgagcttgatccttcacctgtgagacgtaaaatttctactttgcagaatcccatgtgggagacataatgcaggtgcttagtgaggggactggcacccagtaaacacactaaatgccaacaaacatttcattcccagcaccaaagacactgctctggtgtctgtgacataccctgcaagcctcaagacactatgtccactcccaaagcagtgtggggtgttagtttgagggacaaacttgggtttgaatatcagctctgtctctttccagctgtgtgacctggaacaaatgctgctctccacaaatttcagtgtcctcataggcataaatgaatacccacacctcatagagttgttgtgagcattgaaaatgcctggctgggcacggtggctcatgcctgtaatcccagcactttgggaggctgaggcaggcagatcacctgaggtcaggagttcgagaccagcctggccaacatggtgaaaccctgtctctactaaaaatacacaaattagccaagtgttgtggtgtgtgcctgtagtcccagctactcaggaggctgaggcagatgaaccccttaaacctgggaggcagaggttgcagtgagtcaagatcacgccactgcattccagcctgggcaacagagcgagactccatctcaaaaaaacaaaaagaaaatgcctatcaagtaccttgcatattgcacatgtaaacctaactgcaatgattacaatacagttgggg

SEQ ID NO: 246636 - DNA, 1000 bp, Homo Sapiens
tgagtgctttcacattttattttcaagtataaaggcttcatcgcagaaggaggccagggttacaggcagtgggcaaggggtctggaagcccaggtttaggtggacgtgcaggctagctggctcccaggtgccatggccagtcctgtggtccctgtctgtgcctgggaccctcttctgggtgccaagaggccgaggtagctgtgagaggagctggacatggggtggaggggcatgggttcacatgaccgcacaacactggcacgtcttttgcttagggccacttgcctcttcaccctcggtgggggcagatggctcaggctgccgggcaggcgcgtaggtgggcacagggtgggcactggggttggcgctgggcccctccccctgaagcagtggctggcattcggcgggctgctctggggctggggtctctgccagaagaggtgtggcatcccccaaggggccttggccctcagcagcggtttggggcttcactccttcctcctccagggctcctactggcttctcctggggctggggtccttccttctctggccttgtctccgtgttagcctcaaggggaggccctgcctcattcatctcctctgcctgggattcacttccttccctagacccttgttctagattcagatctccctccgtcccttgggtcttctctgtctccaatgattcctcacctccccttttctctgcctccagtgtctcctcccctccctttctctctgcctccagtggttctttggttgcctctggctcttcctcacctcctttcttctctactcccaatggttcttctacctcctcctcctctgcccctcgcttttcctcatctccttccttctctgccctcaaatgtccctcaacttttctctctatgcccagtggttcctcacctccttccctctctgttcccagcttttctgcacttcctctgctctccagctccaacttcttctctcctcctttcctctctaccactggt

SEQ ID NO: 246637 - DNA, 1000 bp, Homo Sapiens
tcagtcagaaaggccatttatttatgtttcaagatgctcactgcctcctttgttttgtctcctttgcaggccttctctcttaggcctcttctcctgggggtatggatcctggggggagattgatcacctccatgcttccattcctccccagccatagtggggacatcatgagagaagccaagccactggcccaggatcacccggcatttatggtggctgctctggcacaggtccttgcctttatagcccctccagtgatccataaggccctctttctccccaaaggagaggtcacagatagggcaaaggtagctcttctgcttccagtgggtctgctggtgtctgaccagcctggaaaatgagctgaaagacttgctgcaatggaagcagtagttgggcggctctgtgaggtgggccttctggtgtctggagagataggatttcttgctaaaagtcaaagaacaatgggggcaacagaagacattgagtcttgagggcttcactggatgagagttggatctggcatcctgacagagggttccagtgatgggtgcctgggtcctggtcacaggtgcttggttcttaagtacagatgcctggttctgggccataggaccctcagttctaaatatgggttcctgggacctggccactggtgcatggttcacatccaaaagcccctggatggacctctggcttctggcgatgggtgtctggaattcagcctgggtgcctggaatcctcaaagtacactcctggtttccatccactggctcctggttttggtgtatcttctggtggcgtttgagctcagactggtcccggaagctcttcccacacacagagcatgaatggggccggtaacccagatggacgcggcggtgacgacttagtccagaagcatcacagtaggtcttgtcacagagcgtgcaacagaagggcctctccccaagatgcatgcgtctgtgatagctgagggacttggggctccgaaacaact

SEQ ID NO: 246638 - DNA, 1000 bp, Homo Sapiens
tcaggcatccttcccggccaaggtgcccgcccctgctccaggccccccgaggttctcggccttgtgcgccaggcggtgtttcttgaggccgtaggtgttggcgaagccctcgccgcaggaggagcagcggaagggccggccgccctggtgggcagccaggtgcttacggaagtagccgggatccttgaaggccttgaggcaggcggggcagcggagctcgggccgcggcggctcatgggcgcgctggtggcgcagcacggagctcaggtagaagaagcccttgccgcagtgctcacagcggtaggcgcgctcgcccaggtgcagccgctggtgctccagcaggttggagcggtagcggaaggtcttgccacaggcgctgcagcgctggggccgggccacagcgtgcagccgccggtgctctgccaggctggacgactgcgcgaagcgcttggcgcacacgccgcacttgaaggcccgctcgccagtgtgcaccacgcggtgctgccgcaggtaccaggagcgcaggaagcctcggccgcacacgccacatcggtacggccgctgttccgtgtggcagcgctggtggcgcatcagcagggccgcctcccagaagcgcttcccgcacaccgggcagcggaaaccccgcttctgccgatggctgcggcggtgtaggagcaagtcgtaggcgcccgcgaagctctggccgcagaggccgcagcccagggtccgtcgcaccaggtgcacgtacttgtgagtcacgaggcccaggaagtgcttgaaactctggccgcacgtggcacagctgaagcgctcggggccggaactggcacccccgccagcacctgccaccgccgccccgcctgcgtcctcacccccagacacccctgccagtgccgccacggccgcccccacctcccccgccagcccgttgtccagcacgctggccgcatccgtgccgctggagccgtccgggggctgcaggccgccgggtgcgggcggg

SEQ ID NO: 246639 - DNA, 1000 bp, Homo Sapiens
tggagtctgctctgtcacccaggctggagtgcagtggtgcgatctcagctcactgcaacctccacctcctaggtccaagcaattctcctgcctcagcctcctgagtagctgggattacaggcatgtgccaccacacccagctaatttttgtatttttagaagagacgaggttcgccatgttggacaggctggtctcgaactcccaatctcaggtgatccgcctgcctcggcctcccaaagtgcagggattagaggtgtgaaccaccatgcctggctggaaaatactgttaagtaacagcagtaagagccgtgaaaatctaaagacaactggaaccagggagaaggcagcaaaggagtcccaaggctctggccactcctttagccacaccataaaggctttcctgattctgcccttttgctgagccttaggtccccactctagggacaaaaggagtgttccagataaaggtcaagtcttaccagggacaaaaagtgcctaactgggaatggtggtgcttgcaacactggtgatgtcgccaagaatagtctgaagactaaactcactccccagacttcagcaccacccaccaaaactgcctggtacactttccctctgaagtaggatcaataatttagccaaataactaagcaaaatatatatttgaaaaatagattagccattgtccttctgtcccccctctgttactcttttatttcttgtaactatcttgcttcaaattcaaactacagctctggggaggaagtcctggggaaaaggctttcggataccaaaacccgtatgtcccgtaccagctcagcaaaccaaacaaggtgccaaacaccttctgggacaagttgtggaaataaacagctgtgcacagaaacatcaacacccagatgaaagtcagaatgcccagggccacaaccagggtggtgatggcggtgtggaggcagtggcttcggtccgtcttcacctcatgcagcacagacatctcttcta

SEQ ID NO: 246640 - DNA, 1000 bp, Homo Sapiens
gaaaaaagcatcatttatttcaaagtacaacacaaagttgtatttttaagaaatacacattcaatcttgtatctcaagacttggctatgtgcatttcagttcatctttaaaataagttcaggtatacaaatgttacatacctcaagtacaaacagcacagaaaatgcatatggtctcaactgaatgtttttacattcattcaccgttcttaagttgacttacatttctgtaatctgcttttaaaccaagacagccttactttaaaaaaatactctattttcagcacaaagtcctcatacagttttaaaattagatcttggcgcataatattgagaaattattaaaaaccaaacttggtaatttaacaaaattgtcacatgccaggatttctgaatcaactcaaattatttccttagctgtaatgtcaaatctgtgttcatacagataaataaagcatggggaagacaggtggtgaaaacgcagtaacgggaaaggttctcagatgtacaggtcttattagagtttgtggctgagtccagacttttctctaaaagcacaacagcaaatctcatgttatcataattgcaagaaagatctgaaagaagcgagtggtctgagcctgccctgcttgggtctgttttgcaaagaagaggagggtggggaggggagctgcagtaagagccttaaaaagatgtctcagaaactggcacatcatgatctagacgagggcccactatgtttgtttgttttttgcttaatttaattctcgtgaggaaagtgcgaattagaccaagggtccgagcttcttcttccaatcgtggggctccatatccgccacgggttgtaggtctgtcccaagtcgtcagctggactggaggtggagggagcgtgaggagcaggggagttttctgtgcccatgaggccgatgcttgccagcgtgtttgctggagtggtgaagggaagggcgctgctaaggttgctggaccaaatggagctgctg

SEQ ID NO: 246641 - DNA, 1000 bp, Homo Sapiens
gagacgagtctcgctctgtcgccaggctggagtgcaattgtgcaatctcggctcactgcaacctccacctcctgggttcgagcgattctcctgcctcagcgccccgagtagctgggactacaggcgcccaccaccatgcccaggtcatttttttatttttagtagagacagggtttcgccatgtaggccaggatggtcttaatctcttgacctcatgatccacccgcctcagcctcccaaagtgctagaattacaggtgtgagccaccatgcccagccaggtctcccctgctcttaactggcccaatcctagcactctttttttttttttttccgtatttttagtagagatggggtttcaccatttgggcaggctggtctcgaacttctgacctcaagtgatccaccggcctcggcctcccaaagtgctgggattacaggtgtgagccaccgcgcccagccaaccaatcctaccactcttgactttcccaaacacattccccaacagcagcaagcttcttcagacctccattcccatctctgctgcctccactctccaaggctttctagcatcttaaggcatcaagagtattggtgacttgtagtatcagtgttaggaaaaatgccttctccaaatcccatatgagacctggccatgtaaggcccctagtgtcaagcctaagactcatggctccttgggcccagtccccaaaatcagggctgcacaggtctgaatagcaaagccaggcttaaccttgtttcccatcctaaacttgccaagtgtcctctctctaggcctccctgtagctaagggctagggccaaggaaaaatgaaccatcaatctcccacctctgcccttggccaatgcaaagggcttccattccacatgtgggagcttcactccccaccccacacatggtccttctccacatgttatacatacacattcctggtcccacctcaatgcggctaggaaccccaggtgtccactcttgcttgg

SEQ ID NO: 246642 - DNA, 1000 bp, Homo Sapiens
gagacgaagtcttgctctgtcgcccaggctggagtggagtgcagtagcgcgatctcagcccagtgcaagttccgcctcccaggttcacgccattctcctgcctcagcctcccaagtagctgggactacaggtgcccaccactacgcccggctaattttttgtatttttagtagagacggggtttcaccatgttagccaggatggtcttgatctcctgacctcgtgatctgcctgcctcggcctcccaaagtgctgggattacaggcgtgagccactgcgcctggcctatattcagaatcttttctatcacattccttaatgctgcagcgttggtatttggcacaggcttttagcaccaaaataagacagaccatagttcaaccagcacgtgcaataccttgtaatgggtatggcaaaaggtagtgcccagacaggacagcatggtgaatatcacctgggaacatgggagaaatgaacattctaagccccacttcctttcttaatggactagggcccagcaacctgtgttttcacaaggctccaggtaattctgatgcatgtaaggtttaaaactccttccatttcacaaggtcctccccaaattaccactttctcatttcagccagttccacacttcagtcagggcctgtgacttttaacaaaccctgtgtctctgcacagatgcagatctcgtatctctcaggatgctggcagtttccaggcagaaagcaaacaagcaaaccaaactcaaagaggctttgagtaaatgcacgttgtggctccaagactatagggcatcgaggtggccctagctccaggcaaggctggacgcagcagccctatggtatctcatgagtcctctttgcttctctttctgatctccctttcctgtgagaggccctgggtggctgccagtacctgccagtgttacatgaatcctttgttcattttctgcaaggaagagtgagtctgtgatcccactggaaaaaaacatcactag

SEQ ID NO: 246643 - DNA, 1000 bp, Homo Sapiens
atatatatatatatatatataaaaatctacagtatttaccactgttgatatatatattttggagcagctcagatactgctattataaactaaattgtacagcttggtttattacaagtcacagaattatggttatataatgggaattaatatcctcagctacatatttatatacatttatttctcagcttccacctgacctgcatcaacagcccagttatttcaccagaattttgtttgcgtttcaatgtagtgtttagctttaatacactgcacttgttttgctatttaataacatcattaccaagttgatcaaaattacattagactcattatatacataaaatatattgtcacattcactagctaaacaaacgttacttccattttaaaagacatacttttgtaccttgaaagtttaaagccccaccttgcaacaggaagaaacatcaatgtcgggttttctactattcaaatataagcaatgttgaaaacaagctccccaattaaacacgaagtcatactctcttggagtgcctaaatctttgtcagtgttttggtatctgtagtgtaacagaatattttttaaagacatcactaatttttttttaagccaagaacttgaatttgtttcaatgaaaaaaagatgttcaaaagcatgaaatcacactgtattttttaaaagatcaaaatcctagactcctatgaaaaactaggatcatttttataattttaacatggacaatgtaatggcctgatgaggtgcagcaatatccgtcgactacattccataaagaggacagaaatggattgtataaatggccaccctgggaccttcgtggggagaagccatgtgagtcgaggcagaagaaagaagtaaccacactgctaatgcagttagtgtggctgccccacatgagtactgtgagcactgagggatcagtaagctgcaacttctcctgctctgagattcgcaagagtcagaccagaacaaagggcac

SEQ ID NO: 246644 - DNA, 1000 bp, Homo Sapiens; identical to SEQ ID NO: 161431

SEQ ID NO: 246645 - DNA, 1000 bp, Homo Sapiens
aacagccatcaagccccttttaatctctagaaaggtgcctcagtaaggcacagagaggtcacaccaggtggtcatggtgccttacctgtgtccactgggcccaggctggccctttaagggtatgagggcagaacagctgagagaccacaccccacttctcagagaggtcagggataaagaaaagggacaatggaaggaagaacttgtggccaggatgctgagggtagaggctgctccccacaggcactgagcagaggggttgaggggggagcctccagcctccatccagacaggacctctgaccgctgctaggggccccttctcaggaggttcagtctcagacaagggctccagaaacttcagtccattttcccaaaatggacatgatgcatctggcgagtcagggacctagaatgtccaggaccgagccttgctgaggacagaagggagcaacatgccctggaggtcctcatgcagcccaggcctctggcagtgaccagccagcacccaggcaactccttgctgggtctccaggccctgatggtcacaagaaaggccacaggccagggctgggatgggcccagagctctgtgtgtttcctgggagggctgagaggtgccatcccccatagcagcccaaggcacagtagttgttgttgttgctgctgctgctgctgctgctcctgctcctgctgccctctgagtctgggggagccggcctagtcagggacgtgggggcccagtcctcctgtggcagataggcaagcgtctgtaccctccactccgtacaccctgctggcagcacatcctctgagctcaggttccccgggagcctggtcccagggccctcctgttcctcctccagggccacagatttccaaggatgcgctgggccacaagtgagcagtgcagtggcctcctggacgcagggctccaaggctccctgtggggtgccagcacagtcctggctcaacagcacaccggccctgtgggcccccatc

SEQ ID NO: 246646 - DNA, 1000 bp, Homo Sapiens
tgatggtgaaacagaagagtttatagtaacatgaacatgcctgttaaacatttgaataaatgatcagtttctcataacatagaaatagaaatgaaattataaattgtgctgtcttgtttgatcaaaagtttgataaaacatttaatagtatacatattccagggaagatgtttcctgttctatctcccaacacatacagtgttattaccacaatatagtgtcaaaccgtcaatgcaaaaatctttaatctccttgccctgatgatatctgtctctacaatatccagtactcccacgtcaataaaatttatacacccattttctgttcccacctaccacactaaattcttgtgatctttctactctgcactctgaaatccacagtaacttattagcataatgcccccaccttttaaaaaagcattcttaatttgccttttattgtttcttaattataggtttaggaagttacaagggcagttgtgttacatacacatatagtgtagtggggaaagtgttggcttttaatggactcattacctaaataatgtaccttgtactaaataggattttttttggtttttttttgagatggagtctggctttgttgctcccccggctggagtgcaatggcataatctcggctcactgcaacctccacctcccacattcaagcaatttgctctgttgcccaggctggagtgcaatggcactatctcagctcactgcaacctccgcttctcaggttcaagtaattctcctgcctcagcctcccaagtagctgggactacagtgcctgccaccatgcccagccaatttttctatttttagtagagacagggtttcgccatgtcagccagactggtctcaaactcttgacatcatgtgatctgcccgccttggccttgcaaagtgctgggattacaggtgtgagtgcctggcttatttttaattctgtgtatgtgatgaatcatgtattgagttgcatatgttgagccatc

SEQ ID NO: 246647 - DNA, 1000 bp, Homo Sapiens
atttttccaattaaatcttttctttttttttatgaaaaaagatcacacagaatttgccaacaaacaaaattccaaaagaaacataaaaaaaaaaaccaataattcccccaaaaaacaaacccaaagtctggcttttccttccctcaagattgtctggttgaggccttggtttcccttgaaggcttggggcctggttaagtgctttctggggcccaagcagggaccctgggcttgggccggctcctgcctctccctcttctctccctaacaaacacttctctatcctggggggtgagtacagtacacttggtggggtgggcggggggtgtgctggggactgggaggccggtgaagccggtgctagacactataatctaacaggaaataaaaaataatattctgcacgtcagaatgtttttttttataatttcatagctatttttcacagttttaaaaagtttatatatatatttatatatatttatctttatatatataattaaaaagttgactccatttaaaggcttatgatacaggggcggggcgagtctcttggtacaataaaactgtacaggttaagaagtgccacctccctcctgggtggggaggggccaggcgtggccgggcgacagtttcagcaccattggggttttctgtagtgtgagggtttggaccagggtgggcctgtgccgggccctctccacctggtgcctttgacagacactccgggctgcaaccccacccggctctgttccccaagtctaggccatcctgagagggtgggggcagggcccctggcacagtcaggtaggccagctggcatcgggctgccctgtcccatgcacggtgggaggccttggggtgggctccatgctaagggtgcttgggaagcccagagtgagcgtcagtttggttccttagaagcgcccctccccaccgaatccccagtctgcatggacctgggggcacccgggcccccacgcagcagcagcctggaggg

SEQ ID NO: 246648 - DNA, 1000 bp, Homo Sapiens
cacgattcaaaggaacaccattttaatatctgaaagtagcataatgttcagccaataggcattggtacaaccatacatactgcttgtttacagcaggcatcccttctgagtggctggcatctgtcctgtaccagttgttaaaatattttgaaaatcatctctgtattaaaataattgtggccctatgagatagggaatatgaaataaatgaaggattcctttaacatcaaaggtctttagagtaagactagaatacattagtatattttaaaagtctaaggaatgcaaaattcaataaagtgatatagccaacccttcacctaagaaagaaaaacacatcggggaacttcccactgtacaaagattttccaggatgggaaactaacatgatagaattatctgggtgctaatgggcttgctagttacattctgtgcacaaaggaaggaaaggtttataagcactggatcccaaatactttacattcattgcaacatagaagagaagagaaaaactataaatgtagttttaaattaaataccaaaactaatttcaccacttacagttcatttcccagtgtgactttttgcatctgagagccagaatgtttgtcaaccaaaagaaatccatgatgatgaagaaaccacatggctgaaggtgattttggtccattgaactgatgatcgtttactctaaggcagctaaggagacagtacgtaagcacttggatctcgccaggatggaattggaatgtatcctcaagagacagcagcaagaagtcgaagagtcccgcaaaatggccaataaaaacatcatatcctcctttctattcacaaacaactattatcaaatctttcccagatatctagaaagcagacactatgacaaatcttcaggctaggaagttcttcctggtatctaaactaattccttctgttgcaatctaaactcaatctcttactctatcctcaatgaaaaccaagagacactgctcatcctcac

SEQ ID NO: 246649 - DNA, 1000 bp, Homo Sapiens
agtaagttaactttttttttaattaaaataatgccagatacaaagttaactattttctgatgagtaacgcaggatggagtctttgcaataaacagctggaccacaagtcgtggtgacgtgatgctgctcaatttcactgaggcttacacgcctggcattttaacttccactgtttgaaagtattacacctttcttttttcgcactccctcacagttctaaaaagctctgaactcatttcgttcttcttttcttcccttgtcttttctctcttcaaagatatttcatgatgattctgcttttcagaactttagctgagagtaatgaaatatcaatcttttgcacaatggcaactacatcccttttctgctctcttgggatagtcagaatagcaactgcccagcgtgaacaataggacttcttctcagttctgagagattggctgttgctgaacagcagtgcatagaaataatccttggcaatcccatgggtgacatttctctttccttatcacccatgctgcacacagccggaacttgataagacacccagaaagaagataatggctgctatcaagctgtctaggtagaaataataataataatctgtttatggaagagcagctgtcctattgttttgcatttcatgaaatctcagagtcagaaccctctcttccatgccagccccatccccattcctcatgccaatccaatcactttggggttttaatgatgggcattttattccctgatcttttgatacaatagacaaggatgcatgtaaatctcccataatcatatccagtcacaggatgtgcttaaaagactagagaagaggcattgtattggaagatttgaaagctgggaggacgttgtaatgaatataggcaagcccggtattcctttttaaaatatgcacaaaacccagaattactgcaaatgaatagttcagttatcattccagtctgaaagcttaaccccccaaggattaaggtaggtaggt

SEQ ID NO: 246650 - DNA, 1000 bp, Homo Sapiens
ggcaaattacttttttattgacagaaacaaaatcgtaactctccagcattttatgttttcttaccattcctccaataacagaaaatactaatgagaaggagaatattacaatgaaaggaagcaggagagcaaataagagattcgacctacacatggttttgattctgcgtgaggccggtcatacccagatgaaaagctagacatccagctacgtacatccctggagatacccagacgatggaatggaatgttcactgtggctctaagtcagagcatctcatttaagctttatggacagtctgcgcaggatgtgtctgtgtggggacttctcctgtgcatcatgggaggtttagcagcatccttggcctcactcgccagatgccaatagcatccccctctcctagttgtgacaattgcaaacatatccagacattgccaaatgtcctctggggggcaaagttgccacagctgggagccactgctctgcaggtttggacgctgtgcctgcaattccatgcagcatcacgggctattgatcatgtgtcagacggagcttaaattggtcgatcgcatcctcaagtagccactccagagcgtgattatctgacacctgtaatttaccatcctggttacatggggggcaaacgtggaattatgcacatcagcgggcccagggcctgttttccatggacttagtgttcctgctgagcatggcctcggtctccccgagttgttaaagacattgacgcctcagaactgactctgcctccacttaatcagctcaccagaaaattacaataaaaatcatctgccacttatgaaattgccgttaaaatggactatttcctgccacctggggacaggctgctgtttctctttcagcatcggtatctgagatgctgtctctgggaaacagcgatcatagatgctgttgagacactccattggccacggtgtgtccctggattgaaaccaaagtcacaacaatgagtctgaaacg

SEQ ID NO: 246651 - DNA, 1000 bp, Homo Sapiens; identical to SEQ ID NO: 161475

SEQ ID NO: 246652 - DNA, 1000 bp, Homo Sapiens; identical to SEQ ID NO: 161481

SEQ ID NO: 246653 - DNA, 1000 bp, Homo Sapiens
gagacagagtctcgctctgtcgcccaggctggagtgcagtggtgcgatctcggctcactgcaagctcctcctcctgggttcacgccattctcctgcctcagcctcccagatagctgggactacaggcaccagccaccacgcccggctaattttttgtatttttagtagagacggggtttcactgtgttagccaggatggtctcgatcttctgacctcgtgatctgcccgcctcggcctcccaaagtggaaatttttttttttaagttacagaaaccacagttgagaatttcacagtaatcaacccactggcacgtctgttatgaggtcttcatcatcccacaaacgcgttgttccgccttgatcttgtgaggcgctggccctcttcttgtggagttctcaccggctcagagggtcagtgtgagtgagccgatgtgtgccgcacacccaggatgtctacaggactgggggctggaaaattgagtgacatctcttgccctggcacctgtggcaggcagttctgggtaaccaacaggaatccctcaggctgtggggctggacgggagactgcagcctcctgactgagtgtgcaggtgggagacgccgccgagtcacttgttggaacgtggcccgaaacaaactgcgggttttgctgggccctccctgttgctactggaagagtcctgtcacatggataagcaccccgcccctcacggccccaggacatcgggtgcccttcaaggtccaggggaaggcgccctgcctggcgcagcctggagtctcccgtccacagccggggactgcttcacacctggtgcccacattctgcctctcgttaaacattgcatgcgattcctgcgagttctctggcatgagacgatgacctagtaatggggtcgcagcagggacgggaagctggccaggcgcaggctgtgctcgcagggacgggaagctggccaggcgcaggctgcggtgtggcacagggggaccaaccagagggaa

SEQ ID NO: 246654 - DNA, 1000 bp, Homo Sapiens; identical to SEQ ID NO: 161503

SEQ ID NO: 246655 - DNA, 1000 bp, Homo Sapiens
accaccaaaatggttttatttttgtcattgacaacaagcacaacactgcaattgtatcattattttgtttagtttcttaaatattacttaagtatgcattaaaaatatgtttacattttaaaaatgtgacactttaaagaagtcctctgtaaacacgatcccttctcaatatattttcctgctttgtttcatacataaataacttaatctacaaagtcataaataatactatcaactcttatggcctggaagtatatacaaattttggagtctgacaaaagtgttctttatgattttataaataacacatagtatttgtagtgttgattataaatcaaatgactttttacaaattcctactgtctcctcaacctgttctaccagtaacagatcttccagtttacttggttggtaaagatgccaggcatttaaaaagtcaaaatggtcaaaattctatattaaaaaaaaaaaaaggcagagaaggttgctatttaaatattaccaaatcttaataaaaccacttcagcttgtctgaaaaacaaaaaatgctagtaaagagtgaatgcttgtacaatcatataaatggtactcaataaaatctaaaatttaagaaataataaaatcagatgaaatccatattagttttgcaaaaaaactccactgagattctattacaggaacagaatcaatactattctacattttctaaaatttatttctaatcttcactttgatgagttaaaattttaaaggcaagaataatgacaaacaaaacaattctgaaaagccatacttataatccttgacatcaagatgttaaaaaggttttttaaaaaaagccatacttgagattcctaatatagaacatttgattgtttagttttgtttaatgactggaaatccttatttcttcaaaaaatagcaagtatcctttgaaacacatcacccatctaataagattgtttagttttgtttaatgactggaaatccttatttcttc

SEQ ID NO: 246656 - DNA, 1000 bp, Homo Sapiens
tttgagttaatatagtacatttatttttcagactgacattcagcttaaatatgccagtatgtgatttaatccacaggtacctgatgaacacattattgtcagattggttacagttgctaaacgctatctgaaggtcattcctagtcatttatacgtgtcagggtaaaagtgaagcgatttgaactataaaaatacctttgaaataatttatcaatgtattaggtaagctcagtttcagaatgataaactgttagaccaaataatgtggctaattaacagtggtacgatttctagcctgagggtttaaaatgggcttaaagtaactgtctttaaactgaactcaaagaatgcaaaagcggcaagttcagacaaggcaagaacaggacctttagtccattttaagccataaatattacacaaaatatgcctctaactgaaactgagaggtataaaaacatatttcactctttgtaaagaactttgtgaggaaatataactctgtgattgtatagacactttcctcatgacactttgacattcacgaacagtagattgtgctgcagtttgtaaacgttttacgttgcataaactgctccttgattttcaaatgtagtataatactgtctactaaaactcctttttgtttcaactaagtactctcacatatattagtttataataatgtttgttattatttttaaagtgttctccattcaaggaaaagaagtaaattcctatgtcagatggttgaagactagctattagccagagaggtctagatggtaaaatccatcttctagcctcaaataagctccatgaacacagaggaatgccaggtgtcacacagctttccttcactcgaattcattcttgactagagcctgtatatgcctgttccaggggcatttaaactcttaaaggatttcttctgatctttactaaatacattaaggagaacgccaaccagtgcccttttgtgtactgggacatgtagtcatgt

SEQ ID NO: 246657 - DNA, 1000 bp, Homo Sapiens
ccaggaagtgaaaatgacactttactgttttagtttgcatttctctgcttacaaatggattacacgcattttcatgtgctgttggctacttattcattcagaaaacatactaagtgctggctctttttcatgtcctttatcaagtttggatcatgtcatttgctgttttctttctgatgtaaactctcaaagtttgaagggtattgtcttttcctgacacatacgttgtaaataattttctggcttacattttgacttttaatttcattcacgatgtttttaatgaataattttaatttttatgaatgcaagttaaaataattctttcattgtggtttctgacatgtcatgccaataagggtcttctcctccaagagcacagaaatatttgccaatactgtccttaaaatcggtcacagtttcattttttatatatgcattttacttcaattggggcttcattttactggccctatttgaagcaagtttctcagttaattcttttctcaaagtgctaagtatggtagattgcaaacataagtggccacataatactcccacctcctttgcctcctctcccaggaggagatagcctccatctttccactccttaatctgggcttggccaagtgacttacactggccaatgggatattaacaagtctgatgtgcacagaggctgtagaatgtgcactggggcttggtctctcttgctgccctggagaccagctgccccacgaaggaaacagagccaacctgctgcttcctggggggagacagtccctcagtccctctgtctctgccaatcagttaacctgctgcttcctggaggaagacagtccctcagtccctctgtctctgccaaccagttaacctgctgcttcctggaggaagacagtccctcagtccctctgtctctgccaaccagttaacctgctgcttcatggaggaagacagtccctcagtccctctgtctctgccaaccagttaacctgctgct

SEQ ID NO: 246658 - DNA, 1000 bp, Homo Sapiens
gctgggcatagaatttatttatttatttattttttaagacggagtcttactctgttgcccaggctagaatgcagtggcatgatctccgctcagtgcaacctccacctcctgggctcaggtgtttctcctgcctcagcctccagagtagctgggattacaggtgcccaacaccacacccggctaatttttgtatttttagtagagatggggtttcaccacgttggtcaggctggtctcaaactcctgacctaaggtgatctgcctgcctcggcctcccaaggtgctgagatcacaggtgtgagccaccatgctgggctaggcatagcattgtaacacagacaaagcacaaaatacttgggcaatatctttttacatttggcttgtctagactccatcctccatcccctcatgcgctggtgtggtgcagaccagaatatcacccacctatactgcagagtggatttgggtggcatcttggcttcctgcacaagacttgcctgttccccaccacatcccccttgttctcagggtccaggattccaggaggcagggatgtgggcaggcagggcaggtggcccacccagttcactcccacgctcgggacctgcagagccggctctccaagacagggtgttttgaccaagatctgggtttctggatttccatttgagcacagctggactacacaggctgaagctctctctgccgagatatagatatttccctggcgaagatctttcaagctgacatgaagacatggccacccgctggaacgtggtgtgtctgccgtggcactcttgtaatttgtgaggcaggttcctgaggaatgcagtgcataagtgggaaatggtgggaagttctcgcatccccctcggctgaaagtgctgcctgtgcaggttggtagacggtactttgagcaggaagaagacacggagcacattcctgttagctatgacagagagaggcagggtacacactggacatttcaagcccctgcaga

SEQ ID NO: 246659 - DNA, 1000 bp, Homo Sapiens
ttttagatagtaagaatcttacactttattagataataaaacataattgatatttgcttaagtaacaaaaaagttaagaaattgggttataagcaaaggaacataagtgtaaaatgtgtagaaagataaatattttccaaataaaattctaataaaaggctaaacattctcaaatattttacatacatgaagaataaattatttctggttaacatgtttttgccttagtgccaaaaaagccagaacaaatttgataagctcacattaaaatcaaagttttctagatatgaattctatataccatctctatatttgtttagaattttgcaaaattcttagaagattgcatgttagggtgggggaagataaatgcttgccaatactgacatggttaattaacagacaggcttgaaaggagaaggctagaagagggaagattatgtcactaagcatagctacaaaaggaaaagccacatggaagcagagacaaaggcaatcccgacacacagaggcatgtttgttgcggctcagggtttctgtttttcaagtgttcagagacgaattccagcaagacttctggtttgagtcaagcctttcaaccgaggtgcttggcatacttaacggaaaaagcgagtacattcagatttagttttgctagatattaaactagaaaactggatgacagtaaaaccaatacagaaacaaaaagtcatgtttccagtaaagaaccgtacacacaagcaggttttgcttattaatgtagcaggagagcatggaaatcggagttcagactctttagaaaagacaaaaggcaggggaggggagagaagaaaaggaggaatgcagagaagccctccaagaatgatgagtgattcgtgcaggagagggaaatacagacgttccgtccatgtgagattctgcttcaggtattggacatcgttccctccacctgcacctagaggatatgtgttcaggatctcgctatggttagttacccatg

SEQ ID NO: 246660 - DNA, 872 bp, Homo Sapiens
  misc_feature (779)..(787): n is a, c, g, or t
cggcccaggagcccgccacctcccacccccacagggacatgcagcctggccaccatgagacctcaacccctgcaggacccagccaagctgaccttcacactccccacacagaggatggaggtccttctgccaccgagagggctgctgaggatggagcctccagtcagctcccagcagcagagggctctggggagcaggacttcacctttgaaacctcgggggagaatacggctgtagtggccgtggagcctgaccgccggaaccagtccccagtggatcagggggccacgggggcctcacagggcctcctggacaggaaagaggtgctgggaggggtcattgccggaggcctcgtggggctcatctttgctgtgtgcctggtgggtttcatgctgtaccgcatgaagaagaaggacgaaggcagctactccttggaggagccgaaacaagccaacggcggggcctaccagaagcccaccaaacaggaggaattctatgcctgacgcgggagccatgcgccccctccgccctgccactcactaggcccccacttgcctcttccttgaagaactgcaggccctggcctcccctgccaccaggccacctccccagcattccagcccctctggctcgctcctggcccccgggaatcctggggggggccggggaggttccatccgggtttcccggaattttggccgggagaaatttagggcccccaggggttttctcccgcaaaggaacccttttccacccaaaagccagaaccctggggatannnnnnnnnatttttggaaccccggggttttccccccaaaaattgaaaagaggacccctctccccccccaaggtcccaccttctttttggggag

SEQ ID NO: 246661 - DNA, 1195 bp, Homo Sapiens
  misc_feature (411)..(432): n is a, c, g, or t
  misc_feature (699)..(728): n is a, c, g, or t
tcatgaggtcactgggtcagaacccaacagaagctgaatgcaggatatgatcaatgaagtggatgctgatggtaatggcaccattgacttccccgaattttgactatgatggctagaaaaatgaaagatacagatagtgaagaagaaatccgtgaggcattccgagtctttgacaaggatggcaatggttatatcagtgcagcagaactacgtcacgtcatgacaaacttaggagaaaaactaacagatgaagaagtagatgaaatgatcagagaagcagatattgatggagacggacaagtcaactatgaagaattcgtacagatgatgactgcaaaatgaagacctactttcaactcctttttcccccctctagaagaatcaaattgaatcttttacttacctcttgcnnnnnnnnnnnnnnnnnnnnnngttcatttattcattctgtttctatatagcaaaactgaatgtcaaaagtaccttctgtccacacacacaaaatctgcatgtattggttggtggtcctgtcccctaaagatcaagctacacatcagttttacaatataaatacttgtactaccttaatgataaggactccttaaagttccatttgctaatgattaatacactgtttgggctggccagtttttcatgcatgcagcttgacgattgagcacagtcaggcctttgtattannnnnnnnnnnnnnnnnnnnnnnnnnnnnncctattcaaatgggttctagttcaatttgtttagtataaattgtcatagctggtttactgaaaacaaacacatttaaaattggtttacctcaggatgacgtgcagaaaaatgggtgaaggataaaccgttgagacgtggccccactggtaggatggtcctcttgtacttcgtgtgctccgacccatggtgacgatgacacaccctggtggcatgcccgtgtatgttggtttagcgttgtctgcattgttctagagtgaaacaggtgtcaggctgtcactgttcacacaaatttttaataagaaacatttaccaagggagcatctttggactctctgtttttaaaaccttctgaaccatgacttggagccggcagagtatgctgtggctgtggacttcagcacaaccatcaacattgctgttcaaagaaattacagtttacgttcattccaagttgtaaatgctagtc

SEQ ID NO: 246662 - DNA, 1083 bp, Homo Sapiens
cgggtaggtgatggctgttctagagtatccccggcacgaggtaaagatgatgtgttttgtttcctctaagcctgggagccccctactctttgactcgactctggacttagagacgaaggaaaacctccaattccctgatcgaagtgtgcaaagaaaggtgtctcctgcctcaggtgtttccaagaaggtagaaccctcagacccagtagcccggcgtgtctaccttacaacacaactgaaacaaaagaagagcacactggcatcagtgaacatccaggctcttccagacaagggtcagaagttgatcaaacaaatccaggagctggaggaagtactcagtggtcttaccctttccccagagcaaggaactaatgagaagagtaacagtcaagtaccacagcagagtcacttcaccaaaactaccactggccctccccacctggtgcctccccaaccccttcctcgtcgtggtacccaacctgtgggttctctagaactaaagtctgcctgccaggtgactgctggaggatccagtcagtgctatcgaggccatacaaaccaagatcacgttcatgcagtgtggaaaatcacaagtgaagccatcggtcaactgcatcgctcacttgagtcatgtcctggtgagacggttgtggcagaagatcccgccgggctgaaggtccctttgctactacaccagaagcaggcattggcttggttactatggcgagaaagtcagaagccacaaggaggaattctggatgatatgggcttaggaaaaaccctgacaatgattgcgctcatcctgacccagaagaatcaagagaaaaaggaagaaaaggagaaaagcacagctttgacgtggctctccaaagatgactcttgtgactttacttcccatggaacactaatcatctgtcctgcctccctgatccatcattggaaaaatgaggtggagaaacgggtgaacagcaacaaactaagagtctatctctaccatgggccaaccgggattcacgtgccagagtcctctctacatatgacatcgtgatcactatcttttcctcgtccgggatcctctagaac

SEQ ID NO: 246663 - DNA, 475 bp, Homo Sapiens
aagtttgattttttttatttcaaaatgctttgcaattaaatgaattactgttcagaagtctcccacttttcatacaaaaatactgtgctactgatacagttgaaaaaattcaatgatgtctctcctgcaggagaaattcacagcatccccagggtcaacatgaaatctggccctgtccccgccactgggggctccccagggcctgcgttcctgataaactgggacaggttttccagggcactgaccaactatccaccaagggtcctctgcctccaaggacagaccctgaatcaataggcaggcaactttcccatatttcatgtaggggatatgtgggaggggggacagggaacttttcccattttccccagctggggccttactacctggcctggccctgtttcactttgggtggccatgagggagggtttcagtggtttgattgggtttttgcttgtttgcagagggaccgggg

SEQ ID NO: 246664 - DNA, 1215 bp, Homo Sapiens
aaaatgctttgcaagtaaatgaattactgttcagaagtctcccacttttcatacaaaaatactgtgctactgatacagttgaaaaaattcaatgatgtctctcctgcaggagaaattcacagcatccccagggtcaacatgaaatctggccctgtccccgccactgagagctccccaggcgtgcgttcgtgataaactgggacaggttttccaggcactgaccaactatccaccaagggtcctctgcctccaagacagaccctgaatcaatagcagcaactttcccatatttcatgtagggatatgtggagggggacaggaactctcccatttccccagctgggcctactacctgcctgccctgttcactctggtgccatgaggcaggttcagtgattgattggtcttgcctgctgcagaggacctggccagctccagaagggtcactcatcaggtcctgcaaaggtctgtatcattaatcagtgtcatcagtgtcctcagaagacactagcagagtccagggtgatgcgttcagccacaagcacaaagactgctttttctaaagagcaggatgaggtgaatgtgggaacggaaagcagttgtcacgaaggctgtgtggctctgctgggggagaggcatccacagtctgtgccaaggaggcacctcaccctgtgcagcaggagcgttaaggccaaaaaacaaaaggggccaacagaaaacagctcaggtgatggggggaggagcagcaagaaaaaacgacaaccgagaccaactgaaggttcggtcaggaatgcaggctcttccgtctaatacagtgtttaaaaagatccaaatgtgaactgaagatcattccagcctgcactttttatttgtaggcagaaggaacgggaataggttgaaggggcatgaatgggggctctcgccacctcttgtctgcacctctggaacaggtggtagccgaatcattcaagtcctacctggtcagactcccaaccacgctgaggcaggcccttacctggaatgcctcatgggcctccctcttgaaaagaccctcactctgtttggaaaagatcccttagcagccataatcaggaaagagactctagagcgacccagggcttccccaaagcggattttctgtcctgttttcagctggaaattgaagtccttgggggcctcgaagatgagcacgatggtggagcccaggttgaactc

SEQ ID NO: 246665 - DNA, 334 bp, Homo Sapiens
ttgatggttttgcactggtttttgtgaatgtttcttacaaaaagaaaaaggaacaaagaataaatagtgaccgtgaagaaaggtggtcttgatttggggttggggatagactggggcgaggcagaagcttgacaagaggctgctgatggctggagggagctgggagaagaggcgttccaggtcaccccaaacggagcgtagagcggggcccacaccgagctttcctcgctggacttaagggcccctgtccctcacccctttgccactgcctccttcccaactgtaaatctccttgccttagagtccccctgccctccaagctgtacgtctgtct

SEQ ID NO: 246666 - DNA, 1550 bp, Homo Sapiens
  misc_feature (273)..(381): n is a, c, g, or t
  misc_feature (483)..(520): n is a, c, g, or t
aagatactccatattcttccccgaatcacacagacagtttctgacaggcgcaactcctccattttcctcccgcaggtgagaaccctgtggagatgagtcagtgccatgactgagaaggaaccgacccctagttgagagcaccttgcagttccccgagaactttctgattcacagtctcattttgacagcatgaaatgtcctcttgaagcatagctttttaaatatctttttccttctactcctccctctgactctaagaattctctcttctgnnnnnnnnnnnnnnnnnnnnnnnnnnnnnnnnnnnnnnnnnnnnnnnnnnnnnnnnnnnnnnnnnnnnnnnnnnnnnnnnnnnnnnnnnnnnnnnnnnnnnnnnnnnnnttattctgtaccatcacaacttttcacaacgatggcaagccttatgtcttgggagcctgttttgctaggcaaagttacaagtgacctaatgggagctcaaannnnnnnnnnnnnnnnnnnnnnnnnnnnnnnnnnnnnncactcaagacctctaacagcctcgaagcctggggtggcatcccggccttgccattagcatgcctcatgcatcatcagatgacaaggacaaccctcatgacgaagcaacatgaattagggggcctcttggccttgggtcaaaattgtccatcagaaatgaacataaaggacctccagagcaagtgggactgtctgtcaaaagactctgtatatctttttgtggatgagttttgtgagagaacagagagaccattgtacctggcacaagggctgttcatgaaaagggagacttactgggaggtgcaagacagtggcatttctcctctcctcttgctgctcagcacagccctggattgcagccccgaggctgagaccagacaaagcccgggaggcagaaagatgcttcaagaaccaacactatcaatgtctttgcaaaatcctcacaggattcctgtggggtcccagcttttggaactgggaaacctttcttcggatccgcactcattccactgatgccagctgcccctgaaggatgccagtactgtggtgtgtgagtctcagcagccgcccacacgctcctaactctgctgcatggcagatgcctaggtggaaatagcaaaaacatggcccaggctggggccagggccagaggggaaggccctggattctcactcatgtgagatcttgaatctctttctttgttctgtttgtttagttagtatcatctggtaaaatagttaaaaaacaacaaaaaactctgtatctgtttctagcatgtgctgcattgactctattaatcacatttcaaattcaccctacattcctctcctcttcactagcctctctgaaggtgtcctggccagccctggagaagcactggtgtctgcagcacccctcagttcctgtgcctcagcccacaggccactgtgataatggtctgtttagcacttctgtatttattgtaagaatgattataatgaagatacacactgtaactacaagaaattataaatgtttttcacatcaaaacg

SEQ ID NO: 246667 - DNA, 987 bp, Homo Sapiens
ttggggctgttgtcctcaactccaaggacaaggctccctacctgatttatgtggaagtccttgaatgtgaaaactttgacaccaccagtgtccctgcccggatccccgagaaccgaattcggagtacgaggtccgtagaaaacttgcccgaatgtggtattacccatgagcagcgagctggcagcttcagcactgtgcccaactatgacaacgatgatgaggcccggtcggtggatgacataggcgagctgcaagtggagctccccgaagtgcataccaacagctgtgacaacatctcccagttctctgtggacagcatcaccagccaggagagcaaggagcctgtgttcattgcagcaggggacatccgccggcgcctttcggaacagctggctcataccccgacagccttcaaacgagacccagaagatccttctgcagttgctctcaaagagccctggcaggagaaagtacggcggatcagagagggctccccctacggccatctccccaattggcggctcctgtcagtcattgtcaagtgtggggatgaccttcggcaagagcttctggcctttcaggtgttgaagcaactgcagtccatttgggaacaggagcgagtgcccctttggatcaagccatacaagattcttgtgatttcggctgatagtggcatgattgaaccagtggtcaatgctgtgtccatccatcaggtgaagaaacagtcacagctctcctttgctcgattacttcctacaaggagcacggcagttaccaccactgagggcattccctcagtgcacagcgcaattttgtgcaaagttgtgctgggtactgcttggtctgctacctgctgcaagtcaaggacagacacaatgggaatatccttttggacgcagaaggcacataatcaaatcgactttggttcatctatccagtcacccgaatctggtttgaacgtagcttaggtacaagattgtggtgatg

SEQ ID NO: 246668 - DNA, 979 bp, Homo Sapiens
ttggcatctctccatgaaagtgagggatcattgggtaactcaagaagttcaacacaaatgaattcttattccgacagtggataccaggaagcagggagtttccacaacagccagaacgtgagcaaggcagacaacagacagcagcattcattcataggatcaactaacaaccatgtggtgaggaattcaagagctgaaggacaaacactggttcagccatcagtagccaatcgggccatgagaagagttagttcagttccatctagagcacagtctccttcttatgttatcagcacaggcgtgtctccttcaagggggtctctgagaacttctctgggtagtggatttggctctccgtcagtgaccgacccccgacctctgaaccccagtgcatattcctccaccacattacctgctgcacgggcagcctctccgtactcacagagacccgcctccccaacagctatacggcggattgggtcagtcacctcccggcagacctccaatcccaacggaccaacccctcaatacctaaccaccgccagagtggggtccccactgaccctgacggatgcacagactcgagtagcttccccatcccaaggccaggtggggtcgtcgtcccccaaacgctcagggatgaccgccgtaccacagcatctgggaccttcactgcaaaggactgttcatgacatggagcaattcggacagcagcagtatgacatttatgagaggatggttccacccaggccagacagcctgacaggcttacggagttcctatgctagtcagcatagtcagcttgggcaagaccttcgttctgccgtgtctcccgacttgcacattactcctatatatgaggggaggacctattacagcccagtgtaccgcagcccaaaccatggaactgtggagctccaaggatcgcagacggcgttgtatcgcacaggttcagtaggtatgtgggaggtatgtgtgg

SEQ ID NO: 246669 - DNA, 434 bp, Homo Sapiens
  misc_feature (21)..(21): n is a, c, g, or t
  misc_feature (24)..(24): n is a, c, g, or t
  misc_feature (324)..(324): n is a, c, g, or t
cggtgacccagctgagctgcntgnagccggctgagaccaacggtgagatcacagcctacgaggtctgctatggcctggtcaacgatgacaaccgacctattgggcccatgaagaaagtgctggttgacaaccctaagaaccggatgctgcttattgagaaccttcgggagtcccagccctaccgctacacggtgaaggcgcgcaacggggccggctgggggcctgagcgggaggccatcatcaacctgggccacccagcccaagaggcccatgtccatccccatcatccctggacatccctattcgtgggacgcccagagcggnggagggattacgacagtttcctttttgttacaagcgatggacgtttttacgtttttcctttggggcagccagagggccagcttttttccgatgacatttaggactggggt
